United States Patent Application Publication US 2005/0228172 A9 - sequence listing, part 7

SEQ ID NO: 22246 - DNA, 552 bp, Homo sapiens
tactgcagacctattgatgaacaagtttggaataatctctgttaaggaaaaatcagttgtcctaaaggagtgatttgcaattccagccttctagaactctggagtgctcatagtcattcattcattcaacatttatyaagcaccagttatgtgcaaggactgtgcaagattctggggatagagcatgcagctaaaaaaggcccctgtcccaatgagtcaaaggtatatcaaaactctgtaagtgaaatttgtttgctatactttaagagtgggggaaggtatataaatagaataaaataattataataaactgttaccaccagggtatctcaattgcaaagataagttgaaaatcacctctctaaagaagagagagagtctaaaggaatctgcctgtgtcatcatcaagtcccatttgctatatcccaaaggagtctctttatactagattttcaagtatcccatcataagagttaaaagtcattaggtccaaatgtgttctttattgtttgagggttttcatctatgtgtatttttactacctggggtttg

SEQ ID NO: 22247 - DNA, 555 bp, Homo sapiens
aacaataattttataattctattttagggcttctactgctaataaaaagtggcaatrattgatttattgcaaaatgacattttcttattaaacaacaattgcatattttatggcttatctcactaatgccacagagctaaatgccttgctttaaagtgtttatatttactagtgcaagatttgaggacatgtaaattttagtattcaatataaggtttcacctgaaaggcagagaaaagcatttcagtccattggcagatgaaggaatatacaaatccattagtatatacatagaatagaatattattcatcctttaaaaagaaggaaattctgatacatgctgcatcctggatgtactttgaagacattttttaagtgaaataagccagtcacaaaaggacaaatgccatatgattccacttatatgaggtacctatagtagtcaaattcatagagacataaagtagaatggtgattgccaggggctgaggagaggggagatgggcagtcacgtttaatgggtacagagcttcagttagggaagatgaaaaggt

SEQ ID NO: 22248 - DNA, 555 bp, Homo sapiens
aacaataattttataattctattttagggcttctactgctaataaaaagtggcaatgattgatttattgcaaaatgacattttcttattaaacaacaattgcatattttatggcttatctcactaatgccacagagctaaatgccttgctttaaagtgtttatatttactagtgcaagatttgaggacatgtaaattttagtattcaatataaggtttcacctgaaaggcagagaaaagcatttcagtccattggcagatgaaggaatatacaaatccattagtatatacatagaatagaatattaytcatcctttaaaaagaaggaaattctgatacatgctgcatcctggatgtactttgaagacattttttaagtgaaataagccagtcacaaaaggacaaatgccatatgattccacttatatgaggtacctatagtagtcaaattcatagagacataaagtagaatggtgattgccaggggctgaggagaggggagatgggcagtcacgtttaatgggtacagagcttcagttagggaagatgaaaaggt

SEQ ID NO: 22249 - DNA, 555 bp, Homo sapiens
aacaataattttataattctattttagggcttctactgctaataaaaagtggcaatgattgatttattgcaaaatgacattttcttattaaacaacaattgcatattttatggcttatctcactaatgccacagagctaaatgccttgctttaaagtgtttatatttactagtgcaagatttgaggacatgtaaattttagtattcaatataaggtttcacctgaaaggcagagaaaagcatttcagtccattggcagatgaaggaatatacaaatccattagtatatacatagaatagaatattattcatcctttaaaaagaaggaaattctgatacatgctgcatcctggatgtactttgaagacattttttaagtgaaataagccagtcacaaaaggacaaatgccatatgattccacttatatgaggtacctatagtagtcaaattcatagagacataaagtagaatggtgattgccaggggmtgaggagaggggagatgggcagtcacgtttaatgggtacagagcttcagttagggaagatgaaaaggt

SEQ ID NO: 22250 - DNA, 555 bp, Homo sapiens
aacaataattttataattctattttagggcttctactgctaataaaaagtggcaatgattgatttattgcaaaatgacattttcttattaaacaacaattgcatattttatggcttatctcactaatgccacagagctaaatgccttgctttaaagtgtttatatttactagtgcaagatttgaggacatgtaaattttagtattcaatataaggtttcacctgaaaggcagagaaaagcatttcagtccattggcagatgaaggaatatacaaatccattagtatatacatagaatagaatattattcatcctttaaaaagaaggaaattctgatacatgctgcatcctggatgtactttgaagacattttttaagtgaaataagccagtcacaaaaggacaaatgccatatgattccacttatatgaggtacctatagtagtcaaattcatagagacataaagtagaatggtgattgccaggggctgaggagaggggagatgggcagtcacrtttaatgggtacagagcttcagttagggaagatgaaaaggt

SEQ ID NO: 22251 - DNA, 556 bp, Homo sapiens
tctgtagcatctcaggtcactctcactactgactgacattgtccaaattcatgcaattccacttttactttgcagatgcagagatttatacacccagataaagcctctgagttgctgctgatgctgtgtggcttactttgttgaaacatgaagtgattcccaaagtctccaaatggctacctgtggaagtcttccagtagacagctagcttctattgcccacacagaaatattcactactgagctttctactggttctcaaatctgcattggaaattgtctgctcatagagaagtgggtttatcttgaagttattgaagcttaagtttttaggctcaccacctgtctgggctgcttctaagaccccagcaatacgattagagtgttgtgaattcaaagaattctttactttagtccttgccaagaaaacttgaattttcctgaaatcttacagctgatttatgataaaagctcaatattttccaaatttgataacggtcctaaaatgtggaaaaagcattacagattatgttttraaattaattagtaaaatatta

SEQ ID NO: 22252 - DNA, 537 bp, Homo sapiens
tcagtcagtcaacaaatactcaattagcacctgtcagtatcaggcactctgctaggtaccagtgatagaaaggggaacagggacaggttctgctcttgaacagccaaagcaggtgcttacgtaagtctacctgagcattttggcagcttagaacatamgattctcaagattcatcatagaatcagcttttgctatgttgcattctgtaacccttcttgaaaatcagcaatattaaaggctctgacccgttttacagtaaagaaatctgttttatcttctgtattccagtttcttaaatttatttgactaggtaatatttttcagccacataaccctattaacatccattgaacacactttgaaaaatactaaaagctttgtaaattccctgtataaaatcaataactcttttataaaagaaaaacagacatatctagcattgctttcacttcacagacacatgctgattacagtatttgtaaactgacaaacactgattgcttgataatgggctctactatttttccagccagtgct

SEQ ID NO: 22253 - DNA, 537 bp, Homo sapiens
tcagtcagtcaacaaatactcaattagcacctgtcagtatcaggcactctgctaggtaccagtgatagaaaggggaacagggacaggttctgctcttgaacagccaaagcaggtgcttacgtaagtctacctgagcattttggcagcttagaacataasattctcaagattcatcatagaatcagcttttgctatgttgcattctgtaacccttcttgaaaatcagcaatattaaaggctctgacccgttttacagtaaagaaatctgttttatcttctgtattccagtttcttaaatttatttgactaggtaatatttttcagccacataaccctattaacatccattgaacacactttgaaaaatactaaaagctttgtaaattccctgtataaaatcaataactcttttataaaagaaaaacagacatatctagcattgctttcacttcacagacacatgctgattacagtatttgtaaactgacaaacactgattgcttgataatgggctctactatttttccagccagtgct

SEQ ID NO: 22254 - DNA, 537 bp, Homo sapiens
ttttttctgtggttttatttctgtaatattttaagtcagattccttatttaaaatctgaaatggttagatctgtatttaaggttacaatcgacttggttcttacattgacaatgtcaaatatgtctatcttactacccttcttttttattattgttatacttcaagttctagggtacatgtgcacaaygtgcaggtttgttacatatgtatacatgtgccatattggtgtgctgcacccattaactcgtcatttacattaggtatatctcctaatgctatccctccccgctacccccaccccatgacaggctctggtgtgtgatgttccccaccctgtgtccaagtgttctcattgttcaattcccgcctatgagtgagaacatgcggtgtttggttttctgtccttgcaatagtttgctcagaatgatggtttccagcttcatccatgtccctacaaaggacatgaactcatccttttttatggctgcatagaattccatggtgtatatgtatcacattttcttaatctagtctat

SEQ ID NO: 22255 - DNA, 537 bp, Homo sapiens
ttttttctgtggttttatttctgtaatattttaagtcagattccttatttaaaatctgaaatggttagatctgtatttaaggttacaatcgacttggttcttacattgacaatgtcaaatatgtctatcttactacccttcttttttattattgttatacttcaagttctagggtacatgtgcacaatgtgcaggtttgttacatatgtatacatgtgccatattggtgtgctgcacccattaactcgtcatttacattaggtatatctcctaatgctatccctccccgctacccccaccccatgacaggctctggtgtgtgatgttccccaccctgtgtccaagygttctcattgttcaattcccgcctatgagtgagaacatgcggtgtttggttttctgtccttgcaatagtttgctcagaatgatggtttccagcttcatccatgtccctacaaaggacatgaactcatccttttttatggctgcatagaattccatggtgtatatgtatcacattttcttaatctagtctat

SEQ ID NO: 22256 - DNA, 446 bp, Homo sapiens
tggaacccaggcatgggcagctgtttaaatgatctccaaatggcccatggctgaatcatctccatcttcatgttgtttgccaacaaaacagacattctttgccacagttggtttttgtttgttcatttctctgatatgtcgaccctacttaatatagggaaatagaaaatttcctgattaaattaaatgagatcgaactcaagtctgtttggaagatggatttaggtggaggataaacagtagggtaagtttctggaaagtgaactcaaaatggcagcrccctggctgtcaaacctcatttccttttctcgtttccttttcatctcacatccccatctcataaatgctcatctttcctctgtgaactgactgatgtcaatcacatagagaacttcaaactccctcagagttcctttaaagagaatcaaccctaatgtggtttccat

SEQ ID NO: 22257 - DNA, 1186 bp, Homo sapiens
ctgattccaacagtgccactaattctcactaatcctcctcagctgagacagcctgtacatgacacttcatttggcacactcatacctccatggttttccaaagagcctgcggggaatgatggcagggccatggtgatcagtacctgggaataaggtggggtgagaaaatgttatactggcatcctcatcaacatggtcagtctatgtcaggtgaacatggagtggcagctagagacttgttagtcatcattgctatatgtgctttaaaccatattacacattttttgagggcagaaagggacattatttctccagtgttttctttctgtgacttgaatgttttttccatggaaaagatcaccatgtgtcctggaggaaacatgggccttagagcttgatgaccttaaaggtggggttcagccctcttggtgctctggggggacatgtacctttatctcattgaacctcagctttctcatctgcaaaataaatgcataataattaccccatgtatgyatggtgagtattgactgggattacacatgagaagtgctcagcacacctagtactaacacatagttgcataaaagttgatccaactaaaattatcttatgatgacctaccacatagcagaaaaaataatcttcagatacaggcttttggtattttatgaggcaagaattttgactaatgagattacccttcaaataatacatattactctaagtttctaggatataattcattctttccccttctctgttttctaattttgactcccttttgatagcattaacctaaaatggtgtcattttacaacaaagacagaaatggaagtcatgtaaaggtcaggtttctacaagggaaataagggaatagaattgcctgcttaagaacctgcatgaaatgagatgccatctcaccccagttgaaacggcttttactcaaaagacaggcaataacaaatgctggagagaatgaggagaaaagagaatcctggtacactgttggtaggaatgtaaattagtacaaccactacggagaacaggttggaggttccccaaaaaacaaaaatagaatcaccatataatccagcaaccccactgctaggtatatgacgaaaagaaagaaaataaggatattgacgagatatctgcactctcatgtttatttcagcactgttcg

SEQ ID NO: 22258 - DNA, 1000 bp, Homo sapiens
attgtggcttccacagcacaggcaaaacagggtaagcagacttaatattgggtaatttgaataatttaattaggctgtgaagtacaaaggctgcccctagttgcctgatgcctgggctttgcgtgattgcaggagggggatagtggtttgaagtgtaagagctagataaaggagtttgttggggttttggctttggtttaggcaggaaagatgtacttgaggtgactcctttactgtctctacgaattggctagctctgggaggggcagtatctccaggatcagcaagacccgagatgtcaaaatatcagaaaatgcaaaayataaaaaccataattaacacagatataagctcagttgctccatacagaattccagggtaccaccttagggcccagtcctttttcttcaaacctcagtcattgccccatgaagggccagcctatccagacacactgtacctgcatttggtttattgtggtgtgaggtgatctccagttgtgttcatgggatcttttggggtcaagtagctttcattttcagcccttgaaagcaaactatgtcttttgcttccctcctggacaatgagaatattgtaaaacggctatctgggcagttgttggggcaggatccttcatatctgatgggcagattctcctttttaaatattttaagtagaagcctttttattatatccttttttggaaaatagagtttgaataagttcaaggattcatgaaaagtatgtttactcactgtgagaggaacatcaatccgttactgtatcacctgggtgaatcacttccccagtatcatttgtgtaatttcaagttttctccagaagaaaataaaatccaagttaattttttgggtctctctctctctctcacacacacacacatacacacacctccttttcctttttaaaattttgagataattgttgattcacatgtggttataagaaataacatggagagatcctttacccagttttctcc

SEQ ID NO: 22259 - DNA, 563 bp, Homo sapiens
gtaagcttataaatatttgtgtacaagtctttgtgtgaacatgctttttcttagataaatgcccaggagtgraattttggggctgcgtattaatactataagaacttaaaagttatagtaaaattgatcaacagggaggccattggtgagccttgtaagagctgttttggtggagagttggagacagaaacctgattggatgagttcaggaaagattagcaagagagaaattagagacagttaatagagtaactcttttgaatggttttgttgtaagagagcttagaaatgggacagtagttggagaggtctgagagaaatagtagcatgttgatatgctaatgcaaagggtgagtaagagggaacaaatcatgttggaggtaatgaggatatagagctatggggaagaatgctagttttttaatcaatgagagacagtagaatgcagtgccaaaatagaggctcagcatttggaaatgaacactttatagataggggagatgttgaaaattttttctcataatgttggtttgatagtatctccactctgctttctctgttct

SEQ ID NO: 22260 - DNA, 563 bp, Homo sapiens
gtaagcttataaatatttgtgtacaagtctttgtgtgaacatgctttttcttagataaatgcccaggagtgaaattttggggctgcgtattaatactataagaacttaaaagttayagtaaaattgatcaacagggaggccattggtgagccttgtaagagctgttttggtggagagttggagacagaaacctgattggatgagttcaggaaagattagcaagagagaaattagagacagttaatagagtaactcttttgaatggttttgttgtaagagagcttagaaatgggacagtagttggagaggtctgagagaaatagtagcatgttgatatgctaatgcaaagggtgagtaagagggaacaaatcatgttggaggtaatgaggatatagagctatggggaagaatgctagttttttaatcaatgagagacagtagaatgcagtgccaaaatagaggctcagcatttggaaatgaacactttatagataggggagatgttgaaaattttttctcataatgttggtttgatagtatctccactctgctttctctgttct

SEQ ID NO: 22261 - DNA, 563 bp, Homo sapiens
gtaagcttataaatatttgtgtacaagtctttgtgtgaacatgctttttcttagataaatgcccaggagtgaaattttggggctgcgtattaatactataagaacttaaaagttatagtaaaattgatcaacagggaggccattggtgagccttgtaagagctgttttggtggagagttggagacagaaacctgattggatgagttcaggaaagattagcaagagagaaattrgagacagttaatagagtaactcttttgaatggttttgttgtaagagagcttagaaatgggacagtagttggagaggtctgagagaaatagtagcatgttgatatgctaatgcaaagggtgagtaagagggaacaaatcatgttggaggtaatgaggatatagagctatggggaagaatgctagttttttaatcaatgagagacagtagaatgcagtgccaaaatagaggctcagcatttggaaatgaacactttatagataggggagatgttgaaaattttttctcataatgttggtttgatagtatctccactctgctttctctgttct

SEQ ID NO: 22262 - DNA, 1360 bp, Homo sapiens
  misc_feature (1)...(1360): n = A,T,C or G
atgcatgtggctctactcttccaataaaactttataaaaacaggggccacagtttgcctacccctgctataggtgattcgttttctcttttcaatattgaaactattcctcaatcaggaccttctaaaattaacttttaaaaagctaatgtaggccagacgtggtggttccttctgtaatatgaacacttcagcaggcccaggcagtatgacaccttgaggccaaggctttgcgnnnnnnnnnnnnnnnnnnnnnnnnnnnnnnnnnnnnnnnnnnnnnnnnnnnnnnnnnnnnnnnnnnnnnnnnnnnnnnnnnnnnnnnnnnnnnnnnnnnnttttaaagttgtgagttttctttctttagctttattcattcaactagcaagcaaaacctctgaacatccagtttcaaaggtttctgccaaatgccctggctgtttagcttttctttcccttccctcattctgtctagctacaatcctcttgacaaacagagaagaaaggactggggtcacacgggagtagatgttcatttattacaagggtaataatgaaatgaatgatgagaataattataacttacatgcccatactcagaaatgatatgagctaaaaaaaaaaagtgaaattgtcagaatatgttctgtatgaacagttacccttccggttcttggggaactagcagtcacccggtgactagcctttggttgctcagagaacaatattgtaattctgtaatgaattctgtaattataatattgttctctgagcaagcaaaggggagactaaatgtgtatggtctccttggaagcatctcaacttctaatcatttaaaaattttacttcctcactgagaatgtaacctgtttgtttcccagtctttcgaagtgttaactgtctatctgctatgagccagttaatataatacatgtcaaatttaatgtgctaaccttgtactcaatataggagagacaattaaggttctccagcagcagtaagacattctctgagacagcaacagcccagtcaatgtcagctttsaagctggtgctggcctgatgctggctaaccacctgagagaaagctcgccaaggagaggtccacagtgggaggcaggtcatatcagatagcctataagcttttctcctactttcagataaagactcaaatatttattgattggcatatattttataaatatatatatagctagagagagagagagaatgttactacacaagggaacaatttatcaaaaagctgtcctgaaatcttcaaattatgcaaaggagctggattaactttgctggagcctaggatcaatcccacccaggtgacgtgtcctacactcagtgagaaat

SEQ ID NO: 22263 - DNA, 402 bp, Homo sapiens
ccagctactcgggaggctgaggcaggagaatggcgtgaacccgggaagcggagcttgcagtgagccgagattgcgccactgcagtcygcagtcccacctgggcgacagagcgagactccgtctcaaaaaaaaaaaaaaaaaaaaaaaattcaactttgaataaaaaaagttatgttcttttttgcctcgctaagtattagtagcaaatattcaggtatagctaatattttcatgcatcaaacataaattaaaaagaaatagtgttcagtataatcaacaggttcacaggaaaaaaagaaagaaaagaatggggtttgattttacccatgtctggaaagacaacatcgtgttctggaaggctctctgatgggaagtcagaggtgcagaagtgcaggagagctg

SEQ ID NO: 22264 - DNA, 1735 bp, Homo sapiens
tcattttctgcagttgaaagggacaatcccggatctgaaagaaagagccacagtgactccaagagtggagccagggcatgctggacactgcatagctatggccaagtgtgtcacctctgagggagatgtgagagaaacgcagagggatcgcttgtgactgtgccttctcgatgtatgatggactgttctgctcaaatagtaagtgtgaccaaggagccggtgaacataggaaacaaagaatatttcatttgacattataaggaatgcgacaattctagtcacttgaaagtgaactatatctgtcgagaattcctagttttaattgggaagaaatgcgcttctcttcttgaaaagccacaggttattgctgttatgtctaatatcagtcctctctggatttctcaaaagattttctgtatatcctaccattttccttctgttgctgcagtttggaagtagtttgttatcaggattatcaaagcatcattgctatttatgacaatgactttaagaaatgcaagaatatttggaacactgtagaaaaaatattttagcctggaaggcaaatactaatttcaggaacyattgatctgttataaaacaggaccactcagacatttagctctaagactttcacatatccgttgttagaggcgtatagtggggggcatgactcagcttctgcttaagtacaaggtgttgtctgcagcgaaggaagaatttgattgtagtatcaacagaaccagacagaactctttgaatataattatatatcttggaaactgactcatcaaagctattagattacatggcatcatttaagcatcactgggctctgtacttttcattatctgtactcttcattatggagtataataggctttatttggtacagaaattgggtctaagatgaaacaacttgtgatttttgaataaacttttggggattagttactttgatgttgtcaagatagcaccatagtaagtcctctgtctttcctcttgatttatttataatttagaatcagtttatgattttaaaaaatgtgacagacacagtggcatgcaccagtagtaccagccacatgggaaactgaggcagaaggatcacttgatcccagaagatagagaccaccctgggcaacatagtgagagccccatctcaaaaaaaaaaaatcagttcccaataccattccagaacacttttaatataaccagatgaaattgtgatcactactttactgtaatgtttaaaatggtcctcagtccatatttaagtacaatcttagtgtttctgtgcaacctaatatattagaaacaaaaattgtattgcatttgaataggaaatactctgaattgagggttatttcttttaacagttgcaattagattggttagtgacaattatctgtaattttcaggcaatgcctaggcaagtgcccaaggcacagtagcctcctccttgcctccgtgtgtgtgtgtgtgtgtgtgtgtgtgtgtgtgtgtgtagggtggtaacatttctgggaatttgtcttaacataaaatgataccacctttcacaaaacgacctagaggaagttggaaatcccactatcctggcttcctgctgagcaatatctgcttctctttctgactcaggctgatgcatctgtatacttagcttcacttctccagtaaataagggagagctttattataaaagacaacttctattgattttcaagggggtggg

SEQ ID NO: 22265 - DNA, 545 bp, Homo sapiens
tgacagggtggggctctgttgctgcatgagttcagtcttccaagaattgactggcagggcaaccctgtcacagaatatgctctccatttttggagaagtggctgagacttactgaagttctcaaagtgttcatcgagctcttatgtttatatgtattttgaaatccagtggttgaggtcagtaactcacatatgatgggtctgatgagttttracattgcattctttttccccccacgagacggtgtcttgctctgtcacccaggctggagtgcagtggcctgatctcagctcactgcaacctctgcctcctgggttcaagtgtttctgctgcctcagcctcctgagtagctgggattataggcgcacgccaccacacccggctaattttgtattttcagtagagacggggtctaccatgttggccaggatggtctcgaactggctactctcaaactcctgacctcatgatcctccgtcctcgggcacccaaagtgctgggattacaggcagaagccaccgctcccggcagacatcgcattcttg

SEQ ID NO: 22266 - DNA, 545 bp, Homo sapiens
tgacagggtggggctctgttgctgcatgagttcagtcttccaagaattgactggcagggcaaccctgtcacagaatatgctctccatttttggagaagtggctgagacttactgaagttctcaaagtgttcatcgagctcttatgtttatatgtattttgaaatccagtggttgaggtcagtaactcacatatgatgggtctgatgagttttgacattgcattctttttccccccacgagacggtgtcttgctctgtcacccaggctggagtgcagtggcctgatctcagctcactgcaacctctgcctcctgggttcaagtgtttctgctgcctcagcctcctgagtagctgggattayaggcgcacgccaccacacccggctaattttgtattttcagtagagacggggtctaccatgttggccaggatggtctcgaactggctactctcaaactcctgacctcatgatcctccgtcctcgggcacccaaagtgctgggattacaggcagaagccaccgctcccggcagacatcgcattcttg

SEQ ID NO: 22267 - DNA, 541 bp, Homo sapiens
tgtgactatgtattggcaatgcacttcatacacaatgactaatctatactgtgatgatttgactcaaaaggagaaaagaaattacrtagttttcaattctgattcctattcaccttttgtttatgaatggaaagctttgtgcaaaatatacatataagcagagtaagccttttaaaaaattttctttgaaagataaaatacatgagtttctaacaattagaaaggaaaaaatgaaaatatgaaataacaaaagtaaacaaaagatactttcaaagcagtgaacaaaacattttgacataagccataatataaattataatataaaaacataaaaaccatagtataaattgtcagtctttgagttggccacaaattcaatttaatgaaagaagagaagggatgctggaggtaaataaattcttagagtttctatctcatagagtttgctcttctggttctctagactgccaaagaacataaagatgtacaaggggacctagctgtagtaaaagcatacctataacaacaaaaactctaaaac

SEQ ID NO: 22268 - DNA, 541 bp, Homo sapiens
tgtgactatgtattggcaatgcacttcatacacaatgactaatctatactgtgatgatttgactcaaaaggagaaaagaaattacgtagttttcaattctgattcctattcaccttttgtttatgaatggaaagctttgtgcaaaatatacatataagcagagtaagccttttaaaaaattttctttgaaagataaaatacatgagtttctaacaattagaaaggaaaaaatkaaaatatgaaataacaaaagtaaacaaaagatactttcaaagcagtgaacaaaacattttgacataagccataatataaattataatataaaaacataaaaaccatagtataaattgtcagtctttgagttggccacaaattcaatttaatgaaagaagagaagggatgctggaggtaaataaattcttagagtttctatctcatagagtttgctcttctggttctctagactgccaaagaacataaagatgtacaaggggacctagctgtagtaaaagcatacctataacaacaaaaactctaaaac

SEQ ID NO: 22269 - DNA, 541 bp, Homo sapiens
tgtgactatgtattggcaatgcacttcatacacaatgactaatctatactgtgatgatttgactcaaaaggagaaaagaaattacgtagttttcaattctgattcctattcaccttttgtttatgaatggaaagctttgtgcaaaatatacatataagcagagtaagccttttaaaaaattttctttgaaagataaaatacatgagtttctaacaattagaaaggaaaaaatgaaaatatgaaataacaaaagtaaacaaaagatactttcaaagcagtgaacaaaacattttgacataagccataatataaattataatataaaaacataaaaaccatagtataaattgtcagtctttgagttggccacaaattcartttaatgaaagaagagaagggatgctggaggtaaataaattcttagagtttctatctcatagagtttgctcttctggttctctagactgccaaagaacataaagatgtacaaggggacctagctgtagtaaaagcatacctataacaacaaaaactctaaaac

SEQ ID NO: 22270 - DNA, 552 bp, Homo sapiens
tgcaatatttcaaatgttttgttattattatatctgttatggtgatctgttatcagtgatcrttgatattactattgtcattgttttggggcatcacaagccatgctccaaaagacaatgagcttaattgatacatatgtgtattcaaatggttccatcgatctgcccttcctccatctcaccctctcctcaggtctgttttctgagacacagcaatattgaaattaggccaattaataactctataaaggcctctatgtgttcaagtgaaagtaagagtcacacatctcttattataaatctaaagtgagaaatgattaagctgagtgaggaaggtatgttaaaagctgagacaggccaaaaggcccaggctggtctcgaactcctgacctcaagcaatccacctgccgcagcctcccaggtagctgagattaaaggcatgagccaccatgtccagcttctatgcattattttaaatggagtattgaagactctgttactgtagaactatttctaacttcaattctgtcaatatttgggtcacaggcctta

SEQ ID NO: 22271 - DNA, 552 bp, Homo sapiens
tgcaatatttcaaatgttttgttattattatatctgttatggtgatctgttatcagtgatcattgatattactattgtcattgttttggggcatcacaagccatgctccaaaagacaatgagcttaattgatacatatgtgtattcraatggttccatcgatctgcccttcctccatctcaccctctcctcaggtctgttttctgagacacagcaatattgaaattaggccaattaataactctataaaggcctctatgtgttcaagtgaaagtaagagtcacacatctcttattataaatctaaagtgagaaatgattaagctgagtgaggaaggtatgttaaaagctgagacaggccaaaaggcccaggctggtctcgaactcctgacctcaagcaatccacctgccgcagcctcccaggtagctgagattaaaggcatgagccaccatgtccagcttctatgcattattttaaatggagtattgaagactctgttactgtagaactatttctaacttcaattctgtcaatatttgggtcacaggcctta

SEQ ID NO: 22272 - DNA, 552 bp, Homo sapiens
tgcaatatttcaaatgttttgttattattatatctgttatggtgatctgttatcagtgatcattgatattactattgtcattgttttggggcatcacaagccatgctccaaaagacaatgagcttaattgatacatatgtgtattcaaatggttccatcgatctgcccttcctccatctcaccctctcctcaggtctgttttctgagacacagcaatattgaaattaggccaattaataactctataaaggcctctatgtgttcaagtgaaagtaagagtcacacatctcttattataaatctaaagtgagaaatgattaagctgagtgaggaaggtatgttaaaagcygagacaggccaaaaggcccaggctggtctcgaactcctgacctcaagcaatccacctgccgcagcctcccaggtagctgagattaaaggcatgagccaccatgtccagcttctatgcattattttaaatggagtattgaagactctgttactgtagaactatttctaacttcaattctgtcaatatttgggtcacaggcctta

SEQ ID NO: 22273 - DNA, 552 bp, Homo sapiens
tgcaatatttcaaatgttttgttattattatatctgttatggtgatctgttatcagtgatcattgatattactattgtcattgttttggggcatcacaagccatgctccaaaagacaatgagcttaattgatacatatgtgtattcaaatggttccatcgatctgcccttcctccatctcaccctctcctcaggtctgttttctgagacacagcaatattgaaattaggccaattaataactctataaaggcctctatgtgttcaagtgaaagtaagagtcacacatctcttattataaatctaaagtgagaaatgattaagctgagtgaggaaggtatgttaaaagctgagacaggccaaaaggcccaggctggtctcraactcctgacctcaagcaatccacctgccgcagcctcccaggtagctgagattaaaggcatgagccaccatgtccagcttctatgcattattttaaatggagtattgaagactctgttactgtagaactatttctaacttcaattctgtcaatatttgggtcacaggcctta

SEQ ID NO: 22274 - DNA, 552 bp, Homo sapiens
acatgtgatgactgaggttaattcagtctgtcaaytacatcaatataattgccttcttgtaaccctaagtatggtgaagcagaattgaattctacaaaagtctttcatctgttttcctatggaataattaacaaacccaataaatgtataaatagcatgaagtccgacttattttagatttttacctcataatttcaaagcttatagaaatccagagaactaatcatcataatccataatgcctggaccagaagtccttgttctaagagtatcttgtggcatgctaaaaatgtattactaactaggaaatttaaaacttttttgttagtggttttaagagagctgactagctcatcaccacaattcacacagattaagaaaggaggttactctgtggagtggattcatagtgatcagaaaaaaaaaatcacaaaagaggaaaggagatagggaaggggaaagatactgtcaatctctacaattaaagtgatttttcgaatggtttgattttgtatttgcaaaggaaaggcagcttaatgtgatagaataaga

SEQ ID NO: 22275 - DNA, 552 bp, Homo sapiens
acatgtgatgactgaggttaattcagtctgtcaactacatcaatataaytgccttcttgtaaccctaagtatggtgaagcagaattgaattctacaaaagtctttcatctgttttcctatggaataattaacaaacccaataaatgtataaatagcatgaagtccgacttattttagatttttacctcataatttcaaagcttatagaaatccagagaactaatcatcataatccataatgcctggaccagaagtccttgttctaagagtatcttgtggcatgctaaaaatgtattactaactaggaaatttaaaacttttttgttagtggttttaagagagctgactagctcatcaccacaattcacacagattaagaaaggaggttactctgtggagtggattcatagtgatcagaaaaaaaaaatcacaaaagaggaaaggagatagggaaggggaaagatactgtcaatctctacaattaaagtgatttttcgaatggtttgattttgtatttgcaaaggaaaggcagcttaatgtgatagaataaga

SEQ ID NO: 22276 - DNA, 552 bp, Homo sapiens
acatgtgatgactgaggttaattcagtctgtcaactacatcaatataattgccttcttgtaaccctaagtatggtgaagcagaattgaattctacaaaagtctttcatctgttttcctatggaataattaacaaacccaataaatgtataaatagcatgaagtccgacttattttagatttttacctcataatttcaaagcttatagaaatccagagaactaatcatcataatccataatgcctggaccagaagtccttgttctaagagtatcttgtggcatgytaaaaatgtattactaactaggaaatttaaaacttttttgttagtggttttaagagagctgactagctcatcaccacaattcacacagattaagaaaggaggttactctgtggagtggattcatagtgatcagaaaaaaaaaatcacaaaagaggaaaggagatagggaaggggaaagatactgtcaatctctacaattaaagtgatttttcgaatggtttgattttgtatttgcaaaggaaaggcagcttaatgtgatagaataaga

SEQ ID NO: 22277 - DNA, 521 bp, Homo sapiens
taattttttctataactgaattttaattttaaatctccattctgcctggtaggataatttaaccccagccattttaaagaaaacatagtcaaatcagaattttcactctcaaatctgccttccccccaaccccagtcagttcagggtttctaccaccctctgttccctagatcatrtctaaattctgaggagttttcacagagccacgtgttgagggagagggaggcatctgtccctgctggcatctgcggagttgtacatcatccctaaaggaaatttctagaacatctgggttccccatctggtttctggtagttggtccaggaaagttaccccatatccttctcatctctgacttagtcttcaaacctgctggcccctctcagctacttttgagcccctcataagggagtgtgaaggccttgggacattttgggtgctcttccaaactactgtaggatcacacgggatctcatggagttcttgcaggctttgctgcctagacatgccaggctgccatt

SEQ ID NO: 22278 - DNA, 524 bp, Homo sapiens
tgcatttaacttgagtattttgtcatttagattaataactcagaaatctgttagtgcaaccgttcttatgttacttttcttagtgctatgaaatgtgcagttttgaatctctgaaatgttataaatgaccagattgctaattgctttggatgctgtgaaaaataattactccacattatttttratatttaattgacagtgtaatgcatttaactaaagacctgcaataaactatttctaattactgagggtggtggagtggaaaagtaggctgtaaaactttacaggggaaacaatgtttctccattatgttaaaagtcattgttgatatgactttttcagagacaaaacattcccccaaataagaagttctagaagtctagaaagagttgtggaatatttctactcatgacatagtaaggattgttttaaattattacttttgaatagattgtactggtgatagatgtcatatacttaatttattatacttgcagtaaattttttttcagatggcagaactt

SEQ ID NO: 22279 - DNA, 667 bp, Homo sapiens
tctctaaatattatttctgacatctctacttacaagctaataatattttgtaattgaacaaaaggggaaattgtaacctgtaggtaaattcccaaagcttggagatctgttttaactgtagcaataatcttttgttgttctggcagatgatatcataaacacatattttctttgaatgagccttcttgtttggtacaaggcattatttgggaatatatatatgtgtgtgtatatatacacatatacatatatacatatatacacacaaggcgttatttgggaatatatatgtgtgtatatatacacatatacatatatacatatacacacacatatatatacacatatacacacatgtatgtatatatacatatacacatgtatgtatatgtatatatgtatgtatatacatatgtatatatgtgtatatgtatatacatatgtatatatgtgtatatgtatatacatatgtatatgtatatatayacatacatatatatatattcccaaataatgccttgtaccaaggcaaatatatatatgtgtatatatatatttcctaatccattgtacactgtttggtagaactgttatatttattatacatgattatactgatgttccttatttaagaatcccacttctgaaattttaatttatccaggat

SEQ ID NO: 22280 - DNA, 1219 bp, Homo sapiens
aacacctgtacgctgcccatttaaatatatgcttcagacaaatcttttaggggtttcaaaaagggaaaaactaatgcttttccgccccagcatacattatccttcctgtgaatgctgcaggcagaaattaactctctccaagctggtttatttagtctgtctttccatgtaaagcctgcattccatgttaagggactggcagttaacagctttctcgttcctttctgcctgccttcctttcttcaatcattcattcagtaagtaagtatttactgacatccattccatgcaaaagcactgtgttgtccccatatcttctccagagacaactttgacaaggatcctgctcccaaactgctcacaacctggctcaggtgacaatgggcccagatgtgcccaaatgtacccaaatgttacctgsggacctcactgcatctcaggaattggctcggacagtttcaaggcttgtttgaatccacagttctcctcatgacatctgcaaactcctggcctttttgctctgctgctacacctgtgcctgttgccttgatcgggcaccagcacctcacaactttggtaactttgtggaagaactgaggacagtggagggcaattgcatctcacgccacatagctgtcggctgtcttgatggctctccacctcactctgctggctctcaaagcgtgggctctccaaaaggtgacccacctcactacgcactcttttccaaacagcgtaagccctgtccgctctgcctcttctcaccctgcttctctcacagtgtgtacttgcaacagaccagcctccttcctggtatccaagaaatttggaaaataaagttctctccatccttttactcaagtaactataatacaagtggaaaaattacagaagtcataaaagtatgcctgcccccaggcaggcaattaataaatatattaaataagcatatctgttgaaaaggggattggaaaaggactattgcggttcaggggagggaaaggtagctttcataaagaattcagagaaagaagcttttctccaaaaagcagagtggcacatgggcaggcaccaccttccactatctagaccttcctgatccttctctacatctgttttgtttcctcttttctccttttgaacatctgcccacctctttgtgaaaaaaaaagaaaaacaggaaatgaagggattttgaaggtctgaactcaggattcag

SEQ ID NO: 22281 - DNA, 540 bp, Homo sapiens
tggctccagggcctgagaacttagctcttcttctaggccactccgtgtcctgtgatgagtgtccattgagcatttgctgggggtggagacagggtttagcacttgtggaggctgaatcccctgccccagggagctaagcatagtgggaggtgcagttctgggcagcctgggcagcagacggcaggcagagtcaaggggtgctccggtagagagccctgggagtcrtgaggtggggagaccgcgtcctctaactggggaagtctgccaggccagggaagcccggggaggaggagaggtttaatctgggacttagacacatacatgtgtggggcaaggcttagacacatacatgtgtggggacaggggattgaattccagcattccaggaaaccttggccccattgtagctgtgtgaataggagtagaagagtagatggagcagagaggcccctgagtgccaggctgagggctaggggctctgatgtaggcagggcctggcatcggcacacactgtcacaggctgggtgagataaagccacc

SEQ ID NO: 22282 - DNA, 599 bp, Homo sapiens
tgtgaaaaataacttacatttgtaaggaaattaaacttttcaaagtatctgcacgtgcttatatttggttcttataatacttccatagataggcaagggaaatgtcaaactcattttgtaactgataaactgaagcactgatgtgtgaagtggcttatctaaatccattgaactatcaggtttccaatttagcgtgctaaccgagattgtctaaattcaaatatactacaagctgtytgcctttaaaatgctgctgttgctttcttcctcttcctcctcctctcccttctcttgcccccaccctttacttcgtcatcttttttcatggtcagcaaaaatgctgaacaccaggaaagacaaacactttccttcttatctcaagatatttacctacggaaagtctaaagtattctggattgtctttaatattgattgtgctttggacagttcatttattcttgggaattaaaaggaagatttaagtggacagttagattcacccatctctctttacataaatatgaatattatttaagctgaaatgaattttaaagcaaatgctcatttcttcacaaatacttatttttttactatagtat

SEQ ID NO: 22283 - DNA, 657 bp, Homo sapiens
ttagtaactttatataaaatgtgtgagacaaaaacttattaaggttaaatagaattgtttcttctgaataatctaacaaaggaaaatataagtgattgaatcataagatataaggggggtraagtattaaaaataacttttttgtttgataacttgagaatttagaagattttgccaagtatgtgttgttgcttgacttcttaaatatggcattgatgaatttaaagtaggagcatcagttattacttctgattcattaatggccagaattttgtgtttggtgtaatagttgtgtcaccattcttgttgctttttaaaaatcaggctaatcatgtggtccatgtctcttcaaagcttgacctgcacaaatgccatatttctatttggaccacatattctccattttgcattgagcagtagagtacagtggaaagggaataagaatactgattattctgaacagtttagtcccaagagaatagcgttttaaaaaagaaaaacaagatttggagtcattgtgggttatttttggtgggatggaggatcttaaaaatgcctaattgtgagagaatcaattgctgaaagtgttaaaatttctgaaaataaatgcttaattacatatacaggaattaaatagtttggaagagggttggatta

SEQ ID NO: 22284 - DNA, 618 bp, Homo sapiens
gtattactattggccgcaaattacaggtgagaacattgtaggcacagggaagctaagtaacttcttcaagactatctttacgggttaataagacacagaacagaacccaggtctgccttgaaggcacattctatttatcaacagacttactaataaattaacgcagtggaagaactgaagatggggatttattttcccagytgagttggtttgtctaactcacaaccaaacacaacaaagctgatgaacaaggcagagaaagacaacgctcaggagtgagaagtgacaagaagattatgacagcaataatatcatgtatgtgaaaagtttactaaaactgacatttgttgtaataaatggaaggtgatcccatgcagagaaaatattttcagatgggcctctccttataaatttccaattttgagtgactcagatggctgaacagctgatgctattagttttcagctcctgctgctataatattaattgtaggaggcaaacctatccagttgctacacagatgctagatgctaggtacacacacacacacacacacacacacgcacacatgcacacatgcacacatgcatgcacaggataagatatgctatgactgcg

SEQ ID NO: 22285 - DNA, 578 bp, Homo sapiens
aggatggctccaaggaggcatttatctctttcaggatgtgctaacagtttttaattagatttaaaaagaggaagaaaggtcagggagaaaagatgatgagcctaggcaagatgggtacatacaggaaaaagataatgcagtttaatggagcgggtacctcaagtatgaagcagagtgagtgtcaataaaagtaggsataaataggaaaatattatggaatgctctgctttccatgttaagaaacttagatttaattctgtagtgtgtggtttatcaagtaaaaaaaaaaagttcatttgcatacacatacaaatgtagagacggacacatataaagttgcctgtgatttcagccatcccacctacatccctggaagtaaatccacatgttgaagatgggatacgttgggatgaaggggaatccctcaaagtattttaagtagagaatttcatgatcacatgttagtttaaatacattactatcacgtttcatgacaagcaagtctggagtcagggagtacaatacaaagatgttctgtatctaggcaagagatgacaaggttatgaaattgagcatta

SEQ ID NO: 22286 - DNA, 732 bp, Homo sapiens
tggaaaggaaactcattcatctctgtggaaatatgatgagtatgaatgagtttccctcacaatggaaaacccagtcaattaatgtgttcactcaatggacataaacccaaatctgctacttagtagttttgtcttgtgcagattatttatattttaggccttggtattcttataagaaaaatgagattgctaattcacacttcatagagcttttctaagaattataatgagaattggtacaattaaggcacccaataaatggtagaaaatataattactaatagtaaaaaataatccctttgagtctcatttcaaataaacmcagcatacatatttcctaaaattgttgggaaattatataagatagcatgtatcatatgaaatgcctgatacttaacacaatttttattttaaaatatccttgtctttagtccaagaatagaaaaagatcaaatctgtcttccatgatcctacctcccctctttgttctcccccttttttttcttagctgccaatgtgggatctgttgtcctctccacattttccccagcccagagatatgggacccttgtgattcccctgttctccagaatacacattattagagaaagactctgttttatggtgtgtattggtgtgtactgtacatatttacacacacttaaatacacatatagtatatgcgatgctgtatgatgggtaaaatatattctatctaaagatcaaaatgta

SEQ ID NO: 22287 - DNA, 732 bp, Homo sapiens
tggaaaggaaactcattcatctctgtggaaatatgatgagtatgaatgagtttccctcacaatggaaaacccagtcaattaatgtgttcactcaatggacataaacccaaatctgctacttagtagttttgtcttgtgcagattatttatattttaggccttggtattcttataagaaaaatgagattgctaattcacacttcatagagcttttctaagaattataatgagaattggtacaattaaggcacccaataaatggtagaaaatataattactaatagtaaaaaataatccctttgagtctcatttcaaataaacacagcatacatatttcctaaaattgttgggaaattatataagatagcatgtatcatatgaaatgcctgatacttaacacaatttttattttaaaatatccttgtctttagtccaagaatagaaaaagatcaaatctgtcttccatgatcctacctcccctctttgttctcccccttttttttcttagctgccartgtgggatctgttgtcctctccacattttccccagcccagagatatgggacccttgtgattcccctgttctccagaatacacattattagagaaagactctgttttatggtgtgtattggtgtgtactgtacatatttacacacacttaaatacacatatagtatatgcgatgctgtatgatgggtaaaatatattctatctaaagatcaaaatgta

SEQ ID NO: 22288 - DNA, 642 bp, Homo sapiens
agcattttttgtaccatttatgttattcatgtgacaaatggattgccgtaaatgttctaacatacactttgcttcttttaaatagtgactgatattagtagatgtaatggccaaccttcaggtcttctgtctagagagattaatggcaagtgctttggtttgtaaactgagaaaacaaagaatcagaaacaatgctcaaacagaaatgcgattataaatgacaagaatattgagctttctcaactaatgtaggaagattgaaaacaggcataaaaatagaagtggtgttagttgcaaccatgtagattttttttttctgggcattagtaggaaataatatatttattgccaaatattaaacatttaatactatagatgccttttaaatgcctaagccctgcacaaaataatttactgtgccatcttcagagaatgtgtgtttcttaaagtcctttagaggaaaattcaagcaacctgggaaattgtgtcagggtaatctgatattttccttttagtatgggtcaaatatgcatttaayggacaattcaagtaaaaccgtttgagatctcacttcctttagttttctcgaagtgtcaccttcatggttgtctgttctgatgcttgaggtttctgtgtttaagg

SEQ ID NO: 22289 - DNA, 555 bp, Homo sapiens
tgagaccgaatatcggcagtgatagcctatcacttctgctatactctatgcactagaagaagcaagacactactaatgcagcccaaactcaaggggattgcttaaggctataatacatgaggagatggagatcactgggggctgcttagatgctgcctaccacaggctacatrgctattcttttacaatcttgatttttaacttacagcaacttgtactggacagactggaatagagaagctcctaaaattgaaacgtcatctttagatggagaaaacagaagaattctgatcaatacagacattggattgcccaatggcttaacctttgaccctttctctaaactgctctgctgggcagatgcaggtaatactactgatggaatgcaaatagataacctctcatcacagtgaatgtgagcactaacagattttactacaaaatgaaatcccatcacttagatctcctttctttggtctgtaaacttttaagtactagtaaatttaagtactagtaaatgagtcttaaaatgaactttctggggtttgggtggag

SEQ ID NO: 22290 - DNA, 521 bp, Homo sapiens
tgctaatctatgactgtaatggaagtaaaatatcctatttccccattctatcactgtgtcactatcactatgtcactatcatttttggcaaagcagctgaaggacctcattttccccctttgttttaaaaggaaccaaaaaactggagtgtacactacctgatggaactggacggcgtgtcattcaaaacaacctcaagtaccccttcagcatcgtaagctatgcagatcacttctaccacacagactggaggaggtgagccccacaaattctggacaagcctgaaaaggccaactgttccagaggacacaccacttgttttamcaaaagtcagtacctgacttgactcattaagccctctgaggcttttgtttcatcacctcctcattggcagataagatccttcaaggatgtttttcatcctttcatgtttttgaaatcatccttttacttcacccagaaatcgaatggtattgctcacatatagcttaaaaagtagcaaagctattggataatgtctc

SEQ ID NO: 22291 - DNA, 509 bp, Homo sapiens
actatgttgtttgtcctccctgcgcccttcccccatctcccaatgccttttgtcctccagcccctttaggcaggccaagcagtgttaaaaggttactaatgccagggcagtatctctgaaagacactgttttcttttaaaggttcttactggctcgttgtatatgaatcgagccactggaagttggrttaaagatcagcttatttcacccacactatagaacagacagtaaattgttctggtgtaataaagtcattcattcatacattcattccttcagcaaaactatgctttggaaggcagtgtaagtaaaggcttagccaaatctctttgctcttgtttgtaaagtaaaatttagttttatttttaatgctccaaattttaattttggtgtcatctcaaaagataccagcctataacaatttagtggagttcttacagtctagtgtacttataagcatttataactactatttgaggcatatggtagttttcaggggtagcttggtg

SEQ ID NO: 22292 - DNA, 509 bp, Homo sapiens
actatgttgtttgtcctccctgcgcccttcccccatctcccaatgccttttgtcctccagcccctttaggcaggccaagcagtgttaaaaggttactaatgccagggcagtatctctgaaagacactgttttcttttaaaggttcttactggctcgttgtatatgaatcgagccactggaagttggattaaagatcagcttatttcacccacactatagaacagacagtaaattgttctggtgtaataaagtcattcattcatwcattcattccttcagcaaaactatgctttggaaggcagtgtaagtaaaggcttagccaaatctctttgctcttgtttgtaaagtaaaatttagttttatttttaatgctccaaattttaattttggtgtcatctcaaaagataccagcctataacaatttagtggagttcttacagtctagtgtacttataagcatttataactactatttgaggcatatggtagttttcaggggtagcttggtg

SEQ ID NO: 22293 - DNA, 553 bp, Homo sapiens
ccagtaactttgacaatctgaaatgtacaacttttaaatcatacaccctttctcagcaattccacttttaagaatttgttttagggagaaacgagaatgtgagcaatgtttattatgctgtttmctgcaatgatatttataacaagaaaaatcagaaatacatgaaatgttcattaataagctgtctttatacatatatgacataacgttttgtagccttaaaatggtagtatagacagacatctgactaaaagacccctataagaagtgattaatgtgaaaacaccacttacatagcaaaagaaccattttggttttaaaagttttgtatatacctaaattctagaaggaccattaacacttgttatcacttgaagtagtgatcatggataacttttacttttatttcacattattctgcattgcttgtactttattatttgtattaagcatggattacaataaagaaaaatacgtgagtcatttggccccatatcttactctgctttcgccaagcaattcagagatttctgggaagtatcaaagataaaaa

SEQ ID NO: 22294 - DNA, 488 bp, Homo sapiens
aacctgttatcacaggttatagtcaccctgttgtgctatcaaatggtaggtcttattcattccttctatttttttttttttggtacccgttaactgtgtccaccttcccctgacccctactacccttcccagcctctggtaaccatcctgttactctctatgttgcataaggactctttaaatgcaaggtttttggaattaaaacttttgtctggtccttttctggggtgggggaggtttagggtagaagagatttgtaaattccatctctcttttacttttctaattaaaatccmcctgcagacattaccatttgctagttggcttcagaatgtttcattaagaaaactagaaataccatttgacccagccatcccattactgggtatatacccaaaggactataaatcatgctgctataaagacacatgcacacgtatgtttattgcggcactattcacaatagcaaagacttggaaccaacccaa

SEQ ID NO: 22295 - DNA, 651 bp, Homo sapiens
tgtaaatcagcttttttggagaaagcacatatttccatttaaaagatgctacaggacttcgcaacatccttgatgctttcacaaagtcattgctacttgagggtaaaagcaagtaacccagagacctggggactctgcagggaaaggaggtgggcagagcatcctgctggggcagggtccgcagggcccragggcaggggaggtgtttgggctggaaggagggcactgctggtagacaggagtgggtgcagaatgtccaggcccccggatgcctcaaggtgggcacttggtctgtggatcaggagccagcagacatttgtccggatgggatggtggctccgcttactcagccagagatggggaaagaataactttggaagagcagggtcatgaggtgtgggacaccatggcacccacagggtcatgcagcaggggctggggacatcagcctgaaaaggaggagctgcctctgagggaggaggagtgaagggagagtgcagtccatcctcaggcagcttccctgtcccccaggagcctctattatacttgggcagctcccaagaccactcagacacagtctgtctcctctgtgctctctgaggtcactgaagcctgagtatggagccacttgaactctggacaatgaaggaa

SEQ ID NO: 22296 - DNA, 651 bp, Homo sapiens
tgtaaatcagcttttttggagaaagcacatatttccatttaaaagatgctacaggacttcgcaacatccttgatgctttcacaaagtcattgctacttgagggtaaaagcaagtaacccagagacctggggactctgcagggaaaggaggtgggcagagcatcctgctggggcagggtccgcagggcccaagggcaggggaggtgtttgggctggaaggagggcactgctggtagacaggagtgggtgcagaatgtccaggcccccggatgcctcaaggtgggcacttggtctgtggatcaggagccagcagacatttgtccggatgggatggtggctccgcttactcagccagagatggggaaagaataactttggaagagcagggtcatgaggtgtgggacaccatggcacccacagggtcatgcagcaggggctggggacatcagcctgaaaaggaggagctgcctctgagggaggaggagtgaagggagagtgcagtccatcctcaggcagcttccctgtcccccaggagcytctattatacttgggcagctcccaagaccactcagacacagtctgtctcctctgtgctctctgaggtcactgaagcctgagtatggagccacttgaactctggacaatgaaggaa

SEQ ID NO: 22297 - DNA, 2435 bp, Homo sapiens
gatcctctggccccgtgagtcagctcagggagaggagccggtaggagacccacatctccagaattcaaggttgtcactgaccacgagagtgttcttctgcatctcagctttgtttctgtctcactcgattggaattccatctgttcagcagaattcagcccaccccattaggtggatgagatgctgtgatgtaaaaagaaacaagacaatttccgaaagtttggggttatgagaatgatctgggcctaggtgcggatggtccccatcagaagcaacaaaaacgtgtgctattatctctcacaaggtttttagccttccttgccaaaagttacttagcgagttgctgggtcacagggggtagcactgatccggagaagatccgtgagccttttgaccactgccactttgcaggtatacatactgaccctcaggctgcgggtccagacaaaccccaactcagccaagacaaacccctcccacctccagtgctgataacgacctttcaatagtctcatgctggagatgctttgggtctagatttattattattgttaataataatcaaaataaagattgtttgtttccccccacagtcctccacaaagattgattttcctgaggtccgcatgggtgcgcaaagccttccttttcttgagtctgcaaggtggatggatattttattgcatctatttcttagattctgaatgaatgattggtatcttattgatacactcacaagaggatggttttaaaatcacatatctttatctaatacctttatgagtccatcaattacatttattgggcaggccctttgatttttatgaagaaattccttttaagtaaggagaatggccatatatggaaatgcctttcctttcagtccatcaaagtcctgccttttccaagcaagtttcctacctagctctaagtcactcgttgtggaggttgctctgggtggcagagttggtgacagtggcttttcccagccatggttttcctgcagagggcttctgtcgggaagtgtagcctcccattattaaacaataattaagttctccaggctcagttccttacgcttgctaatcytggtgactgtttacatgctactatttgttaaatggcaaagtttattgatttggcaaattcagtcccacattgtggattttctctcagtctgtgttcctacatgtggttcagcatttttaaatgtcaactgcaaagtattattgattggtaattaaaagtgtagagaaaaattagcatagtagaagtttgcggtcattagtacaagtaccgttgggcaattatttagcgtgttttaacatgtattttccttcctggtattgacacagagtatcatgctcatcaaacagttcctgttttgctaaaaaggaaagttttagcatcaataagaattgaagacacgtatttctgttggaaaatttgcttgtcggtttccctgatgcataaacaagctgatccaaagggctacctgggctctggcaggagtgaaggggcagaatctgagctccatgggccatcctgagggggcttccctggcttccttcccaggacccagcaatgagggtcccatgttgaaactgaacaaggaaagtacaaacctggcttaggcagggaaaaaataaattgtttgtattaagcagttattttgtgtttgggaaatgtttatcccagattttctcagacataggacagatttcaatattttgcacaatttatttgaaagttacctatagtaatcaagtcatatgaacagatttttgttctgaaagcacgatcagaacattattattattgcttttggcatagactgagcaggacagtgacacattcaagatggaaggaaacttcgtaggtgtctgctctgtacaattgttggttttattgctttactcactagcactcactcccttacttgtacctgttatcttttttagcatatggttggtgttctgggactattatttgaatttttggattcctgaatgctgaagagagagcccacaggtggatggcatgaggtgatggaagtgggcgtatcaaatttacacttggaccaagccctgcaggcagtgtggtgtaatagtcaagaatgggatccttgattccctgagacggcatcctccccacatcccttatcagttggtgactattgaccaattacagttattgtagcctcccttggcctcaacgtgctcatattgaaatgtgatactaatacccagctggtaaagcttgtggtgaggactcaatgagataagaagctcaaggtgactgtaagatgactggatggcacctggcatttggtaaacacataacacatgtcagctgtttcatcccattgttgctgggagcgttaagcccctgggggctgtcaaggatctgcagcacatcaaaaaagaaagatgaaa

SEQ ID NO: 22298 - DNA, 1045 bp, Homo sapiens
cagaaaaaaatatatatcaakcaagaagaaaagaacaggaagctggagaagaagtagtgaggaaatagagaccgaggaccatgctctgtgaaaacttagtaagactcagggagtttgtctaacccccacccccatctgctgccactttcaactgcaaaactgtgaactctggcaggattttccagggacagccaagaagatagcaaagttacggtattatggcaactcccaaccaggccaaaatgggggagaaatggtggagtgtgtcatcttgaccatggcaacctggcctggaagggctgagctcccagaacactggccactaagtgatccctcctgtaggggtggatgcctgacaccgggactaagtgaaggcccttgagatggctggttccagcatttgctcacccagattggcagtcattaagggaagtaataggatccactattttgaggactttaaacatgcttggtttaccaaggttgcttgtttgacagtggggccagaacctgtaagatgcccagatgagcagtgccatagcaatgatatgaggcagcaggatcctcaaaaacatataaacagaagccatggacagtgtgtggccctacaagccgtgggcacccagcaaaccttcctgcagaaaaatggataatgaaatgtgtgctaaagccagagccaaaatggcctgtgctaattctgaatcctagaagcacagctttttgtgagctcccaggagatctgcttgcacaactgcattcttacagtgaggcaggacagagccaggttttgtgggacctaaaacatatcatttagaaagcctactttaagaaaagcacacaaaattagagatgtcaaattagtgagtatttattaaagatgagaaaagaaattacaacagttatacattttttaagttgataaatacatcaaacataatatttatatgaattaactgacccacctctatattttcctacatttcagctgcataaccttttaatgtttcttcataggatgattttacaactgcattgtctacagaaa

SEQ ID NO: 22299 - DNA, 548 bp, Homo sapiens
actcctatgggaactaagatttgaacagatactgggggtatctggcctgaggatctcagcattcctggttgaggccagccaaggatgggaagaagaacttcaaagggctttagaaatcacgtagttcaactctactttatgaagaaaaaactgaggcccagagaggcaaaagtcacaaagctacagtgacagtcagaattggaacccagcctcccactatccagtccagcaccatgtggaaacatcccacagcaataatcccatggagatttgggatttggaggcttgcaacactgtgcccaaacagcagacaaggctctggtcacagtcacccccaagtcccctgcttctttgttttttcttttacttttttttttttttttttttttttgagacggagtctcactctgtcgcccagactggagtgcagtggcacagtctcagctcacttcaacctccgcctcckgggttcaagccattctcttgcctcagcctcctgagtacctgggactacaggtgtaggccaccacgcccggctaacttttgta

SEQ ID NO: 22300 - DNA, 693 bp, Homo sapiens
gtaaaggttattgtataattagctgattcataacaaactgtaagtatcatatcagaaaatagaaccctttggaaactaatgacagatgatctacaaatagatagcctagcaatgtaaacattagtggggggaattcattaagttcctgctaaaagcatttgatttaattttgcctatcttttatcagattttttcaygtataagccaaaatgacaaatgataattatcttgaaggcatgtggcatgataaattggaagacacgtgatgtgttttctcatttttcacagtctcagattttctttttttggtctggtttgttgtgttacaaaaagctcatgatttttcacccatagttcacctcctgggaaataccataattaaggtctcaagaatgaaataggctggtacagtcatcgaatgacaatgagccatccatggtgttgggacatcaatgtaataacataaaaactattggttttgaaaattttcctctatataattgctgtttccacttctataaaactgaggttaatttaagatagatttatttctagtcagtcccactaatgttccaggacttttcatattctgtatcatttgatatgtattggcataaagcttttatatttttcaaacacttcagcagttttatgcattgagtttgttatgaaatgtcattgtgtcactttatg

SEQ ID NO: 22301 - DNA, 604 bp, Homo sapiens
agtatttgcttattccggacatttcatataaatggagtcacaccatgcggggccttttgcacctggcttttttcacttgacatcatgttttcaaagttcctccatgggacagcttgtgtcagtgctttattccatttcatgaccaaataataatacattctgtcgtacacagacaccatattttgttcattcatcagttgatgggctgttgggttgcttccacctttttgctctggtgaatattgctgctatgyacaggcctgtgcaagtatttgagtaacctgttttcaactcttttgggcatgtgactaaaagtgggattgctgggtcatatgataattctatgtttaattttttgaggaactgccaaaccaaaaggtccttttcaaaagtgaagaaaatcttctgaaaagcatccccggaagacttcctcgacaccttactggccagaatgatgtcacttctccatgcctacagcgtggtcttggcaaggagagtgatattaccaagactggcttaaactgatcaagactcagtttctgtactggattggcacccagtcacctctgaatgacactgtcgcttggaggagggtcatttctag

SEQ ID NO: 22302 - DNA, 537 bp, Homo sapiens
cttacaaataaggcttagctgctaatgtcctggaagaacataaatcttgcggtaatcactatcccaagtggtaatttatcgtgctcatttctgaattctgtcccctrtacgccccaatgcactgtttcctagatttgaacatccgtaagctgtctgtggaacatacttttatcattataaatagcccttgtttttgtcaagtaatctccagggtcacttcaagatgatcaaggattaagaaagatttccctggccaggcacagtggctcacacctgtaatcccagcactttgggaggccgaggcaggcggatcacgaggtcaggagatcgagaccatcctggctaacacagtgaaaccccgtctctactaaaaatataaaaaattagatgggcgtggtggcgggcgcctgtagtcccagctactgcggaggctgaggcaggagaatggtgcgagatggggaggcggagcttgcagtgagccgagattgagccactgcactccagcctgggcgacagagcgagactccgtctcaaaaa

SEQ ID NO: 22303 - DNA, 554 bp, Homo sapiens
aatcaagtacatttaagagtaaagtgaacactatcaaaataaaataccagctaaaattgggtattggatgggggaggaagaaaataagatgaaaaacagaggaaatatagtaatttcaccattacttatattagggaattaacaggtcttgtcaaaagaattaaataattaagaaaatcaaaactatggttttaaagtcaccactagagcaaaaataccaactagagaaaataaccacatggcataagagagtagaaaaagttatagaaacagaaagcatcaaacgagacccaagatcaaatatatgtcacattaatacaaatggattatattaaaagattagcatcatattataaagcaacacagaaatttatgcagtatataagagayaaagctaaaacaaaacaattcagaaagattgcaaaaataaagcataggaaaagctgtatattggtcaaatgcaaacctgatcaaaacaaagagaaaaacaagcaaaaagaggggtggagatactaatattagataaggttgaactcagggcaaaagcagtaaac

SEQ ID NO: 22304 - DNA, 453 bp, Homo sapiens
cgatcaagattaccagctcttccctgagtctccagctgaaagaccctcaacgtgaacaacatcacctcctccccgagtcctcaactgcacgaccctcaaactacaacatctcctcctccccgagtctgcagctgcacgaccatcaatctagaacatcagctcctctccgggtctgcagctataagaacctaaycgtagaagatcagctcctccgtgggtctgcagctggaagatccactaactagaacatcggctcctgtccaggtctccagctccatgaccctcaatcaagattatcagctcctccctgagtctccagctgaaagaccctcaatgcgaacaacatcagctcctccccgagtcctcagctgcatgaccctcaaatacaacatcagctcctccccgagtcttcagctgcacgaccctcaatctagaacatcagctcgtctccgg

SEQ ID NO: 22305 - DNA, 551 bp, Homo sapiens
aaagcagtcttaaaagaaatggaaggtaaatgaaacaaaacaaaacaaacaaataaacaaaaaagacacccacatactgcattcggggaaacaatgataagattgactaccaatttgttattagaaaaaaatagaggccaggaaatcatggaacaagaaaacaaatggaaaaccaaacaaaaacaaaaacccactctctcaacttagaactgtatacccagtaaagagattttttttaatatacagctgtaacaaagacacttttagaattaaaagccaaacaaaaaatgtgaagaaaatttattcacaatagacaaaaacatagaaaatactaaagagatatgatactagatttaacttggagctaaggaaagaacactagatatgaaaaacatatggttaaatataaaaatgtaatttttttcacattttcttaaactttgtgaaggtgawcatcaaataaaaaatgtaatacatactggcatatctaacatttgtagtagtaattcattgttattttaatgtgcaattcattccctaatgataaatga

SEQ ID NO: 22306 - DNA, 576 bp, Homo sapiens
aaagttccctgtccctctctaaaagtatcagacctctgattttgatgttgttgttgttttaaaattttaatctatttagaagattttatgttttagaagtttaactatctatctacctatttatctatctatttatctatttatttttagagaaaggggtctcgctattttgcccagtttgaaatgcagtggctattcactggtgcaatcatagcacactgtagccttctacccatgggctcaagcgatccttcagcctcagcctccagggtaactgggactacaggtgcacaggtaaaactctagtttttaatggtgcaggacccaaggtccagaagttttcctagaccttttctagatgaaaggacttttgcccttcttgaagttgtagacattttcctgatttagggcatctacaacgggaattcccaatccttcccccaggtaccgacaaattttgcccctattactcccatgaaggtcacctcagtggctcaaggatttggattactttgagaggagggtacygaagagcaggaagcatgaccagaaatcatgccatacatgcctatacca

SEQ ID NO: 22307 - DNA, 666 bp, Homo sapiens
tgttaacagcagatttatcagcagaaaccctacaatctagaagggattggagtcctatttttagcctccttaaacaaaatatttatcagccaagaactttgtatccagtgaaactaagcttcataaatggaaaaaaaaaagttgaagtttttttcagacaaataactgctgagagaacatgccactaccaagcaagcactacaagaactgcgaaaargagctctaaatcttgaaacaaattctcaaaatacatcaaaacagaacatccttaaagcataaatctcacagggcctataaaacaacaatacaacaaattttttaaaaacacacacacaagatattcagatttctgtgacccagtcttcccaccttgcttctgaggaacatcagctacatgcataagctgcctctacaatttctcctctctcccttcttccccctggaatttcattaccttattctccttctggtggtggctctgtcctgtggtctctggcaggtctcttgctgagagggacttcccctgtcgtgcaaccttttccagcctcaatatgtttcatgtgtttatgactctcaacctagctcttccttgatcaacctggagattctcaaacttgtcccagcttccactgagaatctcagtaaaatctgaacataatgcagtaa

SEQ ID NO: 22308 - DNA, 666 bp, Homo sapiens
tgttaacagcagatttatcagcagaaaccctacaatctagaagggattggagtcctatttttagcctccttaaacaaaatatttatcagccaagaactttgtatccagtgaaactaagcttcataaatggaaaaaaaaaagttgaagtttttttcagacaaataactgctgagagaacatgccactaccaagcaagcactacaagaactgcgaaaaggagctctaaatcttgaaacaaattctcaaaatacatcaaaacagaacatccttaaagcataaatctcacagggcctataaaacaacaatacaacaaattttttaaaaacacacacacaagatattcagatttctgtgacccagtcttcccaccttgcttctgaggaacatcagctacatgcataagctgcctctacaatttctcctctctcccttcttccccctggaatttcattaccttattctccttctggtggtggctctgtcctgtggtctctggcaggtctcttgctgagagggacttcccctgtcgtgcaaccttttccagcctcaatatgtttcatgtgtttatgactctcaacctagctcttccttgatcaacctggagattctcaaacttgycccagcttccactgagaatctcagtaaaatctgaacataatgcagtaa

SEQ ID NO: 22309 - DNA, 568 bp, Homo sapiens
tccctctgtrtctccctcactaagcttgctccctcactaagctccaaacacagtactccttttgtctttctttgttccttaaattctctgtgctctatccctctccagggcctttgcaagtgctgttcaacccctttctcttctgtgtgcctgggtagcatccacacatccttccggcctgcagcttggtgtcatgttcttgggaagccctctcagaccctgggtcctggttgtgctgtgcagccttcttcctatcgcttgccaaagctgcacttgaacattcgtttcggatcttatttgttagtgcctcccatgcattagactcttcacaccacaaggacagagagcatgcctatcttattcctatttattatcattgcatccctaccacctaacacatagtatggattcaataagtgcttgttgaaggagtgaataagtagaaagatgtgttcaggtagcacatatgcaacagctctgtgaatgtgggtgatgaattcatgctgagctggaccctagtccatacctggggaaaggggatagggtgtcacggcctcagccaggggtc

SEQ ID NO: 22310 - DNA, 568 bp, Homo sapiens
tccctctgtatctccctcactaagcttgctccctcactaagctccaaacacagtactccttttgtctttctttgttccttaaattctctgtgctctatccctctccagggcctttgcaagtgctgttcaacccctttctcttctgtgtgcctgggtagcatccacacatccttccggcctgcagcttggtgtcatgttcttgggaagccctctcagaccctgggtcctggttgtgctgtgcagccttcttcctatygcttgccaaagctgcacttgaacattcgtttcggatcttatttgttagtgcctcccatgcattagactcttcacaccacaaggacagagagcatgcctatcttattcctatttattatcattgcatccctaccacctaacacatagtatggattcaataagtgcttgttgaaggagtgaataagtagaaagatgtgttcaggtagcacatatgcaacagctctgtgaatgtgggtgatgaattcatgctgagctggaccctagtccatacctggggaaaggggatagggtgtcacggcctcagccaggggtc

SEQ ID NO: 22311 - DNA, 572 bp, Homo sapiens
tttctagttcactcccagactatgttagtcactagaaataaaagtggaacagaaattaataactttgatacatttagcaaatgtagtttgaaaatcttaatagttgtaactacaactaaatctatattaagtttcagcaataagccagaagattcgtcaaagtcttttatttgtagaaacaatttcaacaacattcttttcacttttttctgcaaaaatttacctatactacgagtctgatatatgactcaaagtttgcatctagatagatcgttaaaaatggttgactacacaataacagaaaggaaagaagaaaggaaggaaggagagaaggaaggaaggaaatataaaagttatattcaaaattggaaaactatttagttttaaaaggacagatagtcataatatataatgaccttaatatataaatactttttccatgtccatgaaaagatagaaaaacggtcaaagatatgtggcaagcagcctctaagatgatgcctaatatctcattttctgttattsatgcccttatatgatcctttccccttgagtatgaactctacaagatc

SEQ ID NO: 22312 - DNA, 573 bp, Homo sapiens
tttaacaccattaggaatttgataaataaaaattgaaacagtaatgaccacttttacagctcaaattgaaatatagaataatttaaaaattttacttactgagtttctaaaagaaataatgtttgtattcatgtttgtttctgagtataggttttagagatttcaaaattgaaaattttgatttattgaacgtctaaagggaagaggacacaacacatacaaacatgtgtcctctccccttgagacacacatacatttatgtgtatctgcatatttgtgttgaggattgagtgggccttgcaatagaaatgccctatgtctcataaaaaaactcagaaatgtttcaagttgttctcgttatactgtacattactttagatcctgtatgtttcatgtggcacccaggattcaaaaactaaaagatttgggttcttttcatctctaccatgaagtttatgarcttatatataattttttcccagagccttagctccttttctctataaagtgaacatcgtactcataactttctgtacaaggtagtaaaaattattgagataatgtatgtgaaaa

SEQ ID NO: 22313 - DNA, 511 bp, Homo sapiens
cttcttcttatcagtcaccaactgagctttccctgggaccacttcaaaaatcagctgttcatgagccccggtgccaaatgcccggcttctaagagatacatgaaaaccctgattcctcttttcatggggaagacgtctctgtccacccagtggacagcacaaacagctcctagcaccagaatggcagsgcaagggtaagagcgtgcccagtggggaggcgggaatgtatatacgtgcttccagacaggatgtacaagacaaagaatttgaatgactttttgaaacagtcatacggtcgcctgtgccaagccaattcccactcaggagacagcacttactcagtgtgctggaacaagcatccccctgtgtgaggaagtgactgctgccagcaagggcagctcacttggcagagaggagaggctggaatgaagactaaaggcattttcagggtgtgggctcccatcagtgacttctagagaggaaccctgaacccagtctggggtctggagtg

SEQ ID NO: 22314 - DNA, 569 bp, Homo sapiens
cacaaggtagaggcagaaagttttgtgtagcaagtgtggtaygtgcaaagggcctgtggtcgatggaaccgaggatcctgtggggctcagtgaggagggaaagaggagctcaggtatggcgtgccatggaggggaacacagtgaggccacagtcagtcctcaaccttgaaaatggccctttgactgtcctcagggtctagccttgcttgccatgttcattgggtctagcaccctctgcttgctcccagacagctttctcctgcctcccagctctgcatctctcagatcctggctctgatcccacgctgctgttgcttccactcatgtacccattgctaacggcatcatttcttggagtaattcattgcaaagttcatttcccacgataaacgcagtctgtgctcattacagtcaacagggtggcccaaaagagttcagttaagggaaaaaaaaatcaaattttcccttgaaaagaagccagtgatatggcttgggtccatcttcctgaggtttgaaaacttctctgttagtgttagttgcttttaggcctggtcctgctgcatatacaa

SEQ ID NO: 22315 - DNA, 1169 bp, Homo sapiens
  misc_feature (1)...(1169): n = A,T,C or G
gttcagtaggcagtttgatatccaggtttgtgtctctgttcgggagtctgggctgcaagaaaattcttaaaaagggcttagccgaattcctrgcacataatgaacattcaggaagtgtcagctacatatattaataatattattgtgtctcatattattattggtacataagaatgtaaccattatcaaccaaaaaaagacagaaaactaaagccctacagtcatggagaaaaagtctttcattcatttcaactgtgtggtaaaatgtacacccaatgaaaatacaaacataatccatttctttttttaaaaaaannnnnnnnnnnnnnnnnnnnnnnnnnnnnnnnnnnnnnnnnnnnnnnnnnnnnnnnnnnnnnnnnnnnnnnnnnnnnnnnnnnnnnnnnnnnnnnnnnnntaatgttatttttgagtgacttgtatgttgcaggtaacatattccagataacatattccagaaatcactgactatttgggacacaatgattggaagtcggagaatgcctggaatagattcttgtgcctgccttcaattcagtgtcctgaggcacatcaggagataaatggaagcttggtgagagtgataaattaggtactgacattgaggctcattggggctgactgtggtgagcaatgatctgattctcatgaagtatatcacatgctttttggaccctgccggatgtcctgtcaatctcacatctgtttctggctctggctcgggcaatcattgtaggcagcctttgactcagttgtgctatttcccatctcaagcttgcgctgagtatctttcactttcttttctgtgactttactagcatgtcttatctttccccctgcttctgaccgtggtccatgcagcctggaagtgaggaggagctaacaccaccatggagcctcgcagtcagtgggaatgggtggatagttccgagacgcactctgcagctcctcataaggtccaagtgagaaggagcctcaaccggccatggaagtgacccaactgcatgcacctgtattagcctttactctctccctggttcactttacccggtgcctcactcctactctccgggatcaccttgtattatttgcacataattttttagttcagactctgcttttgaagagagcctggcctaagatttatgact

SEQ ID NO: 22316 - DNA, 632 bp, Homo sapiens
tcgcaccaaacaagtttatcgtgtgtaaattttaaaaacaactcaaaacaatcatgatttttttttttttttttttttttgaaacaaagttttgctcttgttgcccaggctggagtacaatggcacaatctcagcccaccgcaacctccccctcccaggttcaagaaattctyttgcctcagcctcccaagtagctggaattataggcatgcgccaccatgcccagctaattttgtatttttagtaaagacagggtttctccatgttggtcaggcaggtctcaaactcccaacctcaggtgatctgcccacctcagcctcccaaagtgctgggattaaaggcatgagccaccccacccagcatgatcctcttatttgggtctatatgagaagcaaagagatgaaggtccttgcactccaagggcacagaaaagatcccacatttggagccgagggtgactacagagctggagcccagaatggagggaggcccagacaggggagacccaggggctgcggtgttcgtggatgaggtgactctagaggcagggtgagcgctggggccttgagtaccaccaagaccagctcagcctctagccagtgggcagggaggaggcaccccaggggctgagg

SEQ ID NO: 22317 - DNA, 725 bp, Homo sapiens
ttaaaaatgattcattttcaatgtcatcttataacccttaatgtaaattcacatctgtttcaatgcttccaagtgcaatgttcacttggaaaaacgtctaaagccagaaaacattgtgtactatagaacaataattctcaacatgaccacaaggtggctctcaacaccgaaatatgttattttccctctggacaagtgaatagaattttaccagaaatattagcagcaatttaccctataaatgggtcaatacttcaaaaacgtaaattcatctcaaccctctgatcacgttgtgaagcctaatttatattgttttaaacttcagacattcaaaaaaacacatsaaatggttgaaaacctttaaagaatttgaaggattttgaaaagaaatgattatttcagtagtctgcataattaattattcaataaccatttcttgggctttaaaaattaatttctcctctaattttgcacaatgttattctcactttacttccaactaaatgaaagcaaaatagatgcaagttaaactttttctctagtatgattaaagaatgtgaaacttaaagagaaagtatgtcaaagtttttagcctttgtaaagtccaattctaaaagtatatatacatttagatgatcaattatactaaatgtaaaatgtgtgtaatattaatagaatattttaaattagccatcctgatgaataagccatgaggttaaattatt

SEQ ID NO: 22318 - DNA, 622 bp, Homo sapiens
gctcatttctgtttatcttggtcataaaatatgcctcaatttgtaataaaataccaagagaggggaaaagaaaagaccaccagagaaactgagagaaatttgaagcaaacaggaaaaaaaaaagcaaaaagtaagtgaagcatgatgcaaaagagattttcaaaaagaagaaaaagaagaagagataaactgaaaaaatcttgaaaataaaaaatacaaagaagatctggggacttcatcccagtggtggcagactgggtaatttgtgccaactctcttgctgaaggaaatgaaaatatctgggcaaactataaaaatcattttctttgaagtatcayaaagctaaaaagagagtgtggagttactgggccaagatctacaaaaaaatagaaatctaaaaatgtgattctggcaacttaccacaggcatgtgggcctatcttgaagaggcagccaatagactgagccatgcttcgaatatcttcacagggacagggagacaaaatatgcagtatctctgatagggaaacttataaaatttcattaaaagacattagaagagacctaagtaaatggagcgatatactatgctcatggattaaaagactcactattgtattgat

SEQ ID NO: 22319 - DNA, 568 bp, Homo sapiens
aaamaacacataatccacaggatttcttttctatctataagtatttacttcacctagcaacgtatcctttgccacaatcctttttttttccttaatgccctaaaacttgctgcaaatgtgcttgtttttgtctaagttctgctcaagagagaaggaaggatgctgcaggaatgccatccacaggaggctgtctcaatgtaaaagtctctggatgtccaccagatctggaaatcatcgaatacagtgtggcatgaggcagtggaaatatcaaatacaaatcgcatcacaggggaaagtgctacacatcaaaactaacggatgatatagagtagaaaaagattagtaacaaacttagaagacagaaggtctaggaggaggttaggatgggaacaagaaataagtcaagagaagtttcttcagtcccatgatccttgcaagagtgcccaaggcgttttatccatccctggttatggtgttggaaacctgtgcaaaaccaaaagtacaagcgctctctgaagcacagtgcacatttttgaaaaggaaagtggctttgtgtagacactttcag

SEQ ID NO: 22320 - DNA, 568 bp, Homo sapiens
aaacaacamataatccacaggatttcttttctatctataagtatttacttcacctagcaacgtatcctttgccacaatcctttttttttccttaatgccctaaaacttgctgcaaatgtgcttgtttttgtctaagttctgctcaagagagaaggaaggatgctgcaggaatgccatccacaggaggctgtctcaatgtaaaagtctctggatgtccaccagatctggaaatcatcgaatacagtgtggcatgaggcagtggaaatatcaaatacaaatcgcatcacaggggaaagtgctacacatcaaaactaacggatgatatagagtagaaaaagattagtaacaaacttagaagacagaaggtctaggaggaggttaggatgggaacaagaaataagtcaagagaagtttcttcagtcccatgatccttgcaagagtgcccaaggcgttttatccatccctggttatggtgttggaaacctgtgcaaaaccaaaagtacaagcgctctctgaagcacagtgcacatttttgaaaaggaaagtggctttgtgtagacactttcag

SEQ ID NO: 22321 - DNA, 568 bp, Homo sapiens
aaacaacacataatccacaggatttcttttctatctataagtatttacttcacctagcaacgtatcctttgccacaatcctttttttttccttaatgccctaaaacttgctgcaaatgtgcttgtttttgtctaagttctgctcaagagagaaggaaggatgctgcaggaatgccatccacaggaggctgtctcaatgtaaaagtctctggatgtccaccagatctggaaatcatcgaatacagtgtggcatgaggcagtggaaatatcaaatacaaatcgcatcacaggggaaagtgctacacatcaaaactaacrgatgatatagagtagaaaaagattagtaacaaacttagaagacagaaggtctaggaggaggttaggatgggaacaagaaataagtcaagagaagtttcttcagtcccatgatccttgcaagagtgcccaaggcgttttatccatccctggttatggtgttggaaacctgtgcaaaaccaaaagtacaagcgctctctgaagcacagtgcacatttttgaaaaggaaagtggctttgtgtagacactttcag

SEQ ID NO: 22322 - DNA, 401 bp, Homo sapiens
atccccctccccacaagttaaaaggctgaaacttcacctcaaatttgttccctcagactgtagtttttctaacttcaagtatctttttatgacttttattgtttacacttaaatattatccacttattgtagaatagtgctgcaatgaacatacatgtgcatgttctttatcayagaacagtttatattcctttgggtatgtacccagtaatgaattgctgagtcaaataattgttctgtttttaactctttgaggaattgctgcactgctttccacctggttgaattaatttgcaatctcaccaacaatgtatcagcattccctttctcttcaacctagccagcatctgttatttttttgactttttactaatagccagtcttaactggtgtaagatggt

SEQ ID NO: 22323 - DNA, 401 bp, Homo sapiens
atccccctccccacaagttaaaaggctgaaacttcacctcaaatttgttccctcagactgtagtttttctaacttcaagtatctttttatgacttttattgtttacacttaaatattatccacttattgtagaatagtgctgcaatgaacatacatgtgcatgttctttatcacagaacagtttatattcctttgggtatgtacccagtaatgaattgctgagtcaaataattgttctgtttttaactctttgaggaattgctgcactgctttccacctggttgaattaatttgcaatctcaccaacaatgtatcagcattccctttctcttcaacctakccagcatctgttatttttttgactttttactaatagccagtcttaactggtgtaagatggt

SEQ ID NO: 22324 - DNA, 552 bp, Homo sapiens
agctactcgggaggctgaggcaggagaatggcgtgaacccggaaggcggagcttgcagtgagcggagatcgcgccacagcactcccgcctgggcgacagaacgagactccgtctcaaaaaaaaaaaaaaawaaataaataaataaataaaagtgagagacttagaaatggagaaaaaagagaaacaaccgctgttaagtaataaccaccctcaaatagacatttttcaggatagtatttttattttattagagatataaaagatatgaaaatatatcaaggatttgtttaaaagcaacaattttacattttttaaactaggaagagactagtctattgtggaaaatttaaaaattattacagttctgtcaaaaagtttttgtagtttacctagaattaactagaatagattcttaaattctagtttaatagaggggtctgtgtttgtgtgtttaactgcctgctaagttacatagactaatccactccaggttattattattattattattttgcaacttaagaaaaatagtagggacataggtatgtcgaa

SEQ ID NO: 22325 - DNA, 517 bp, Homo sapiens
tgagacagtctcattctgccgcccagtctggagtgcaaygacgtgatctcggctcacagtgacctccacctcccaggttcaaatgattctcgtgcctcagcctcctgagtagctgggacgacagatgcatgccaccacgcctggcaaatattttgtattttagtagagacgggggtttctgccatgttggcctggctggtctcaaactcctgagttcaggtgatccgcctgcctcggtctcccaaagtgccaggattacaggcgtgagccaccgtgcccggcctctaaacacttgtggccctgtcattcacccagcactcaaaaggtcgtctcacctgcccttttgggagctgggagagacagctcaaattgtcaccgcccccccaccgccccgtgctcctctgacagggctgtgggtggagccagctccagtccccgcgcccagcacagaggcaggcacggtgcacactgcctcaacagctcgaccaggagagtgggcagctgtacatctagggtg

SEQ ID NO: 22326 - DNA, 801 bp, Homo sapiens
tatgttggtatgaaaaattttttttaggattcctttgaggaagacaatatggaatcaacattttcgtaaaaagtgcccagacacctgtaaaaagtgacttaatcttctgtgtcacctttcagttatagcttttgtgatattgcctgaagcttctgaccaaatagtagaagagctcttaaaaccaatcatgttacaagaaaaaatgcctgttttagaaaactgatcagataatccctttaccaaaaggaaaacgtacaataatggaatccacaggcactacagctaaaggaagggtcttcagccttactgaggagagttactttgaagtgcagtgttgctatgcacgttgaattgatyaagccctttattttcctatgggtctctatcatgtttttatatcatgtaacatgatttgttagccgtctctctctctctcacacatgcacacccatataaaggtgtttatgcaggcactctttatgctcattatttctacacttttttctagtcatagtgtcttagattataattgactcttcagagtacggtggagatcaggtgagtggaggttggtgtggccttggactataattgactctttagtggagaaaatagatacattttctgaaatctgtgagttctggaattgtggcttgctcactaacttgtttgaaaaagactaagataataaatgttaattgaattaatggattaatgtgtccttttagataaggtaatatgcaatgtcaaatcactaagcaatttaaccaaggacaacatgattcaatttaaattttaaat

SEQ ID NO: 22327 - DNA, 538 bp, Homo sapiens
aactgaggcaggaaacctgggcaagtgctaggttcctgcccatgcaacaatccactttttaattcatttgtactgtatgaatctataaaactctataaataatacaatcaaaattctgtttctgacattaaatctcaaaatggatgagccagacctatgccatttttctctgttgaaataatttttaatatttgcagatttcctttatgcaatagttatttcaatggaacatctcagattatttttcatttggtggagaagtaaggccaaccttgatggggctgaataggccagcatttatagggcacttttgccagaatataacaagaataattggtctttcagagatgtctacgttctaatccctgcaaaccatkaatacattacatcatatggcaaagagaaattcaggttgcagatggaattaaggttgctaattaactgaatttaaataggctgggcatggtggctcacacttgtaatctcagcgcttttggagctgaggtgagaggattgcttgaggccaggagtttaagac

SEQ ID NO: 22328 - DNA, 639 bp, Homo sapiens
accctcacatagttatgatgtatcatctattttatacattattatattcagtttgctaatattgtattaatagtttttatgtctatcattaggagtattggttgaaaaaattcagcaataaaactgtttgaattgggactttctttctgagaaagatttttgttatggactcaatttcttcacaagattataaacctattcatgttttctatttcttctgcaagttttataacttggatttcaagtaatgtgtccatttcatcgagttttaaaaattattagcrtaagttagttaataatttccccttattctttaatattcatacaatctgtatcaatacctttctttcattactgctatttgctatttttttttatcctttttcatcatgctttttaggggcttaaaaattttatggatcttttcaaaaactaacttgccttaaatattctcaattttaggtatgctttatatttcctttatttttaaaaaaagttttattatctttaaaataaagataatattttaaaatatttttagtattgattaccatatttaagatttatgaggcttttcagtccttatacatctgatctctcaaataatgtcattttccttctaaggagtgttgcttaagc

SEQ ID NO: 22329 - DNA, 508 bp, Homo sapiens
taaatggacattacaatctcagtttcagaataaatttctcaactatggtggatttggaaaaacataacattatttgcaatktaccagattgaaaaatttgacagcacagcctggaaataattgctgataacttttatccacagtcttctaaatttgctattgctaaatacaataacaaatttttaaaatcccttaggtacaataagcattatctttcttgtagattagataaatgcacaggaagcactataaaggattactctttgtttaccagtctagtgaattaaattaaggaatatgtagctcccattctgtagggtactctggaaggcagtcatgaaaagttaccaggacacttagccacttctgtgattttacaagtcatatgctttatcttgacttatttcttataaactgagtagtaatatggaactacacattgggttcaggcatattaatctgtgttttccatctctgcttgtaatataagatctttgattattgatga

SEQ ID NO: 22330 - DNA, 508 bp, Homo sapiens
taaatggacattacaatctcagtttcagaataaatttctcaactatggtggatttggaaaaacataacattatttgcaatgtaccagattgaaaaatttgacagcacagcctggaaataattgctgataacttttatccacagtcttctaaatttgctattgctaaatrcaataacaaatttttaaaatcccttaggtacaataagcattatctttcttgtagattagataaatgcacaggaagcactataaaggattactctttgtttaccagtctagtgaattaaattaaggaatatgtagctcccattctgtagggtactctggaaggcagtcatgaaaagttaccaggacacttagccacttctgtgattttacaagtcatatgctttatcttgacttatttcttataaactgagtagtaatatggaactacacattgggttcaggcatattaatctgtgttttccatctctgcttgtaatataagatctttgattattgatga

SEQ ID NO: 22331 - DNA, 508 bp, Homo sapiens
taaatggacattacaatctcagtttcagaataaatttctcaactatggtggatttggaaaaacataacattatttgcaatgtaccagattgaaaaatttgacagcacagcctggaaataattgctgataacttttatccacagtcttctaaatttgctattgctaaatacaataacaaatttttaaaatyccttaggtacaataagcattatctttcttgtagattagataaatgcacaggaagcactataaaggattactctttgtttaccagtctagtgaattaaattaaggaatatgtagctcccattctgtagggtactctggaaggcagtcatgaaaagttaccaggacacttagccacttctgtgattttacaagtcatatgctttatcttgacttatttcttataaactgagtagtaatatggaactacacattgggttcaggcatattaatctgtgttttccatctctgcttgtaatataagatctttgattattgatga

SEQ ID NO: 22332 - DNA, 508 bp, Homo sapiens
taaatggacattacaatctcagtttcagaataaatttctcaactatggtggatttggaaaaacataacattatttgcaatgtaccagattgaaaaatttgacagcacagcctggaaataattgctgataacttttatccacagtcttctaaatttgctattgctaaatacaataacaaatttttaaaatcccttaggtacaataagcattatctttcttgtagattagataaatgcacaggaagcactataaaggattactctttgtttaccagtctagtgaattaaattaaggaatatgtagctcccattctgtagggtactctggaaggcagtcatgaaaagttaccaggacacttagccacttctgtgattttacaagtcatatgctttatcttgacttatttcttataaactgmgtagtaatatggaactacacattgggttcaggcatattaatctgtgttttccatctctgcttgtaatataagatctttgattattgatga

SEQ ID NO: 22333 - DNA, 530 bp, Homo sapiens
gtatattcacgacatacaatgtgtcatttttgtatatgtgcacattgtgaaatcattaccacaatcaagctaaatatatccattaactgccataggtactcggtgtgtgtgtgtgtgtgtgtgtgtgtgtgtgttaagaatacttaagatctattgtcttagcaaatttcaagtatgcaatacattattattaactatagtcatcatggtacacattaggtctccagagcttattcatcttaaattggaagtctgtatcctttgaccagtatctcactatttccccaacctccaacccctgaytgccacctataaattaaatttttttggagtccacatataaataagattatgcagtatttttgttcctatgtctggcttatttcactttacataatttcatccagtttcatctttattgttgcaaatggcaagatttcctagaaaaaaaaatacctaagtcctggaaacaactaagtttgtctgtctatggacaaataagttgaatttttaaaacgtggttatagata

SEQ ID NO: 22334 - DNA, 731 bp, Homo sapiens
aacagtgggaaaactgcaattcagagaggtaaagacacttgcccagggctacctaggtaatcaggagtgagtcaggacccaggactccaaagtctgagctgcaaatcccaacaccagcccccgccgtgtggagtccagtgtggagacagggggaagcaaaacgggccttgtcctgggctgggtctctaggcacccagtcaggctcaggaggacagggcagcccagaagcagctccacggagtcctgggccttcctgcttggtggccagggccagaacagggttgtcctcacaatgtgaggtgatgcaggagacctttcaatgtggcaccagagctgatgagcaggtgggcacccctgaaggccctggtcttcacagagtttggaagttctactccctccctcctctccaagttctaagttctactccatggcctggagtagacagatgctctgtccttgggaactgaagctctcccacctaattcacagacagagggggctggttatccctggaagggtaaggcccagagtgatagcatgttctgtgggacatggatgctgtctacatgaacaaagtggggctggaggccaaagtggatgccctgatggaggagaccaacttcctgagcactttctataaggcggtgagagtgccyggtgccccctccaacaggggggctgggggctgggtcttagagcctcagctgggcacagagcctgtgggctccttc

SEQ ID NO: 22335 - DNA, 1336 bp, Homo sapiens
ggtcctgacagactactaccaggaaaattctaaatacttggccacttaaagttttcagaaaatttgtaaggaagatgtttaattttcagtgacatgtaattcagttaagggaaaaaaaattaaaagtttcatcaaataggaaacgaacttaaaactctgctattcttgaacacatcttagaattattttatcagttctaaaagtggaactgcctaaatctgcaggatgtattatgaaaaacaaagwgttctcatgtcttcaaacaccactgccaaaggacaaaggtcctgaaaagtctttaggggagcaatattaaaaatgtacagactcaactttggggtgttgaaaaaagtggtaagtctatttgcttttaacaataagctacccttcctttagaaattatttatacattaaatataatgttttggaaagatgacattaaatgaatagttgcattgaggaattataaaaattagctgagctatgtttcagtagcatattattgagctagagaaggctaagagtactgtgaggacatagaattggcaatccccaaaaaagtgattcatgaagtcagcccaggagagtcaggaaagattttacataagaagccaaattttaaatcaattctgaaggatgaaatgtagattaccagccttagaagagggaaatgttatccagagaggagaaaataacaggtacaaaggcactgaggccatggttggaaagaaaggagaaaaggtaaatatgatttctggaacataattgtgtatgcataatgggaggagatcaggcaggaatgcaggctgggggccggaatgtgctgcggagtttgaggtatgctcagacaccctggcctctttaacaacaaggaactatgctaaactatggaaccatatgttttatcacaacatattaatgaccacatgttaacagagagggaactggaaaataaccactggctatggcaatgactcagacattctcctatttcagtcttcaaagcaccagcatgcaagatgacacttgagagtatactttctttacatcatattataataagcagaagcccagcaatccagcatttaagaaaacactagatcttggatgaaaactaactaaataaaagtggtggagttaaattcactatttagagtgttatatgtctttattacagttaatggaagcgcacccaggaaatatgtagaaaacacagtgccagagaactacacagctctcaagattccagtgtttctcagcttctgaaacaaaaagcagatttgactttttttagaacttatgtagaaagtaactgtcattttcctagttgtagctc

SEQ ID NO: 22336 - DNA, 1336 bp, Homo sapiens
ggtcctgacagactactaccaggaaaattctaaatacttggccacttaaagttttcagaaaatttgtaaggaagatgtttaattttcagtgacatgtaattcagttaagggaaaaaaaattaaaagtttcatcaaataggaaacgaacttaaaactctgctattcttgaacacatcttagaattattttatcagttctaaaagtggaactgcctaaatctgcaggatgtattatgaaaaacaaagagttctcatgtcttcaaacaccactgccaaaggacaaaggtcctgaaaagtctttaggggagcaatattaaaaatgtacagactcaactttggggtgttgaaaaaagtggtaagtctatttgcttttaacaataagctacccttcctttagaaattatttatacattaaatataatgttttggaaagatgacattaaatgaatagttgcattgaggaattataaaaattagctgagctatgtttcagtagcatattattgagctagagaaggctaagagtactgtgaggacatagaattggcaatccccaaaaaagtgattcatgaagtcagcccaggagagtcaggaaagattttacataagaagccaaattttaaatcaattctgaaggatgaaatgtagattaccagccttagaagagggaaatgttatccagagaggagaaaataacaggtacaaaggcactgaggccatggttggaaagaaaggagaaaaggtaaatatgatttctggaacataattgtgtatgcataatgggaggagatcaggcaggaatgcaggctgggggccggaatgtgctgcggagtttgaggtatgctcagacaccctggcctctttaacaacaaggaactatgctaaactatggaaccatatgttttatcacaacatattaatgaccacatgttaacagagagggaactggaaaataaccactggctatggcaatgactcagacattctcctatttcagtcttcaaagcaccagcatgcaagatgacacttgagagtatactttctttacatcatattataataagcagaagcccagcaatccagcatttaagaaaacactagatcttggatgaaaactaactaaataaaagtggtggagttaaattcactatttagagtgttatatgtctttattacagttaatggaagcgcacccaggaaatatgyagaaaacacagtgccagagaactacacagctctcaagattccagtgtttctcagcttctgaaacaaaaagcagatttgactttttttagaacttatgtagaaagtaactgtcattttcctagttgtagctc

SEQ ID NO: 22337 - DNA, 618 bp, Homo sapiens
ggctgcttacggttcagggggagtttttttcggaggttactgagtatttaggaatcatcccttcagacacttgctcttttgccacagaagctgcagttatcttatccctgctttcggcagctggaatgctccgtggaacagggctgagatgaacgttctatctccaaggctgcgttttggggcaagttaaggaaaaggatcaaagtaagttgatttgcatgaccttctctttaatcagatgtttctttttatgttcaacctcaacaaagccagcctatcatagcacactatttatagtctataatctaagatgttctgaaccattccccccacaccaaaaattaaaattaaaacctcaatagtggtgtggctatatcattagaagtaatagtagagtcacaaaaacctatttctgagactttttttttaaatgacaggtttgatggtatttccaatggggcctgtgtccctagattgtaattcttaaatatgtcatcaaagtcaataytgaagttctggggacaagtcaatcaaatttcactcttgtgttttatagtagaacaagaacttctccctggattcactgccctcaataacttaatctttggttctttatca

SEQ ID NO: 22338 - DNA, 580 bp, Homo sapiens
cctctgggttcacacatggctgctgcagctctggagggcacatgctgatctgctcaaccttgtcaggaaataaatcacctttgcaccagcattcctagcacaggttctgagagttgctgtaactgaactggctgaagccagggattattgtcagtatcctcagaaccttatggatctcaaatggaaaacaaggtctgcaaggaatggggaaggtggaagtttggaaaggagttagccaaagtcccctacacatgggtggttgcatttaatcctcatagcatccctgtgaaattggcatgattatcacccccatttacagacaaggaagcagaggcacagagaggccaagtaatttggctcagttcacatagctcmtggcttaagccaggaattgagcctggacagttggactccagagctttgctctgctaaccactccatggcatttttcaataagtgcttttttgtttttttaattgagataaaattccttcttttaaagtgtacatacagttcggtagttttttagcttattctcaaagttgtgtaaccatcattattatctacattttcatcaccc

SEQ ID NO: 22339 - DNA, 546 bp, Homo sapiens
gtacaaagggtctttgtttattcatccaagaacatattacttgactattctgtgtctggcactgcactcaaggcacacccatgaatggggagccctgtgtccccaaaataggaacttgtctaaacatagccaatctcaggatattactctgtttcctgcttgagccattgcacctgctgctttggactgagtatttgctcaagtggctttcaacctctgaccaccctccaagatccgtgcctcaccagcatgggggcttcagartcccgtcctctcccaaagcaaaccaagagctaaactttctgttttcctttaaatatcactaattttcagtactttaaatattactaattttcacactccccagctattttcagggctgtctttgtattttagtcttgataactacgtaacgtctcatgctgcagtgaaccttgggagacaataaataattttcaagtagtttcaccctttcaccagcagaaactcgctttctacccatgaagtctggttggaaaggatttgtaggagacagcaattggttaa

SEQ ID NO: 22340 - DNA, 569 bp, Homo sapiens
tgaaacctcaataggcatttcataatcccaccaagagtcgataaaatgtagtagctgagtattgaactaagctattatgtggaaaattcaaacaaaagtttccttcctctaattcttccgaatacacaagtatttctggaaaatactaagctacgtattgtggaaaatggactgagttctgcttagccaacacttctttgaacattcgcattcttttggtttgaggaatgtagtattgtcaggttgttgcctgcactgattattcacttcgcatacctggagtggctgcaactgaatttgtktctgtattttagcaaaagatttgtggcaacttatcaacgggggcatggggaaactggctggtcagagaaccttctgtgaatgccattttctcctgccattttttacacatcagtgctcaaaattaatgaagttaccgaaggacataacaattaggaaaaaaacattatgaaggatttttaataaatcatattgggcataaaacatgctagcagaaattataattaataagaagtgaaatgtaacaccaccttaaaatagaaagcaga

SEQ ID NO: 22341 - DNA, 553 bp, Homo sapiens
cctgagcccagcccctcagaccaggatccatcatgtttaggaggatttggggctatctcatgttctttggctagaaaggggtcccactcttaggggtctgccctctgtggggcacagatggcttgctggggcccatggacggggctgggtgaatgggaatctggtcacagcagcagcagctggaaggccaagagggagggcaccagggcctgggacccatgtcttgtcctgggcctccccgggcctcttgccttctccccagcaggcatttgggatctgtgtctggacccagcctcgcccagaaggccatggtgtgttgtcattagaatcacagtgctcacaccaaggcagtgcattaaattagcagggcagggtctcatgggcargggaccatgtggagggggtggggggaagggcagttgtccccagaggccatggtgggcctggctctgggctgggcagtgggccagggtcctgctgtgtggatgagctctgacaacaggctgtctgggtctggtgagctcctgaaagcggggactggtggagagtaccc

SEQ ID NO: 22342 - DNA, 553 bp, Homo sapiens
cctgagcccagcccctcagaccaggatccatcatgtttaggaggatttggggctatctcatgttctttggctagaaaggggtcccactcttaggggtctgccctctgtggggcacagatggcttgctggggcccatggacggggctgggtgaatgggaatctggtcacagcagcagcagctggaaggccaagagggagggcaccagggcctgggacccatgtcttgtcctgggcctccccgggcctcttgccttctccccagcaggcatttgggatctgtgtctggacccagcctcgcccagaaggccatggtgtgttgtcattagaatcacagtgctcacaccaaggcagtgcattaaattagcagggcagggtctcatgggcaggggaccatgtggagggggtggggggaagggcagttgtccccagaggccrtggtgggcctggctctgggctgggcagtgggccagggtcctgctgtgtggatgagctctgacaacaggctgtctgggtctggtgagctcctgaaagcggggactggtggagagtaccc

SEQ ID NO: 22343 - DNA, 553 bp, Homo sapiens
cctgagcccagcccctcagaccaggatccatcatgtttaggaggatttggggctatctcatgttctttggctagaaaggggtcccactcttaggggtctgccctctgtggggcacagatggcttgctggggcccatggacggggctgggtgaatgggaatctggtcacagcagcagcagctggaaggccaagagggagggcaccagggcctgggacccatgtcttgtcctgggcctccccgggcctcttgccttctccccagcaggcatttgggatctgtgtctggacccagcctcgcccagaaggccatggtgtgttgtcattagaatcacagtgctcacaccaaggcagtgcattaaattagcagggcagggtctcatgggcaggggaccatgtggagggggtggggggaagggcagttgtccccagaggccatggtgggcctggctctgggctgggcagtgggccagggtcctgctgtgtggatgagctctgacaacaggctgtctgggtctggtgagctcctgaaagcgsggactggtggagagtaccc

SEQ ID NO: 22344 - DNA, 597 bp, Homo sapiens
tgggaaggcgtgctctcagatcccacacccctggacttccccgggcaccacctgctccttcttcayttctccagctctgcgttctcactctgagggtcctctcctgctgggaatgtgtgttgctggcaacagtgaagattcccccctgggttgccccccatgccctgttcttctgcacttccctggcttcctgcgttggttctgctggtgtctcctgcttttgggtttacgtggcttcccagcttcctaatttctctgaagttgagtttgatgtgtgtattgatgatgggctttttcctcctcctcctcctcctcctcctcctcctcttcctcctcagtcttgttgttgccccatatagtttccagaaggagaaaagggacactgtaaaattaagctgctgcaggctgggcagtggctcatgcctgtaatcccagccctttgggaggccgaggcaggtggatcacctgaggtcaggagttcaagaccagcctgttcaacatggtgaaacctcatctgtaccaaaaatacaaaaattagcaaggcatggtggcatgtgccggtaatcccagctactcgggaggctgaggcaggaggat

SEQ ID NO: 22345 - DNA, 597 bp, Homo sapiens
tgggaaggcgtgctctcagatcccacacccctggacttccccgggcaccacctgctccttcttcatttctccagctctgcgttctcactctgagggtcctctcctgctgggaatgtgtgttgctggcaayagtgaagattcccccctgggttgccccccatgccctgttcttctgcacttccctggcttcctgcgttggttctgctggtgtctcctgcttttgggtttacgtggcttcccagcttcctaatttctctgaagttgagtttgatgtgtgtattgatgatgggctttttcctcctcctcctcctcctcctcctcctcctcttcctcctcagtcttgttgttgccccatatagtttccagaaggagaaaagggacactgtaaaattaagctgctgcaggctgggcagtggctcatgcctgtaatcccagccctttgggaggccgaggcaggtggatcacctgaggtcaggagttcaagaccagcctgttcaacatggtgaaacctcatctgtaccaaaaatacaaaaattagcaaggcatggtggcatgtgccggtaatcccagctactcgggaggctgaggcaggaggat

SEQ ID NO: 22346 - DNA, 600 bp, Homo sapiens
acctaatgtataactgaggggatctgcaagcttatttgtttagcttcttcttggcctttctgttcagggcaagacacctatcacttgagggtcttcaggggagaaaggagaaggtcagaaagtggcctttctargttttatggtttgctttggcaaagagaaattttggtttctatgaacctcctcaggggagaaaggaagatgaaggaaaggagggagggagaaggtgagagagtgacctccgaggtgtcacattttggggtagcgtgttctgaaccctgatactcctcagttaaacgtgtgctgagttgaatttctagccctgctaattcaattaggaaaaggtagttcctttgggttcatgtatagaaaccaaataagttaaaaataacaaagctcctcagatagttgggcagatttcattctagtagacatttaaaagaaattgaagattgatgcatttaaaaccaataattagatgtctttatcatcgtacatttctcgcaaccaactctggccatttattagtctatttttaggtgagagaacaaaggtacaaaaatggcaaacgggaaaagagacacgcataaaacagttcgc

SEQ ID NO: 22347 - DNA, 526 bp, Homo sapiens
tgtgaacatgccaatatgacagattcctagaagtwaaattgaagggtaatgtaagggtatttatctatttaatttaatgtttcaatgttacagcaatttattcctaccaataatatgtaacaatgccctgcacccttatccacatggtatattataaggctttttgatctccaccaatccattttataaaaatggcatcttatcatagatttaagttacattcattcattataaataccttcaagcatattttcattcacctcaaattgatatgtgattaataaagttattattttgacttctaacacataaatgataaaatatcagcacaggtagaataatgatcagtgttgcatgaagagatgtctctatagttattttgtctatgtgtggaaccatgatccggaagttagagtttttgtccacccaccatcttcctttgagtcttgcctctaggaactatgtggagctgtgctcaaaagtatccccattcatgaggctccaggttaattggttatagatgctg

SEQ ID NO: 22348 - DNA, 561 bp, Homo sapiens
agggtttccagcatgttatacccatgtcttagagagctgcccctgggattctgccccatttcggctgctccgccagatgcctgagagggataaacatgcattgcagagtgtgaccctcttcctaccacccccaccagcaagactgtgcacagagcctccatttcctcagctatggggaaaaaaggcagacattggcatatagggaaaaaaacaatagcaatagtgaggaaaagacaagaaaactgggctgctgatgccaaaacaaatgatccctaatgaatcttctttctccctgagaaaggcattgccagccgggcgcagtggctcacgcctgtaatcccagcactgtggaaggcygagacaagtggctcacaaggtcaggcattcgagaccagcctggccaacatggtggaaccccatctctactaaaaatacaaaaattagccaggcgtaatggtgcatgcctgtaatctcagctactagggaggctgaggcacaagaatcatttgaacccgggaggcagaggtagcagtgagctgagatcgtgccactgcactccag

SEQ ID NO: 22349 - DNA, 555 bp, Homo sapiens
tcactcctaccctgttctgtgttcactttaatactggtcaattatgcttctcaaagctataattctggcaagctgacatgcacggttcctagccaaatgtccagtgtctagcaaggtttcacctaacatagtgctgacagctagaaacggattcttctcccaactgcagattcaatagagcacaggcattttcactataatagaaatgttctggaagaacctcacgctcttgcaaaactgtatactaaaaacacaagggcttatcttagaaaaaagaaaagttgcagtagactattcaaaactatgctatttcatcaccaaggcattacaaaaacattacacagagaacattacattaagaaaaacatcacatagttttaaaaatatatatataatagtcctgatcaatgaaaagtccagtaaacatagaaatttaccttttaaaaaggtgaaaacagtttgayggaacagtaaaaggaagaattaaagcatctaagttgcagaactggagacagccaagcccaactatatcagtgagcatatcaaactgtctca

SEQ ID NO: 22350 - DNA, 1704 bp, Homo sapiens
  misc_feature (1)...(1704): n = A,T,C or G
acatctgtattccccttacttgcataacagctctctgggacaggtgggacaaatgtgataagccccagtctgcagagcaagagacgacttgcttatgggcacacagttcataagtggcagagccgggaccagggactggagtcttgccgtgggtgtgctacgcggccccacagaaggatggatgcatggagtcccattttgtggactccyccctgggcctgcaatgtgtagggatgtgttaggggaggatgagagggcaagagggggatctgtggctagaattccggaggttcgttggaaccagggaggtacatggggtgacttgaaccccaaatcttttcatctaggcatgacactccctttttcctctatggagactgggaatagcaggatggagggagggtagaaggagtagaggagtcagtgttggggctagggctgggagggacggggtagaagagagcaagttctggggacagagggcagtcaggagacctgtcagttctctctgggtagcctggactctcgagaggactgaaatgcatcaaaggatgggtaatgaaaaaatggtgatgaggacgggttgccttatcaccctagaagggaggaaaagcttcatgcccaacctgtcccctgcttaaacntatttgcagtaattgtatgaacctaacttcctgannnnnnnnnnnnnnnnnnnnnnnnnnnnnnnnnnnnnnnnnnnnnnnnnnnnnnnnnnnnnnnnnnnnnnnnnnnnnnnnnnnnnnnnnnnnnnnnnnnnaaaactgctgtcacaaagttggtttactgaggtaaatatttattgaataaataaatgagctaaaaaaaattcaaatctgaaaatgaaaatgaggcagtatgaaacatagtcaagcaacaattttctacaagagtaaaaatgtccaggtgtatttacagataacatttttcattttacatgtattatgtgttgctatattaaaagtcatatgattaagctattaaataatttaatatttattcataatatttggatatttgagctctttattactagaaatatatattagaagttctacctttgtttagagttccttttctcttactttgttaaaaggacactcattccctagtgtcacataaaacttttttgtcagattttttcttaaggtaacatactctttggtaaaagtcaattacttatcaaaactaatctgctgtctattgtttttattggatatctgtggccagggagcagaaggaaaaggatattttatttccccttttattcgtttttcaatttacaaccatctggcataaacctgaaacttgtggcaggggtcccattaaaaagaggaatacaaaaacatgagccagggttattttcgtaactgaagattgagactatattcacatatttatggcgcctttgttgaaagatctagtatgattacatatttcagaaatctgactttaggctttgtcatgacttacaaaatgaggcagacatttgtgacttgtccataagaatagattattaaatggggactctattacttaataattaagggtataggtatgaaatttaaaacttggatttttttttctgccacattctatctagctgtgtgcctataggcactttaggatattcttatataaatggggatcataaggccacttcctcaaagggttgatttgctgatt

SEQ ID NO: 22351 - DNA, 586 bp, Homo sapiens
ccctaaaacttaaagtataataataaaataaaaaaacacaattattatttctaataaatactctgtaaacactataacaatcaattcaattaagcaagcatttaattaatgggtactatttatgtgctgggcattgagtttataatgataactaagatatatttttcttgctatgctccagcttaaaggagaggtttgaaatattttggatgaaggaaggttcaaggtgaaaatgtagaacaagaatgaaacaactgacacatctatcaaatggcccttagtgtaacttcccaatgggctctccttgcttgctgcccagttagagctgatttatcaagacagaggaattgcaatagagaaagrgtttaattcacgcagagccagctgaacaggagactggagttttgttactcaaatcagtctctccaaaaatttggaaattgggtttttttaaggataacttggtgggtatgggggcattgagtagggagtggtgatcggttgggtcggagagatcatacaaagttgaagcggtcctcttgcactgagttggttcctggataggggccacaagaccagatgagtg

SEQ ID NO: 22352 - DNA, 520 bp, Homo sapiens
  misc_feature (1)...(520): n = A,T,C or G
tttttctaactcagcatgttgttttcacaagaaaaacaaataactaatttcttactcatttagacattcactctaattgttttgaacttttttggccaaacagaagatcacttttttagttttaaaattaaaaagtagcagattatttttcccccaagagaaaattaattcagaccacaaaagagttgcacttcagttcaagggactatgtgaactatttagtgttagaagaaaaatccttcttattcacatacctttygtcttggttcttctaaataatgactgcttttgtttagtgcttaaaagaaatgggatacatttttcaggcacatttgccacagagaagggtcatattacatcttagaggaatttctatatgtttgacttaataactntcccagatgtaatttaaattctcatccaatcaaaacaaattacaattaaagcttgtttcaataaatcagtagtgaaatttaacataagtccttcatgctctcctaacaggctatcccagcaccga

SEQ ID NO: 22353 - DNA, 552 bp, Homo sapiens
ttctataggtacatctggaattacataacaaggaagatatatgatrcacatacaggctacacacggacataaattttgcatatacacacatccaacattttgcaaatttctggcttcacaaaaacccgctaaatagttaaaatgagtgttactgtatacgtcttatttctaattagtccatgttgcaagttttgtacatttaatttttttaggataagcgtttgtaatccctccaagaattggtgttactctataaatccactcagaggaccttcacttactttttttttttcttttttgagatgaagtctctctgtcacccaggctggagtgcagtggtgcaatctcggctcactgcaacctctaccttccaggttcaagcaattctcagcctcccgagcagctgggactacaggaccatgccagcacttcctgctaatttttgtatttttagtagagacggggtttcaccatgttggtcaggctggtcttgaactcccgacctctggtgatgatgtctatataacagtttgattttatgtgttacacatt

SEQ ID NO: 22354 - DNA, 552 bp, Homo sapiens
ttctataggtacatctggaattacataacaaggaagatatatgatgcacatacaggctacacacggacataaattttgcatatacacacatccaacattttgcaaatttctggcttcacaaaaacccgctaaatagttaaaatgagtgttactgtatacrtcttatttctaattagtccatgttgcaagttttgtacatttaatttttttaggataagcgtttgtaatccctccaagaattggtgttactctataaatccactcagaggaccttcacttactttttttttttcttttttgagatgaagtctctctgtcacccaggctggagtgcagtggtgcaatctcggctcactgcaacctctaccttccaggttcaagcaattctcagcctcccgagcagctgggactacaggaccatgccagcacttcctgctaatttttgtatttttagtagagacggggtttcaccatgttggtcaggctggtcttgaactcccgacctctggtgatgatgtctatataacagtttgattttatgtgttacacatt

SEQ ID NO: 22355 - DNA, 552 bp, Homo sapiens
ttctataggtacatctggaattacataacaaggaagatatatgatgcacatacaggctacacacggacataaattttgcatatacacacatccaacattttgcaaatttctggcttcacaaaaacccgctaaatagttaaaatgagtgttactgtatacgtcttatttctaattagtccatgttgcaagttttgtacatttaatttttttaggataagcgtttgtaatccctccaagaattggtgttactctataaatccactcagaggaccttcacttactttttttttttcttttttgagatgaagtctctctgtcacccaggctggagtgcagtggtgcaatctcggctcactgcaacctctaccttccaggttcaagcaattctcagcctcccgagcagctgggactacaggascatgccagcacttcctgctaatttttgtatttttagtagagacggggtttcaccatgttggtcaggctggtcttgaactcccgacctctggtgatgatgtctatataacagtttgattttatgtgttacacatt

SEQ ID NO: 22356 - DNA, 552 bp, Homo sapiens
ttctataggtacatctggaattacataacaaggaagatatatgatgcacatacaggctacacacggacataaattttgcatatacacacatccaacattttgcaaatttctggcttcacaaaaacccgctaaatagttaaaatgagtgttactgtatacgtcttatttctaattagtccatgttgcaagttttgtacatttaatttttttaggataagcgtttgtaatccctccaagaattggtgttactctataaatccactcagaggaccttcacttactttttttttttcttttttgagatgaagtctctctgtcacccaggctggagtgcagtggtgcaatctcggctcactgcaacctctaccttccaggttcaagcaattctcagcctcccgagcagctgggactacaggaccatgcyagcacttcctgctaatttttgtatttttagtagagacggggtttcaccatgttggtcaggctggtcttgaactcccgacctctggtgatgatgtctatataacagtttgattttatgtgttacacatt

SEQ ID NO: 22357 - DNA, 552 bp, Homo sapiens
ttctataggtacatctggaattacataacaaggaagatatatgatgcacatacaggctacacacggacataaattttgcatatacacacatccaacattttgcaaatttctggcttcacaaaaacccgctaaatagttaaaatgagtgttactgtatacgtcttatttctaattagtccatgttgcaagttttgtacatttaatttttttaggataagcgtttgtaatccctccaagaattggtgttactctataaatccactcagaggaccttcacttactttttttttttcttttttgagatgaagtctctctgtcacccaggctggagtgcagtggtgcaatctcggctcactgcaacctctaccttccaggttcaagcaattctcagcctcccgagcagctgggactacaggaccatgccagcacttcctgctaatttttgtatttttagtagagacggggtttcaccatgttggtcaggctggtcttgaactcccgacctctggtgatgatgtctatataacagtttgattttatstgttacacatt

SEQ ID NO: 22358 - DNA, 596 bp, Homo sapiens
cagcccaaccatacctttttgataagaaccaaatgtttcatttacaattatccaagattcacaaagtttgttttaattgagagattctgctaaattcaaaataagaaaagtggtcacaattatgatcagaccacagaagttccacacgtctgcccagtattttaagcactaccccatttgcttaaaaagtcacataattgtgctatgcattacatttttattcattaggtttttgtatgtctattagactgaatcactttctttcaggctttgaggccatttctagtttccatgctgcattatattttagtaagtatttatttatttatttatttagcaagtatctttgagaacctattcggtgccacacatcattccamgagtacaaataagagtaatatatttccctgcttttaaggacaaggagaaacaaccttaagcaaatatctactgtccaatgtatagacttgcaaaacagtcatatgatagcacacagtagcaaacaatttgttctttctatgacatgcagtattacagtatttgaactggattcatcccaacagatgtactgcaggtatttaggatatggggcattg

SEQ ID NO: 22359 - DNA, 521 bp, Homo sapiens
tggataaagaaaatgtggcacatatataccacggaatactctgcagccataaacaaggatgagtttatgtatttgcagggacatggatgaagctggaaaccatcattctcagcaaactgacacagaaaaagaaaaccaaacaccgcatgtttcactcataagtgggagttgaacaatgagaatacatggacacagggaggggaacatcacacacaggggtctgtcagggggtgggggactaggggagggatagtattaggagaaatatctaatgtagatggcgggttgatgggtgcagcaaaccaccatggcacatgtatacctatgtaacaaacctacacgttctgcacatgtatcccagaacttaaagtataataataataaaaaaagattgtgattattaatattggcaccttttctttttggktgaattttccatttagcactttcattctattttgttaataacaaggtaattgtatatatctatcattcaataaatgagcagatctcagtatctc

SEQ ID NO: 22360 - DNA, 1101 bp, Homo sapiens
ttaataatgtatgaaccaatcctcagtatattagggaagatgaggctttgcagttaattagtgatgggttcaaacattgaattcattaatttttgtatgatcctgggcaagttcatttcaattctcagttactaaattaataaagtagccacttaggccaaatagatttcagaatgggctcacattaaagtgtttcacaattttatattttttacaktatatcatgctgacaccaaaaaacaatatcttatcttagtagatctatgttagtgagacaagtttgtatgactcatggtacttgcttaagtggagtaaagtattagggcctttaattaataaagattcctttttttctctagttttggactacagaagaattagcacacatctggtgtgaaaattttcacaatcatagagaaaaagctagccaattaaaatgatattctgatatcacttcaaagcaattgtgatagagaattccttttgtgtaggaaagcctttcatataggactatgtgcaaaccactgtttccagttttgttccacgtacagaaataacaacacattataaacttcttagtagtagcaattatgtcagatattgtccctttggaaaagaggaattatatcttatgctacttctatatagtctgtgatatgtagtagattctgaatgcagagtgaataagtgatagtaaaaggatgatttgataatattagttttgggtctgtcaaagcctacttcgaatccacaaatctttgccttcctaaactaagcgtaggtattgtaaaccaaaagatatctgagataggtctcaatcaatttagaggtttattttgccaaggttaaggatcatgacccgtgacacaacctcaggagatcctgagagcatgtgcccaaggtggttgggttacagcttgattttatacattttggggaggcagaagtcacaggcaaagacataaatcaatcaatttaagatatacattggtttggaatagaaagacaggacatcttataaaagggggcttccagattataggtggattcaaagattcttgactggcaactgagtgaaagggtcaagctctgtctgaaaaa

SEQ ID NO: 22361 - DNA, 1101 bp, Homo sapiens
ttaataatgtatgaaccaatcctcagtatattagggaagatgaggctttgcagttaattagtgatgggttcaaacattgaattcattaatttttgtatgatcctgggcaagttcatttcaattctcagttactaaattaataaagtagccacttaggccaaatagatttcagaatgggctcacattaaagtgtttcacaattttatattttttacagtatatcatgctgacaccaaaaaacaatatcttatcttagtagatctatgttagtgagacaagtttgtatgactcatggtacttgcttaagtggagtaaagtattagggcctttaattaataaagattcctttttttctctagttttggactacagaagaattagcacacatctggtgtgaaaattttcacaatcatagagaaaaagctagccaattaaaatgatattctgatatcacttcaaagcaattgtgatagagaattccttttgtgtaggaaagcctttcatataggactatgtgcaaaccactgtttccagttttgttccacgtacagaaataacaacacattataaacttcttagtagtagcaattatgtcagatattgtccctttggaaaagaggaattatatcttatgctacttctatatagtctgtgatatgtagtagattctgaatgcagagtgaataagtgatagtaaaaggatgatttgataatattagttttgggtctgtcaaagcctacttcgaatccacaaatctttgccttcctaaactaagcgtaggtattgtaaaccaaaagatatctgagataggtctcaatcaatttagaggtttattttgccaaggttaaggatcatgacccgtgacacaacctcaggagatcctgagagcatgtgcccaaggtggttgggttacagcttgattttatacattttggggaggcagaagtcacaggcaaagacataaatcaatcaatttaagatatacattggtttggaatagaaagacaggacatcttataaaagggggcttccagattataggtggattcaaagattcttsactggcaactgagtgaaagggtcaagctctgtctgaaaaa

SEQ ID NO: 22362 - DNA, 541 bp, Homo sapiens
caggaaacaggtgctgccatctaggaaattgtaggaggctataggacttccccttagtcgaaagaactctttaagcaagactttattttacatgtttgtaaacatggtgactgctccttgaacagtatactcaggggcctaagtttattaggaagcatggaccttcctgtcaataaccaaccctactggtttctctgctccaggtttcagccctattgtgtcctatactaatggatctcaacactaaaatcacctgagagccttaaaaatatacagacagtttccacagaggaatttcttgtgtagtttggtctggggtggatcctaagtgtcatgggtttgaaaggtctccaagagttcctgtgcagctagggttgagtcaatggtctagagtgaaragtggttttcctcaaatgcagctgtgaccctatttctcactttcataacccaggtaatggcttctcaggacagacccatttctgggcagtttttaaagtgcagatgtcctattctggaaccattaaatctgaatcagagggca

SEQ ID NO: 22363 - DNA, 557 bp, Homo sapiens
cacccaaccacttcctggtccacccaaacatgcagcttcttgtgattgctaagattcaaagagatgcatgcataccttgcttgactgtgctttgctttggtgtactttgcatatactacatattttaaaaattgcaggtttgtgacaaccctatattgcgtaagtctattagtgccatttttctaacattgtgtgcccactgacgtgtgctcacatgaatatttctgtgtctcattttggtaattcttgcaatatttcaaatgtttttgttattatatctgtcatggtgatctgcagtcagtgatctttgatgttactattgtagttcttttggaacactgtactgcacccatatcaaaacgcaaacttacttgataaatgttgcgctctgactgctccaccagcctgccattccaccatctttttcctttcccttgggtctctattcactgagacacaacaatattgaaacagggccattgatgatttgcaamggtctctaactattcagctgaaaggaagagtcacatgtctctcactttaaattaaaaggcaga

SEQ ID NO: 22364 - DNA, 545 bp, Homo sapiens
tgccaaccagggccatgagtgataagcactttccacagcattctcacatccttcatatctgagatttataatctttgtgaattgggcaggatcactctcattttgccagtgggaaaacacatattctgaggggttaaaccaacctgctcaaagtccatgtttcacccccatatccggtactctttccaacttgtcccactcactgggtctgtcttgttcactattgtatatccaactgcagtgcctggcatggacttgttgctcaattagcatttcttggacagaataaaacaaaygaccagagagcaagatcttgaaggaataggatggaagatgaggaaagtctttcttcacatagggagtctaggattaccttcagtacaacgcgtagaatatagtaggtgctcagtaaatacttgttaaatattgaatgaatcaatgggactttggaggtggcctttctggggcaccacagcaatgctctgtgagcattgggtgcttgatgtggagtgtccagaaggaaactgccagatataagccccatt

SEQ ID NO: 22365 - DNA, 530 bp, Homo sapiens
tcaaggttgagggacagtaaaggaatcttgtattctaatgagtacagcatcctttcattgtccaagccatccaccttaggctttgaggttcaagtccaggtctggagaagagaaagtttcatacccaaccttgtggtctttccttcggtagtacattcgtgtcagtacagtcattagaaaagtctccagtatgaggaggtggcaattcatcactgcagtgtrgggttaaatacagcgtaggttatgctgagttacagaggtggtattttactagcagcccgggcacgggagttgagcaatactttctccagtttatccccaaatcaggacttagggatacgaaattgtcataaataacacagcggtttaatggtagagccagaaccggaagttggctgtctacttctgtgctctgaggctggcatacagtccatttcttatgtgtgttcaatcaacatgggcttctgttttttaaccattcccattcctctcccaggagctgaggactgaacccatggcttcctgggttg

SEQ ID NO: 22366 - DNA, 549 bp, Homo sapiens
ctcaccccgcaaggcaacaggacaatgactggagtgtggcagttttctccctttcttcctcttatctagtcaggtagcaggtgcaaaggagggtccaataactagaaaagacacttagataaatgaccacaggttcactaaggacctagaaccctttctttaaaactaacggctgcattaatgaatcacgtttgttcggaaacacatattgtgactatattcatttttttctgttagcaacggtgaggccagatgaggtctaccagtatttgtcaaagtgtctgctatcctccgaccactatcaggtgagcttgttaaaaatgcagatgactgggcccatctcagatctatggacgcacatgtctgaasgtagggcctgggcagctagctgctttttaacaactcccaaaatgactgcaatatccacgaaagtttgaaaaccttggactatagttcatgtaagaccaagcatgaggccagcgtgcgtcaggtgtccttggggtttttatttgatccgtttctcttttgttgaagttctcccctggccga

SEQ ID NO: 22367 - DNA, 601 bp, Homo sapiens
ttttaatctcctscctcacatcacagggattttagtaaatggcaaagcaagctgaatatagttttacctttccctaaactagccgatagataatgctaaaaagtgaaaaaatgcaattgatgggtgacaggagatagaaagattaagaggtttggataccgatatggtttggatttgtgcccccacccaaacctcatgttgaattgtaaccccgaattctggaggagggtcctggtgggaggtgattggatcatggggtctgattgtcctgttgctgttctggtgatagtgagtgagttctcaagagatctggttgtttaatacaagtgtgtagcttttcctcctttactctcttcctcctgctccggccatgtaggacatgcctgcttccccttccgccatgattggaagtttcctcaggcctccccagccatacatacttcctgtacagtctgtggaaccgtgagccaattaagcctttttttctttataaattacccagtttcaggtatttatagcagtgtgagaatggactaatacacatacgaaacaagaaattggtaactattcaaagaacaaaacaagagataatggaataatt

SEQ ID NO: 22368 - DNA, 652 bp, Homo sapiens
catcgcggtgtacaccttgaatgtaaacactttttgtcaattatacctcaataaagttgaagaaaaatagccaggagccacctgatggaagtctttctctccagctatttcccacccctcaccgagagaggcccaggagctttcgagagtagacttgatgcttttttgcctttgaagttgctccggagaaaggaaccagggggagctgatgtaggaagttagctcatcccttcccactgagccaactctggtttatctttcagatcccgccctgcctggccacatctgtgtacatttacttattcctcacatccgtattgtgggcgtgggtatcttttcccccgactgcttctttcaaaaccttgccctaagcaggaggtttttaagactgtgtttagtccagatactttgagccaacacatccacattagcagactccacagagagcttgattccggctctggttcctacagatgttctgttggctcttgggccctagaaataggaaactggcctggtcagagatggcccaagcaccagcatgacctcatccccaggcctggtgaagggcgaacagacctgagtgtacaggaaggagcctgcctcccgggagctaagtagattgtagatttggccrttgtgtgtttttttt

SEQ ID NO: 22369 - DNA, 1647 bp, Homo sapiens
atttcactgtatgctggctgcaaatcctcttcctctatgttcactacytcctagtctctggcagagagtttctagactcagaggtcattatcactcctcttcttcctcaggcagaaagcggaagacatgcagaaatactttcttttgtgtaaattaggtggtttcataggaaaaccaagtaccaagtagcttgcttccttccttcaatccctccctcatacattctttccttccttccctccctcccgtcttccctctccttttttctttcttttctatatttaataatattctgttttattgtgctttattattatttgtaattaagtacataagatatgcataaaacccatttcttatttttggcctggactaaggtagtatgacctattccttggtatttttgctagcgcaattacaatgacaaaaaaaggtatgcaagcaaaattagggaaaacattctagtaaatattgctccaggttacatgtggttaaaaacttctgcaccagttcattcttaggaaatgtgtcctttgatttggaaaaattaattttaattaaaaacatttctcagatcatttagggagaaatatgaactgcttagacacacgatggagacaatttctctggacatactccagagcctgtgtagagttaccgagtgagaagcaatctagcaggaatgcagtatgtgtgtatgtatttacatatatatatatatatatacacacacactcattaatatatttttggctaattgaatatataatgcttctcctgtcaagtgtctgtatgatatgactgggagtttcttccacagccacagactatgttttactcaagcagagataggaatggggggaaaatgcagagtggaccttttctttcctattctcttttgaggattaaaaaaaaagtaaagcaaatctctgtgttgtgtatggcaaacactcagcatgtgacaagtcatttcatacaaatgtttcaaaatttgatattacattttgcaaactgacttgctttggcagtaacagttttcaaatgtcacctaactggctgtgttctagtaactagaacacagaatgctgtatgtgtactttcctgttctgcacaaaaaaacacacaatgaaatgtgtctttagtgctgtcattagccaagccaaaagtaaaaccaatgatggcatgagagcctttcctatttcttcctatataataaattgaaaatggactctttattatattaatttatatgataaatacaatttataatctcattgacgttttcttccatacttgaaactataatttctattgaacgaataaaacacagcccaatttagatgtcagtatctctattaaattattacattgttagccacattaagttgtcatttttattttgttttcttgagaaagagtcaataattaacctcaatgattgaagtataatgtttcaaaaacaacatagagccagggtagttaatattatacttgttatattttgagagcatgactttttcatcatatgtatgggaaatagttgtgcttgaaaaaaaaaagcattatttagggaagaatcagtcattcgcaacttagaaaacagacacgagttatacaagtgatggcttctaatattcatagcatgta

SEQ ID NO: 22370 - DNA, 1647 bp, Homo sapiens
atttcactgtatgctggctgcaaatcctcttcctctatgttcactaccycctagtctctggcagagagtttctagactcagaggtcattatcactcctcttcttcctcaggcagaaagcggaagacatgcagaaatactttcttttgtgtaaattaggtggtttcataggaaaaccaagtaccaagtagcttgcttccttccttcaatccctccctcatacattctttccttccttccctccctcccgtcttccctctccttttttctttcttttctatatttaataatattctgttttattgtgctttattattatttgtaattaagtacataagatatgcataaaacccatttcttatttttggcctggactaaggtagtatgacctattccttggtatttttgctagcgcaattacaatgacaaaaaaaggtatgcaagcaaaattagggaaaacattctagtaaatattgctccaggttacatgtggttaaaaacttctgcaccagttcattcttaggaaatgtgtcctttgatttggaaaaattaattttaattaaaaacatttctcagatcatttagggagaaatatgaactgcttagacacacgatggagacaatttctctggacatactccagagcctgtgtagagttaccgagtgagaagcaatctagcaggaatgcagtatgtgtgtatgtatttacatatatatatatatatatacacacacactcattaatatatttttggctaattgaatatataatgcttctcctgtcaagtgtctgtatgatatgactgggagtttcttccacagccacagactatgttttactcaagcagagataggaatggggggaaaatgcagagtggaccttttctttcctattctcttttgaggattaaaaaaaaagtaaagcaaatctctgtgttgtgtatggcaaacactcagcatgtgacaagtcatttcatacaaatgtttcaaaatttgatattacattttgcaaactgacttgctttggcagtaacagttttcaaatgtcacctaactggctgtgttctagtaactagaacacagaatgctgtatgtgtactttcctgttctgcacaaaaaaacacacaatgaaatgtgtctttagtgctgtcattagccaagccaaaagtaaaaccaatgatggcatgagagcctttcctatttcttcctatataataaattgaaaatggactctttattatattaatttatatgataaatacaatttataatctcattgacgttttcttccatacttgaaactataatttctattgaacgaataaaacacagcccaatttagatgtcagtatctctattaaattattacattgttagccacattaagttgtcatttttattttgttttcttgagaaagagtcaataattaacctcaatgattgaagtataatgtttcaaaaacaacatagagccagggtagttaatattatacttgttatattttgagagcatgactttttcatcatatgtatgggaaatagttgtgcttgaaaaaaaaaagcattatttagggaagaatcagtcattcgcaacttagaaaacagacacgagttatacaagtgatggcttctaatattcatagcatgta

SEQ ID NO: 22371 - DNA, 1647 bp, Homo sapiens
atttcactgtatgctggctgcaaatcctcttcctctatgttcactacctcctagtctctggcagagagtttctagactcagaggtcattatcactcctcttcttcctcaggcagaaagcrgaagacatgcagaaatactttcttttgtgtaaattaggtggtttcataggaaaaccaagtaccaagtagcttgcttccttccttcaatccctccctcatacattctttccttccttccctccctcccgtcttccctctccttttttctttcttttctatatttaataatattctgttttattgtgctttattattatttgtaattaagtacataagatatgcataaaacccatttcttatttttggcctggactaaggtagtatgacctattccttggtatttttgctagcgcaattacaatgacaaaaaaaggtatgcaagcaaaattagggaaaacattctagtaaatattgctccaggttacatgtggttaaaaacttctgcaccagttcattcttaggaaatgtgtcctttgatttggaaaaattaattttaattaaaaacatttctcagatcatttagggagaaatatgaactgcttagacacacgatggagacaatttctctggacatactccagagcctgtgtagagttaccgagtgagaagcaatctagcaggaatgcagtatgtgtgtatgtatttacatatatatatatatatatacacacacactcattaatatatttttggctaattgaatatataatgcttctcctgtcaagtgtctgtatgatatgactgggagtttcttccacagccacagactatgttttactcaagcagagataggaatggggggaaaatgcagagtggaccttttctttcctattctcttttgaggattaaaaaaaaagtaaagcaaatctctgtgttgtgtatggcaaacactcagcatgtgacaagtcatttcatacaaatgtttcaaaatttgatattacattttgcaaactgacttgctttggcagtaacagttttcaaatgtcacctaactggctgtgttctagtaactagaacacagaatgctgtatgtgtactttcctgttctgcacaaaaaaacacacaatgaaatgtgtctttagtgctgtcattagccaagccaaaagtaaaaccaatgatggcatgagagcctttcctatttcttcctatataataaattgaaaatggactctttattatattaatttatatgataaatacaatttataatctcattgacgttttcttccatacttgaaactataatttctattgaacgaataaaacacagcccaatttagatgtcagtatctctattaaattattacattgttagccacattaagttgtcatttttattttgttttcttgagaaagagtcaataattaacctcaatgattgaagtataatgtttcaaaaacaacatagagccagggtagttaatattatacttgttatattttgagagcatgactttttcatcatatgtatgggaaatagttgtgcttgaaaaaaaaaagcattatttagggaagaatcagtcattcgcaacttagaaaacagacacgagttatacaagtgatggcttctaatattcatagcatgta

SEQ ID NO: 22372 - DNA, 1647 bp, Homo sapiens
atttcactgtatgctggctgcaaatcctcttcctctatgttcactacctcctagtctctggcagagagtttctagactcagaggtcattatcactcctcttcttcctcaggcagaaagcggaagacatgcagaaatactttcttttgtgtaaattaggtggtttcataggaaaaccaagtaccaagtagcttgcttccttccttcaatccctccctcatacattctttccttccttccctccctcccrtcttccctctccttttttctttcttttctatatttaataatattctgttttattgtgctttattattatttgtaattaagtacataagatatgcataaaacccatttcttatttttggcctggactaaggtagtatgacctattccttggtatttttgctagcgcaattacaatgacaaaaaaaggtatgcaagcaaaattagggaaaacattctagtaaatattgctccaggttacatgtggttaaaaacttctgcaccagttcattcttaggaaatgtgtcctttgatttggaaaaattaattttaattaaaaacatttctcagatcatttagggagaaatatgaactgcttagacacacgatggagacaatttctctggacatactccagagcctgtgtagagttaccgagtgagaagcaatctagcaggaatgcagtatgtgtgtatgtatttacatatatatatatatatatacacacacactcattaatatatttttggctaattgaatatataatgcttctcctgtcaagtgtctgtatgatatgactgggagtttcttccacagccacagactatgttttactcaagcagagataggaatggggggaaaatgcagagtggaccttttctttcctattctcttttgaggattaaaaaaaaagtaaagcaaatctctgtgttgtgtatggcaaacactcagcatgtgacaagtcatttcatacaaatgtttcaaaatttgatattacattttgcaaactgacttgctttggcagtaacagttttcaaatgtcacctaactggctgtgttctagtaactagaacacagaatgctgtatgtgtactttcctgttctgcacaaaaaaacacacaatgaaatgtgtctttagtgctgtcattagccaagccaaaagtaaaaccaatgatggcatgagagcctttcctatttcttcctatataataaattgaaaatggactctttattatattaatttatatgataaatacaatttataatctcattgacgttttcttccatacttgaaactataatttctattgaacgaataaaacacagcccaatttagatgtcagtatctctattaaattattacattgttagccacattaagttgtcatttttattttgttttcttgagaaagagtcaataattaacctcaatgattgaagtataatgtttcaaaaacaacatagagccagggtagttaatattatacttgttatattttgagagcatgactttttcatcatatgtatgggaaatagttgtgcttgaaaaaaaaaagcattatttagggaagaatcagtcattcgcaacttagaaaacagacacgagttatacaagtgatggcttctaatattcatagcatgta

SEQ ID NO: 22373 - DNA, 1062 bp, Homo sapiens
cccatctctactaaaaatacaaaaatgagccagacatggtggcgggtgcttgtaatcccagctactcaggacgctgaggcaggagaatcccttgaacccgggaggtggaggttgcagtgagcagagattacgccattgcactccagcctgggtgacagagccagagccagactctgtctcaaaaacaaaaacaaacaaacaaaaacacacacacacacaaacaaaaagtctgtcctgccccttccasaacagccccacagatacctaagagctcatcacttctaaacgtacctcctaacttccttcttctgctcttccttttctctcttctctctccttttctttccttttaccagctccttatgacgtataccaacttaaaaaaaatcttttcctcagggccatacaaacaaatccagtctctgctacaactcactggagataaatagttactatcatctttatgtacatctctccatgtaagataaaagaatcactccagttaaaagtcatagttttcaagcattctgtataaaccaatattagcaaacatttactgagtgcctgctatgtgccaggcactagctatatgccacttctaacccttacaacccttccaggtgagttaatgatagctaatacttacaaagcctttacaatcgactcatctaggatatggtaaacaccagtaaagggcttatgctggaggctgacacatagtgacattcaataaatgttaactgttactatctcttgtacttcgggaagaatttggagaatgttcgactcaactacagtgttctacatagcattaacctggggaaattttttggctcctgatgggctatttctcctacatttgtgttaaccacagagtttggtccttaaagctattcaaaaggatgatcgaggatcaaggatggaggcctgcatttttcaaaagcttcaggttattctgggccaggcctttgcacagttctttgaggtctgtttcttccacggaagaagcactatcaggtacaagaagaacgggacctgaaagttgagtttcagctctaatga

SEQ ID NO: 22374 - DNA, 582 bp, Homo sapiens
ctattccttcttttctcaggtttgacatttttcaatataaaaagttggcaaaaaaaaggtttattttgtttagaaatggttgcatgctttcaaaaaatgtatgtttttataaaaattagaaaaatattagtccttcagtgtcccaaggttaaaaataattgtgataaaattttgccataaatgaattaatatctgtaataataataaatattgatatttttatgctttgaaaagtacctggcayacaatacgtgatctataagcatttgataaataaacagatacgtacatgtatacttacttgggttccacaatttctgccctgagaaataagagatccaactactccaggccacatcaatcaaatggaccaactatcctcagacagtgccctctcccaaacccacatctgcccctttgatgagtgagctgccttagcaacaagaaccaagaccacttggataggtggaatctcacacagttcaagagaagtgggtaatattttaatcctataattaataaataaagggagaataaagcacttcacacagtgtctgtctcttggtgtcctgcaatttccat

SEQ ID NO: 22375 - DNA, 573 bp, Homo sapiens
tcgtggaaaagaaacctaaatttttttcacaatgtgccgtattttacaaagtttgcaacatttttaaaagaattttcctctcaacaagaataatttttttctcctaattaagcaataaatagaagtatgcaaaasaagccattggtttaaaactacatggcaatagaaaaggcttttgttttcgcctgctttgaggaaactcaatatagtgttttagaaaggttggcagaggtgctgacggggagaaaaggaggcccccttgccccagtttcaagccttttaaaccgaacttgcattctaggtcatccactatgtgtggtggttaggctcctagtttagaatattttacatagataaagagaggcttttttcatatgaaaaaaagctcaatatcactgatcactagagaaatgcaaatcaaatccacaatgaggtaccatttcctaccagtcagaatggctattattaaagagtcaaaaaataacagatgctggtgaggttgtggttgtggggaaaagggaacacttatacactgttggtgggagtgtaaattagttcaaccattgtggaaag

SEQ ID NO: 22376 - DNA, 527 bp, Homo sapiens
gtcttgatttctaataaaatgtggcagtaagacactcctccctgaccaagctttcatcaggctccactaagctkcttttctcctaggcctcaaccttggctcccatccttgccagatcggcattgcccagttttagcaggaatcctgctaagtcagtttagagagggtcccctctacccttccatctgaaaccccggcctgtcttcagcaagaatcctgtgaggtcggtctagcaggaatccccccaaccctttatgactgctcttaggagtgttccatccattgacttctccctaccccttggctgtaaaactctagcagcctttactgtatttggaatttatcccagctctatactgaggtttcttttcccctgttgcagtagtttctgaataaaatctgtctttactgcattaactaatgtttgatgttggttttctttttgacagtttcttgctgatgaagcttggatctggatcagaaccaccaccaaactcttggataggatcactggacctcccagcttg

SEQ ID NO: 22377 - DNA, 516 bp, Homo sapiens
atacctactgaatctgcattttagtaagatccctaggtgatgtattgtacattaaatcttgaaaagcagtatcttgctttattaggttgaaataagatgtctgcttttcactttacagttggtaataatgattgtcctttgattctaattgaaaattwtttatttataagatatatgtatatgtacatctgtcctactgaggcttataatttaagacaataccaggaagacatataaaaatttaggctccaaccagatgtgtacaaattttactttaatcttcaaaggtatataaatatgtaaaaaattatcagagattcacttttgtctgaaataaacctttctattgacgtgttacatagtctcttctctacaaattgtaacataggcaaaattacatcctttatgctatcactataagtggtataataataaataaaacatggattctaaataactattatttgaataaattattatgctcaagtataactctcacttccttagatcacaagg

SEQ ID NO: 22378 - DNA, 516 bp, Homo sapiens
atacctactgaatctgcattttagtaagatccctaggtgatgtattgtacattaaatcttgaaaagcagtatcttgctttattaggttgaaataagatgtctgcttttcactttacagttggtaataatgattgtcctttgattctaattgaaaattttttatttataagatatatgtatatgtacatctgtcctactgaggcttataatttaagacaataccaggaagacatataaaaatttaggctccaaccagatgtgtacaaattttactttaatcttcaaaggtatataaatatgtaaaaaattatcagagattcacttttgtctgaaataaacctttctattgacgtgttacatagtctcttctctacaaattgtaacataggcaaaattacatcctttatgctatcaytataagtggtataataataaataaaacatggattctaaataactattatttgaataaattattatgctcaagtataactctcacttccttagatcacaagg

SEQ ID NO: 22379 - DNA, 472 bp, Homo sapiens
tctaacagctgcaagagccaggcagaaggtcgtgcatttcccacctcaattcctttcccacccagtagttcccccaactttcctcatttttcacattaatgaggcttaggagtcagttttctctgaagaaactggtggtgaaaatgaaaactgttagattgaaagcttaggtctttctgccccaggctgtgaagatccttatgggagaatttggtccactcaccgtgagtgaaacagttgaagctcagagccccttgtgtgaccaggccctgtccctaatgtccctgtgtggtttggcattcttttctttgtgatgagtgtaccctgaattgtataaacctcgggccctgcaagatctggacccaccctggcccagagcctgctgggggyggccagtgacctctgggcacacagggagtgggagcctcctcaggggagggtgtgatcaggacttgcaagcctcgagttggac

SEQ ID NO: 22380 - DNA, 602 bp, Homo sapiens
tcagctgtggtttggagcttgtgactttatgagagcagcttgaaggaaagacttttaaaggtacatgatgaagaaaaccaaattaaataattggttaggtacagttcatagttacttgayttgtacaattaaggtggacatttcctggttatgtaatcagaggttaattggcagtttatgattggttaagcctaaatttttgtttccctcaattcagtaatttgcaaaaaaatgcatttgagttagagtttttaaaaaataggaacccagggactagagtaacctccgtctaattgcctgctacttagttattttcacactccacaggagactgattttcccctgcatttttcacagttctctcaagctgggtctcaagcctacccctcatcccattcctccagactaactatgacttgcagtaaaatactaaatttccagtttcttctcacattctcaaatgccagcttcccctttctaattcacattatcaactatttgtcttttattgtacactttagatactgtattttaactaagcattttttgacattgaatggcacttaaaaaaatcgttttctgtttgaaaatattttttatga

SEQ ID NO: 22381 - DNA, 602 bp, Homo sapiens
tcagctgtggtttggagcttgtgactttatgagagcagcttgaaggaaagacttttaaaggtacatgatgaagaaaaccaaattaaataattggttaggtacagttcatagttacttgacttgtacaattaaggtggacatttcctggttatgtaatcagaggttaattggcagtttatgattggttaagcctaaatttttgtttccctcaattcagtaatttgcaaaaaaatgcatttgagttagagtttttaaaaaataggaacccagggactagagtaacctccgtctaattgcctgctacttagttattttcacactccacaggrgactgattttcccctgcatttttcacagttctctcaagctgggtctcaagcctacccctcatcccattcctccagactaactatgacttgcagtaaaatactaaatttccagtttcttctcacattctcaaatgccagcttcccctttctaattcacattatcaactatttgtcttttattgtacactttagatactgtattttaactaagcattttttgacattgaatggcacttaaaaaaatcgttttctgtttgaaaatattttttatga

SEQ ID NO: 22382 - DNA, 492 bp, Homo sapiens
ttttcagatttgttcttttttcacagctatttggggagtgtttttttggttccccataaattttatgcctcttaatttcatttttgttcaaaaatgttcttggcattttatagagtttgcastgaatttgtagatttccttgtgtagcatagccattttagcaatattttttataactcatgagcaaaaatatctttttttttacttttttcatcaatattttataatttatagtgtagagagtgtttctctttttaattaagtttactgctacacatctttattttttattctagataaacaaaaagtatttggaaaattttacgtgactttgtaattaaaaacaactgaacaaattaggtataaatgatatgtacttcaacacagctaaggcaaaatatgacaaatcaataaacaaattaaatattgtcaccggcaggtcttcatgattttttttttttaaattagaggactggatagagaaagatcatg

SEQ ID NO: 22383 - DNA, 521 bp, Homo sapiens
tgaggactgtatggtgccctataacatggactttacatatatatayatatatatatatatatgtatcttattgccttttatggatagtggcatccaaattccaggcagcagtttaaagcaacagagaaagaagagcaaagagcatatatctctatctcatcaaaaagatttcaagaagctgctacataaacacttctgcttaccatccaggtgacctgcatttagtcatatggctatacctagctgcaaagggaaagtgggagctgtagtttccattctgggaagccatgtgccccaaattggaggcttgatcaccattgaaatatgggagaatggatattgcaggataagttgtgcattcccaaatatccatgaacacactactcacttctgttcacacaagaacaacatcagccccttcttaaggaaagcaactgccaaatgccataaaattactcatctactcaaagtccttgacctttgggtatgctggtcgctctccatcggggccagatgtagca

SEQ ID NO: 22384 - DNA, 521 bp, Homo sapiens
tgaggactgtatggtgccctataacatggactttacatatatatacatatatatatatatatgtatcttattgccttttatggatagtggcatccaaattccaggcagcagtttaaagcaacagagaaagaagagcaaagagcatatatctctatctcatcaaaaagatttcaagaagctgctacataaacacttctgcttaccatccaggtgacctgcatttagtcatatggctatacctagctgcaaagggaaagtgggagctgtagtttccattctgggaagccatgtgccccaaattggaggcttgatcaccattgaaatakgggagaatggatattgcaggataagttgtgcattcccaaatatccatgaacacactactcacttctgttcacacaagaacaacatcagccccttcttaaggaaagcaactgccaaatgccataaaattactcatctactcaaagtccttgacctttgggtatgctggtcgctctccatcggggccagatgtagca

SEQ ID NO: 22385 - DNA, 533 bp, Homo sapiens
tgtcatcacttaaactaactggatactacagatactagttaggttagagtttcctctctttctctgaaaaatatatatatataaaataacttttcaactataaatttttgggttttttgcactctcctttgtaaaaataaggcccacagcctcaaatcctctgaatccaatatcactaggtttcagactccrtgtgcaccttaggacatactatggagaaccatgccccagagtcatctcctgaacattggtgtggatttttattactcagttacttaaaataaagtcaaaggatgcaaatggaatttgacacattattgcccttaactcatactgaacttaatacactgtgatgtgaagcacaaacgaatgcaaaacaatatgcactaagaccacagaatggattaggtgaatttaaagtcacagtctatataatattaatgccaaggtgagcaatgcactatatttgcttttacattgcctacagtgtcttgcatgccaccaatacaaattttttaatcgcctaaaaattc

SEQ ID NO: 22386 - DNA, 533 bp, Homo sapiens
tgtcatcacttaaactaactggatactacagatactagttaggttagagtttcctctctttctctgaaaaatatatatatataaaataacttttcaactataaatttttgggttttttgcactctcctttgtaaaaataaggcccacagcctcaaatcctctgaatccaatatcactaggtttcagactccgtgtgcaccttaggacatactatggagaaccatgccccagagtcatctcctgaacattggtgtggatttttattactcagttacttaaaataaagtcaaaggatgcaaatggaatttgacacattattgcccttaactcatactgaacttaatacactgtgatgtgaagcacaaacgaatgcaaaacaatatgcactaagaccacagaatggattaggtgaatttaaagtcacagtctatataatattaatgccaaggtgagcaatgcactatatttgcttttacattgcctacagtgtcttgsatgccaccaatacaaattttttaatcgcctaaaaattc

SEQ ID NO: 22387 - DNA, 562 bp, Homo sapiens
ttttttcattttcacctttagtattagaaaggaattgaagctcttatcaggatgtttaaaatcacatgcatagaactaatggattttctctagaactcggcttccccatttataacatccaaaatttagtgattctctgactttagaattctaaaggggaaaatgtgtaattagaattctaaggcaaagaatgtgcttggtgattatttggattctggataaacaagggttcctttctttgtttccaattagtggaattaatattctcagacccattctgcagcttacagagcaaccaaacaaactgattcagtaaatacaggcatttaattttatgttgtggtttaaaatctagcttaagccctgaagcrtgcttaaattctagagattagaatttatatcttttgtaatctccaatgggttttaattttgtaagtgagccaacagattagcagaaaccctagataacagtgaactaatgatttaaaaaaaagtcccaacttgatattaagtgaatacctatttttttctagcaaactgttccttcaacataggtgaattc

SEQ ID NO: 22388 - DNA, 1334 bp, Homo sapiens
tgcaagcatgagccaccatgcctggctagagagcaattttttcaacacagaagggctaactgtctcctgcgtggctctgatgataactcttctggcctgaggcaaggactccagcagggtgaagagcaaagatgaactcctcagagagtcaaagggtaaaatgttgtataaacacctggggttactgcttatcctagacagcctcctagatacatcatttctttactcataaagttctagggaacttgtgcttccttcctttctgttggaagttgtagcacataaagccatawcacagaggatcggagaactggctttggggccagatcgtctgatattttatcctgttgcttaatatttgtataatttgggacaagtttcttaattctatgcctcaggttctacatctgtacaatacaagtaactacaacacccatctcctcagattatagtgattatcgagccaatacctatacaatgcctaaaatattgcctggcgtattgttagcatttagtacacgttatcacctttccatctcaccatttcaatcaataccgaaagaaatgttgatctctccattgacacagtagataaaaacgaggttacacatggattcttaaagataaattttcactgttctcttaaacggcaaaaaaaaaaaaaaaaaaaaaagtaaaatttgggctagagtactgtcaagtttggtgtggtagaccagagtgcattattgagtgttgtgtcaggagaaagaggcaaagcagacagggcaaagccggaataattcctggaaataaagaatcagtgacagaggtgtaggataaggaagagctcgataaaggcttggattttcccctcccttatcccttatcaccacctgcactgccagagcacaccttccttggaccagtgctggagcgagatgagaaatgagaacgttaggtaggcggatccaagggaaagtaaggcagagatgaagtggaagcataaattatcacatatttaaaagaaaatggaggtagagaggtaagaagagagcactgtcaagatatttgaagagtggttgtgctgatgagcaaagagggcaaccctacggctgtctgctattcaggctggccttgcatacatgcatgttgtgcctaaaattttacaaagttttgggaattattattcctgacataaaattttggaaattagtattcttaaaatgacatcttgcaaaacacatcacaatataaaatgagttacatgataaacttcaggacaacagagactgcaaaagtcaacatgaaccagaatagtcaaaaacgttcttatggagcggtggtaaactagg

SEQ ID NO: 22389 - DNA, 1334 bp, Homo sapiens
tgcaagcatgagccaccatgcctggctagagagcaattttttcaacacagaagggctaactgtctcctgcgtggctctgatgataactcttctggcctgaggcaaggactccagcagggtgaagagcaaagatgaactcctcagagagtcaaagggtaaaatgttgtataaacacctggggttactgcttatcctagacagcctcctagatacatcatttctttactcataaagttctagggaacttgtgcttccttcctttctgttggaagttgtagcacataaagccataacacagaggatcggagaactggctttggggccagatcgtctgatattttatcctgttgcttaatatttgtataatttgggacaagtttcttaattctatgcctcaggttctacatctgtacaatacaagtaactacaacacccatctcctcagattatagtgattatcgagccaatacctatacaatgcctaaaatattgcctggcgtattgttagcatttagtacacgttatcacctttccatctcaccatttcaatcaataccgaaagaaatgttgatctctccattgacacagtagataaaaacgaggttacacatggattcttaaagataaattttcactgttctcttaaacggcaaaaaaaaaaaaaaaaaaaaaagtaaaatttgggctagagtactgtcaagtttggtgtggtagaccagagtgcattattgagtgttgtgtcaggagaaagaggcaaagcagacagggcaaagccggaataattcctggaaataaagaatcagtgacagaggtgtaggataaggaagagctcgataaaggcttggattttcccctcccttatcccttatcaccacctgcactgccagagcacaccttccttggaccagtgctggagcgagatgagaaatgagaacgttaggtaggcggatccaagggaaagtaaggcagagatgaagtggaagcataaattatcacatatttaaaagaaaatggaggtagagaggtaagaagagagcactgtcaagatatttgaagagtggttgtgctgatgagcaaagagggcaaccctacggctgtctgctattcaggstggccttgcatacatgcatgttgtgcctaaaattttacaaagttttgggaattattattcctgacataaaattttggaaattagtattcttaaaatgacatcttgcaaaacacatcacaatataaaatgagttacatgataaacttcaggacaacagagactgcaaaagtcaacatgaaccagaatagtcaaaaacgttcttatggagcggtggtaaactagg

SEQ ID NO: 22390 - DNA, 588 bp, Homo sapiens
tggaaaggccaaatagggccccttctctcagtggctcctccctgggcagctgtgggttccaagtctaacactttggttagtacccttggaaatgcagtgccctggaaacccacaaagatcccacggagggcagtgatcctattcagatttacaaacccaactcaccccgcccggggccgagggtctttttctggggtgggagggaattgggggtgcttgtgttggtgggacactttgtctgggtgtgggtggcttaagtcttgggtcagaggtgagccgtgagcagctctcaccacagtgcatgagggtgcgatgtcccatgtcctccaaccggtgatcatggtagggagttakttttcttctcaaagtgctgcttaccttatctgaactgagggtggcagctgctgtggtgggcacagaaggactgtgctcttgcccttgttggcttccagcagctgtatgaatgtggacagtccgttttcccctgggtcagggtccctcacctgacctgtgagaggacaggctgtgctgggctgtctgtaaggtcctgtccgctctgaaagtctgtctgcatatgcctgtttgtca

SEQ ID NO: 22391 - DNA, 566 bp, Homo sapiens
aaaaagcctagctaaccaatatggcagatctagtaacaaatattccaagataatgctatgtagagtaactacttaattgctgttattttctacttagaattctcaacacagaacctaagatacagtcatgactatttttctcagtctttttcattcataaaatctcagccttcctcagggagattctgatagcccattcatgttctccatcaccacctggagttatgccccagtaccttttgcttaaggctaatataaaagattttgtagtgaagatggtttgtccctgtttgaaattgatattatgaaaacaayatggttatttttccattttccaagtataaaactactttatattgaacatctctttttaaatcagacatgtctctctagagatcccaatggcctctacattcttactgatataaagcatatagtcaaggtgaaaataaataattgtttattgatgttaatcaataaagctatcaataccccataaacctataaaagggttacttcggggaagtttttttccctaaatatacactgaaaaaagcaatttgttt

SEQ ID NO: 22392 - DNA, 566 bp, Homo sapiens
aaaaagcctagctaaccaatatggcagatctagtaacaaatattccaagataatgctatgtagagtaactacttaattgctgttattttctacttagaattctcaacacagaacctaagatacagtcatgactatttttctcagtctttttcattcataaaatctcagccttcctcagggagattctgatagcccattcatgttctccatcaccacctggagttatgccccagtaccttttgcttaaggctaatataaaagattttgtagtgaagatggtttgtccctgtttgaaattgatattatgaaaacaacatggttatttttccattttccaagtataaaactactttatattgaacatctctttttaaatcagacatgtctctctagagatcccratggcctctacattcttactgatataaagcatatagtcaaggtgaaaataaataattgtttattgatgttaatcaataaagctatcaataccccataaacctataaaagggttacttcggggaagtttttttccctaaatatacactgaaaaaagcaatttgttt

SEQ ID NO: 22393 - DNA, 566 bp, Homo sapiens
aaaaagcctagctaaccaatatggcagatctagtaacaaatattccaagataatgctatgtagagtaactacttaattgctgttattttctacttagaattctcaacacagaacctaagatacagtcatgactatttttctcagtctttttcattcataaaatctcagccttcctcagggagattctgatagcccattcatgttctccatcaccacctggagttatgccccagtaccttttgcttaaggctaatataaaagattttgtagtgaagatggtttgtccctgtttgaaattgatattatgaaaacaacatggttatttttccattttccaagtataaaactactttatattgaacatctctttttaaatcagacatgtctctctagagatcccaatggcctctacattcttactgatataaagcatatagtcaaggtgaaaataaataattgtttattgatgttaatcaataaagctatcaataycccataaacctataaaagggttacttcggggaagtttttttccctaaatatacactgaaaaaagcaatttgttt

SEQ ID NO: 22394 - DNA, 538 bp, Homo sapiens
ctccagcctaggtgacacagcaagactccacctcaaaaaaaaaaaaaaaaaaatagtaatggcaaaaactgcaattacttttgcaccaacctaataaatttattcaacagcaagtaagggtaaaagaggtgagcatctaggtgcagatgctcagcactgcaacacaagctttactccactctcctcttcatgctgactttcgccctcatgcttgctacttcatgacacaaaagggcttctgcaactccaggcctcctggatgtgatccaacraggaaggcaggagaaagggaggagcagcacctcctcccatatcaggaaagaaaaggtttctcaagataaatttagcgtgtgtcctattagccagaattataacatctgaccacctataatagtaagtcagcctggggaactaagcgtttacctggaaatattacaacaaattcacaaaaaaaatctgcgtgctggttggtaataaagaattaaattaggccgaggcaggtagatgacaaggtcaggagttcaagaccagcctgacc

SEQ ID NO: 22395 - DNA, 607 bp, Homo sapiens
attaaaaagtcaagaaaattccactcatttgaaaccataattacatgtattaactttttttttttttaaaaaaacccttgttttatagtgttaagattaactgaactaaaaacctgaaagtgaattattagggcactattttgttataaattgcaaacaatatcttataattggtaacattctttattgtaattgtaaaagtcaaacgacaaaaggccaaaatgtatcatataaaggtaatgcagtaatatgcgattattaaaacatgatggactgctatatgtgaacttattattaaacaactgctttgacagaagcttcctytgagtgataaatgtaagctttgactgaggcttgagtatgagatacaggggctagtgctgtagccccttgatcttcaagtatggtctgggtatagcaatatcagtattgcctgcgaactagtcagaaatgcagaatctcacactctacctggagaacactgaatcagaatccctgagagtggggcccagcaatcagtgttttaacaagtcaagtgatcttgatgcagttccagattgagggggtgcttaggtagaagtccatgcacttggacattataactaca

SEQ ID NO: 22396 - DNA, 607 bp, Homo sapiens
attaaaaagtcaagaaaattccactcatttgaaaccataattacatgtattaactttttttttttttaaaaaaacccttgttttatagtgttaagattaactgaactaaaaacctgaaagtgaattattagggcactattttgttataaattgcaaacaatatcttataattggtaacattctttattgtaattgtaaaagtcaaacgacaaaaggccaaaatgtatcatataaaggtaatgcagtaatatgcgattattaaaacatgatggactgctatatgtgaacttattattaaacaactgctttgacagaagcttcctctgagtgataaatgtaagctttgactgaggcttgagtatgagatacaggggctagtgctgtagccccttgatcttcaagtatggtctgggtatagcaayatcagtattgcctgcgaactagtcagaaatgcagaatctcacactctacctggagaacactgaatcagaatccctgagagtggggcccagcaatcagtgttttaacaagtcaagtgatcttgatgcagttccagattgagggggtgcttaggtagaagtccatgcacttggacattataactaca

SEQ ID NO: 22397 - DNA, 1518 bp, Homo sapiens
atcaggtaatttagaagataaacactgatgttggggtcactttgtgtttgttgactgtgaaaaagatcacgagaaaaacgtgttgatcaagcaaaagtaagtttattagacttgttgcagtaagggaagacactaagatagtgactttacaatgtctcagtaggagcaagtcaggggaggctatttctagggatttggggggcctgggctgggtacttttaagtggattttgtaaggttggtaacttactggtggagctggacagaatttctgacaaatggctttggactggtgggcataggcaaggctaggtgtcttgaagcaagcattgtgtgtcaactgttagcttcagaagttaaaatcagtttaattcgtttacacttaccaaccaggagcaagtatttcctggagcaaagagctgttgtttttgcctagtcccatttttgtttaaaaatttaaaaattggaaattgtttaggaaattaggaaactggaaattatgtttggtcttggaattgtttcacgcaggaacaggaaacctggttttgtctcagaattgtttagcactggaaagtatgctggtttcagttatcagttccgattttgctacagaaaagacagaccatgttggggcagatactcaatgtgccacatacctgcttcttgctcaatgcccgcaaacctcattggaagctccgtcttgggaggaagatggacacttagggcagggagaccaaatgcagagtattcagggccccagagtaagtgagaacagtagatgaggctgtgtaacttgagtggcgatccagaagtagtgccaagcataaaactggagattctcaagaggataaaagtgaagaaatgaggagccaattgacagcctgaagtgtcagaaacaagatggattcagatgaggggaacagactgggaagaactgttcagacccaaagactgaatgaggagtacgcactggaccaaccttctttatgctgccattctggaggttggtttggtggctggggggctgttcagcctggatacaacctctttaagtcttatgtcactcatctgaacaatgggtacaaaggacttgacctgcctaactagtagtgattgaagagattatatgagataatatatggcacacattttatatagtayaatgctctcttaagatgtggatactaacatttaaattttactacatcacattaaaaaggagaggtttcagaattggggactttgttttgtatgcatcaggcaacattatacaggcatcttcttttcctaattatatataagactgacccagattgtaggatggagtataaacatggagaaagataaaaattaggcagtgcacaattgcgagaacatgcaggcaggtagacacactatttcctgaaatgcacatactgaattggattaaatacatttcattacattgtgattcaaaccatttattgaaaatctgtgcatgttattgcactgtgctcattcacatccatcatctcattaa

SEQ ID NO: 22398 - DNA, 1518 bp, Homo sapiens
atcaggtaatttagaagataaacactgatgttggggtcactttgtgtttgttgactgtgaaaaagatcacgagaaaaacgtgttgatcaagcaaaagtaagtttattagacttgttgcagtaagggaagacactaagatagtgactttacaatgtctcagtaggagcaagtcaggggaggctatttctagggatttggggggcctgggctgggtacttttaagtggattttgtaaggttggtaacttactggtggagctggacagaatttctgacaaatggctttggactggtgggcataggcaaggctaggtgtcttgaagcaagcattgtgtgtcaactgttagcttcagaagttaaaatcagtttaattcgtttacacttaccaaccaggagcaagtatttcctggagcaaagagctgttgtttttgcctagtcccatttttgtttaaaaatttaaaaattggaaattgtttaggaaattaggaaactggaaattatgtttggtcttggaattgtttcacgcaggaacaggaaacctggttttgtctcagaattgtttagcactggaaagtatgctggtttcagttatcagttccgattttgctacagaaaagacagaccatgttggggcagatactcaatgtgccacatacctgcttcttgctcaatgcccgcaaacctcattggaagctccgtcttgggaggaagatggacacttagggcagggagaccaaatgcagagtattcagggccccagagtaagtgagaacagtagatgaggctgtgtaacttgagtggcgatccagaagtagtgccaagcataaaactggagattctcaagaggataaaagtgaagaaatgaggagccaattgacagcctgaagtgtcagaaacaagatggattcagatgaggggaacagactgggaagaactgttcagacccaaagactgaatgaggagtacgcactggaccaaccttctttatgctgccattctggaggttggtttggtggctggggggctgttcagcctggatacaacctctttaagtcttatgtcactcatctgaacaatgggtacaaaggacttgacctgcctaactagtagtgattgaagagattatatgagataatatatggcacacattttatatagtataatgctctcttaagatgtggatactaacatttaaattttactacatcacattaaaaaggagaggtttcagaattggggactttgttttgtatgcatcaggcaacattatacaggcatcttcttttcctaattatatataagactgacccagattgtaggatggagtataaacatggagaaagataaaaattaggcagtgcacaattgcgagaacatgcaggcaggtagmcacactatttcctgaaatgcacatactgaattggattaaatacatttcattacattgtgattcaaaccatttattgaaaatctgtgcatgttattgcactgtgctcattcacatccatcatctcattaa

SEQ ID NO: 22399 - DNA, 549 bp, Homo sapiens
ctgtgaacattttgggcaatacygtctctgccagtgacccccaattgtccacttgtctccagcaagatcgaaccatgtaagtgccatttctgacaagttgggtgaacgttggtttcaaatcatcagctctgcattcaagtgccctgctacaattctggctcactctgtgggaataactgcctgcctgggcacgttgctgttgctgcctcccaaacggcagtttctggggtcccaggtcatccaggctggatgtggcttgggagagacctgtggcaccaggttggagggaggtctcacctctcctttctgagctgtggactgcagcttcaggaccctatggatgaggccgaatgtcatgaagataatggaatttggagtctcaacaaagccaagccacatgccagagattcaccacctggggcccaggatcagaagtgtgcccttaggaggccaaacatccacctgtctaccaactagacatttggtctcagacagcaagaaaggctgcgtttatgtcattagggggaacaccacggtcttcggcatgag

SEQ ID NO: 22400 - DNA, 515 bp, Homo sapiens
gaagggtaattttgaagtctcttcttttgacacatccaccctctcccccggggcccctctccttacagggcatgtacaatgccatcacccggcaggtggaaacggagctcttcccctgcctcaggcactttggactgaggttctatgccttcaaccctctggctggtacgtggagcattcctggccctgtctcagcctattcccgacccacagatgcccagcccaggacctgggaagcaaggagggtttgacaaactttgacctctsaggtcaaagacgtaaaggctgcatcttcagccctcctgggtccctgcccctcccctagaccagagccctgagggatgtggcagcttctggggcactctaggccccggggctgattgctgctttccctcagggggcctgctgaccggcaagtacaagtatgaggacaagaatgggaaacagcccgtgggccgcttctttgggaatacctgggcagagatgtacaggaatcggtaagctgtgggtgcttg

SEQ ID NO: 22401 - DNA, 515 bp, Homo sapiens
gaagggtaattttgaagtctcttcttttgacacatccaccctctcccccggggcccctctccttacagggcatgtacaatgccatcacccggcaggtggaaacggagctcttcccctgcctcaggcactttggactgaggttctatgccttcaaccctctggctggtacgtggagcattcctggccctgtctcagcctattcccgacccacagatgcccagcccaggacctgggaagcaaggagggtttgacaaactttgacctctgaggtcaaagacgtaaaggctgcatcttcagccctcctgggtccctgcccctcccctagaccagagccctgagggatgtggcagcttctggggcactctaggccccggggctgattgctgctttccctcagggggcctgctgaccggcaagtacaagtatgaggacaagratgggaaacagcccgtgggccgcttctttgggaatacctgggcagagatgtacaggaatcggtaagctgtgggtgcttg

SEQ ID NO: 22402 - DNA, 540 bp, Homo sapiens
ggaaaaatgcactggtcatgtccttctcaggtatgtagtgacactttgggtggtgggcagggcaatgctagcagtattttaagctgatgtggtggccacctttttaaagattatacctgaaaatgtactggcaacttttcactataaaacaaatgaatattacacaaggaagagaaaacacaaatttcttctcaaaattagcaaaggtccataaataaataaaatataggggtaatttatttctaaacagtcaattcaagtattatgcaatccaccttcttcaaaaactagccggtttttgtcaaagctagtggaagaacaacgaacrtacaaatgtaccactcttgtaccatgctgttgattctgcagtatttgtatatattctgtaaggtagacactattctccctaccttacaagtgagaaaacaagaacctagaaaggttaataggttggtcaaaattcagctgactggttaaacagcacaactggtcttcctgttcaggtttcccgacctcaaatccactaatctttgaagagag

SEQ ID NO: 22403 - DNA, 540 bp, Homo sapiens
aaacacactaacattgtacaaccacctactgagattcttttattcagaaaaccatgctgcattccctattcttcctataaaaattggtaattttcatctactgacaaacttgctcaaatttgatacaggcatggaaatcgagggggggaaagtagatagaagaggggaacaaaagatttcagctgcccttgatgtcaacagaaaaatttaaaccatacatatccagaggatacagaaatgccaaaatcccagttccttcctttctccagagtgctgcagttcaaagagcatgggcttcagagccagtcagaatgatccacatcttggctctgttatttgctagtttcacgatgctatgaccaccagtctacttcttagtaaaatggaggtgacaatgcatcccttacagggcaggtaagagaaatgacatgagatagtacatgtgcaggtccagcacataraagcccctcaatcaatgctggcttcgaccctcctgacttcaagataataacttgattcgaagatcaggtcttgcagact

SEQ ID NO: 22404 - DNA, 540 bp, Homo sapiens
aaacacactaacattgtacaaccacctactgagattcttttattcagaaaaccatgctgcattccctattcttcctataaaaattggtaattttcatctactgacaaacttgctcaaatttgatacaggcatggaaatcgagggggggaaagtagatagaagaggggaacaaaagatttcagctgcccttgatgtcaacagaaaaatttaaaccatacatatccagaggatacagaaatgccaaaatcccagttccttcctttctccagagtgctgcagttcaaagagcatgggcttcagagccagtcagaatgatccacatcttggctctgttatttgctagtttcacgatgctatgaccaccagtctacttcttagtaaaatggaggtgacaatgcatcccttacagggcaggtaagagaaatgacatgagatagtacatgtgcaggtccagcacatagaagcccctcaatcaatgctggcttcgaccctcctgacttcaagrtaataacttgattcgaagatcaggtcttgcagact

SEQ ID NO: 22405 - DNA, 634 bp, Homo sapiens
agatatgacaattaaataccatatagtccaggatccaaacagacactagtgaaaaaactggtgaaatgtgaaggtttgtgaagtaattaattgtgtctcatcaatattgatttcctcctttccataattgtgttgtggttatataggatgtctatgtaagtggaaggtaggtgaagatagacaggaattctctggaatatttttgcaactgttttctaagcctaaaattatttcaattttaaaagcgcaaaaaggattgagttgtaataatttgcagattttaatcaataacatttatttcacaagtactgatwgaatgacttccctctgctaggcactgtactaagagacatctaaagatgcacaagacacacacacacacacacacacacacacacacacacacacacacacactcttccagttattttaagcaattcttaatcactaatattaagacaagcattcttatttttccagaaatgagaaccaaacatctctaattataatggtggtcttatgacaagagtaattaagattaaacatacatcaaattatctataaatttgatgtaattccaactttaaaatcctcaccaaattatataggccttcataaatggattctgaagttc

SEQ ID NO: 22406 - DNA, 536 bp, Homo sapiens
cctctctgagggggtgaccttaaggcagagatttgaatcgtgaaattatttatttccaggtttattgtttctatagttttaatgtgttgttttaagccactgagtttgtggaaatttttataactgcaataggaaaccaatagtttcttcatttgtaaaataagcattagtgaccttgtagaattgatgtgaggttttaaaggaaaataataagtgatttgaatgkatacaaaggagttagcagataaaggaataatatgtgagatattctctgaaagcgcagagaacactcatgtgagcgtgattcagccctcccacatgagggacgcctccatgtgaggccccaggaggagctaaatctgattctcttctccttccccatcctcatttccaaggccttttagtatctggccctgcatttctctccatccttatctctatttgatcccccactcattctcttcactccaaccatactttccatccaggttttttgtctttgctgtttattctccttggaactcccctgtatgatt

SEQ ID NO: 22407 - DNA, 536 bp, Homo sapiens
cctctctgagggggtgaccttaaggcagagatttgaatcgtgaaattatttatttccaggtttattgtttctatagttttaatgtgttgttttaagccactgagtttgtggaaatttttataactgcaataggaaaccaatagtttcttcatttgtaaaataagcattagtgaccttgtagaattgatgtgaggttttaaaggaaaataataagtgatttgaatggatacaaaggagttagcagataaaggaataatatgtgagatattctctgwaagcgcagagaacactcatgtgagcgtgattcagccctcccacatgagggacgcctccatgtgaggccccaggaggagctaaatctgattctcttctccttccccatcctcatttccaaggccttttagtatctggccctgcatttctctccatccttatctctatttgatcccccactcattctcttcactccaaccatactttccatccaggttttttgtctttgctgtttattctccttggaactcccctgtatgatt

SEQ ID NO: 22408 - DNA, 485 bp, Homo sapiens
aaaaggtggattttacagtgtatgaattatatgtcaacaaaagaaaatttaaccagagattaagtagtataaaagaggtaatgagaggtcagggagagaaaagaagactgtgggcatgaattaatggatacaactctgaggttggggcttgaaatgcacctcaaaaggcacagaggatttggatagatagaggaagtggttaaggcattacttaggaaggggtataaaccaagatattattttgacataagagaagtggcaagatgtaagtggaagaaaagacaaggcgagtctcttgttttcatggggcttctaaactggcatattaactgatctggcctgctaaggataatgctttgcacaattattttcatgggataaattgcatatccttctagtctcaggcaagaaktttttattccagccagagagcaagagcctaaggactctccgccatggtattcttaacgagttactgtaaggat

SEQ ID NO: 22409 - DNA, 545 bp, Homo sapiens
tataaaacttattttttaaaatatagtatggttttctattactaacatctaaaacaagcccatgacaaattattagaaagaaaatgcaaagagcttttcagtaaggggaacagttaaaaaaatttagagatgtttatatttttctttatttgaatgatattaaacaggaatcaacttaaaaaggaatgaaaggagatatattttaagacattaggaaagttttcacaaaaccttaaaactgaaaaaatgagctatacacttggrtataattattgcaaaaatattaattataaatttaaattaattccaatcaaaactacaatacatctttgatatgggtcgactgtgtccccacccaaatctcatcttgaattcccatgtgttatgggagggagccagtgggaggtaactgaatcatgagagcagatctttcccgtgctgttctcgtgatagtgaataagtctcactagacctgatagttttaaaaaatgacagtctccctgcacaagctctcttctcttgtctgcaatcatgtgagatgtgcc

SEQ ID NO: 22410 - DNA, 545 bp, Homo sapiens
tataaaacttattttttaaaatatagtatggttttctattactaacatctaaaacaagcccatgacaaattattagaaagaaaatgcaaagagcttttcagtaaggggaacagttaaaaaaatttagagatgtttatatttttctttatttgaatgatattaaacaggaatcaacttaaaaaggaatgaaaggagatatattttaagacattaggaaagttttcacaaaaccttaaaactgaaaaaatgagctatacacttggatataattattgcaaaaatattaattataaatttaaattaattccaatcaaaactacaatacatctttgatatgggtcgactgtgtccccacccaaatctcatcttgaattcccatgtgttatgggagggagccagtgggaggtaactgaatcatgaragcagatctttcccgtgctgttctcgtgatagtgaataagtctcactagacctgatagttttaaaaaatgacagtctccctgcacaagctctcttctcttgtctgcaatcatgtgagatgtgcc

SEQ ID NO: 22411 - DNA, 545 bp, Homo sapiens
tataaaacttattttttaaaatatagtatggttttctattactaacatctaaaacaagcccatgacaaattattagaaagaaaatgcaaagagcttttcagtaaggggaacagttaaaaaaatttagagatgtttatatttttctttatttgaatgatattaaacaggaatcaacttaaaaaggaatgaaaggagatatattttaagacattaggaaagttttcacaaaaccttaaaactgaaaaaatgagctatacacttggatataattattgcaaaaatattaattataaatttaaattaattccaatcaaaactacaatacatctttgatatgggtcgactgtgtccccacccaaatctcatcttgaattcccatgtgttatgggagggagccagtgggaggtaactgaatcatgagagcagatctttccygtgctgttctcgtgatagtgaataagtctcactagacctgatagttttaaaaaatgacagtctccctgcacaagctctcttctcttgtctgcaatcatgtgagatgtgcc

SEQ ID NO: 22412 - DNA, 532 bp, Homo sapiens
tagccaaaataatattttctctaattttgatcctatcaaatttattattttcaccattactaattgattttggctaggagaatgcattttgttatatttaattttttaatttcctgttcactagagatggaaattaggaatagctaccaagttttattgtgtgatttgtcagcatccagaagtaaatggttttatatatactttaatttgtttatttaaaaatttatgttgatrtatttccctacttgaccaagtcttaccctgctagaataaacattactagatcataatgcatatttcaaaaggtatgtaaatttaatttatttaattatgttttctttagatttattgtacctaagaccattttgatcaatatataatttttagatgttttgtgtaatatgtaatataatttgatttttacatatgctcaaaaaagaatattttctacatcaatagatgaaaaaataaagggtgttaattatagcaataatttttacattagaaataaagaggtcttgaggtgcaatat

SEQ ID NO: 22413 - DNA, 532 bp, Homo sapiens
tagccaaaataatattttctctaattttgatcctatcaaatttattattttcaccattactaattgattttggctaggagaatgcattttgttatatttaattttttaatttcctgttcactagagatggaaattaggaatagctaccaagttttattgtgtgatttgtcagcatccagaagtaaatggttttatatatactttaatttgtttatttaaaaatttatgttgatgtatttccctacttgaccaagtcttaccctgctagaataaacattactwgatcataatgcatatttcaaaaggtatgtaaatttaatttatttaattatgttttctttagatttattgtacctaagaccattttgatcaatatataatttttagatgttttgtgtaatatgtaatataatttgatttttacatatgctcaaaaaagaatattttctacatcaatagatgaaaaaataaagggtgttaattatagcaataatttttacattagaaataaagaggtcttgaggtgcaatat

SEQ ID NO: 22414 - DNA, 532 bp, Homo sapiens
tagccaaaataatattttctctaattttgatcctatcaaatttattattttcaccattactaattgattttggctaggagaatgcattttgttatatttaattttttaatttcctgttcactagagatggaaattaggaatagctaccaagttttattgtgtgatttgtcagcatccagaagtaaatggttttatatatactttaatttgtttatttaaaaatttatgttgatgtatttccctacttgaccaagtcttaccctgctagaataaacattactagatcatamtgcatatttcaaaaggtatgtaaatttaatttatttaattatgttttctttagatttattgtacctaagaccattttgatcaatatataatttttagatgttttgtgtaatatgtaatataatttgatttttacatatgctcaaaaaagaatattttctacatcaatagatgaaaaaataaagggtgttaattatagcaataatttttacattagaaataaagaggtcttgaggtgcaatat

SEQ ID NO: 22415 - DNA, 548 bp, Homo sapiens
gtttatatttttaaatgtaaaccttttattaaaatgtaacrtagatacagaaaggaacacaactcttaagtatccagcttaaagaattttcacaaagttaacaaaatcatgcaaccagcacccagataaaaaatagagcatcgctagtgctctgaaagcccctttggcttcccttccagtcattacccttccataagggtgaccatgatacggattactatcaccatagattggtcctgcctcttttaaaatttcatataaatggaatcatataggatgcactcttgtttcatgcctctttcactccttactatgagattcatccatgttgttttgtaaaattcatattcatactctcattatatacgtagtattccactgtatgaatacaccacactttgtttattcattctacttctgaagagcattttggtagttatttgggtcttataattaacactgctaagagcatctttgtatgcctttaagtcatcctactagttttatcctttctgaatccttttgttttaggtatgtctcttctacag

SEQ ID NO: 22416 - DNA, 548 bp, Homo sapiens
gtttatatttttaaatgtaaaccttttattaaaatgtaacgtagatacagaaaggaacacaactcttaagtatccagcttaaagaattttcacaaagttaacaaaatcatgcaaccagcacccagataaaaaatagagcatcgctagtgctctgaaagcccctttggcttcccttccagtcattacccttccataagggtgaccatgatayggattactatcaccatagattggtcctgcctcttttaaaatttcatataaatggaatcatataggatgcactcttgtttcatgcctctttcactccttactatgagattcatccatgttgttttgtaaaattcatattcatactctcattatatacgtagtattccactgtatgaatacaccacactttgtttattcattctacttctgaagagcattttggtagttatttgggtcttataattaacactgctaagagcatctttgtatgcctttaagtcatcctactagttttatcctttctgaatccttttgttttaggtatgtctcttctacag

SEQ ID NO: 22417 - DNA, 548 bp, Homo sapiens
gtttatatttttaaatgtaaaccttttattaaaatgtaacgtagatacagaaaggaacacaactcttaagtatccagcttaaagaattttcacaaagttaacaaaatcatgcaaccagcacccagataaaaaatagagcatcgctagtgctctgaaagcccctttggcttcccttccagtcattacccttccataagggtgaccatgatacggattactatcaccatagattggtcctgcctcttttaaaatttcatataaatggaatcatataggatgcactcttgtttcatgcctctttcactccttactatgagattcatccatgttgttttgtaaaattcatattcatactctcattatataygtagtattccactgtatgaatacaccacactttgtttattcattctacttctgaagagcattttggtagttatttgggtcttataattaacactgctaagagcatctttgtatgcctttaagtcatcctactagttttatcctttctgaatccttttgttttaggtatgtctcttctacag

SEQ ID NO: 22418 - DNA, 548 bp, Homo sapiens
gtttatatttttaaatgtaaaccttttattaaaatgtaacgtagatacagaaaggaacacaactcttaagtatccagcttaaagaattttcacaaagttaacaaaatcatgcaaccagcacccagataaaaaatagagcatcgctagtgctctgaaagcccctttggcttcccttccagtcattacccttccataagggtgaccatgatacggattactatcaccatagattggtcctgcctcttttaaaatttcatataaatggaatcatataggatgcactcttgtttcatgcctctttcactccttactatgagattcatccatgttgttttgtaaaattcatattcatactctcattatatacgtagtattccactgtatgaatacaccacactttgtttattcattctacttctgaagagcattttggtagttatttgggtcttataattaacactgctaagagcatctytgtatgcctttaagtcatcctactagttttatcctttctgaatccttttgttttaggtatgtctcttctacag

SEQ ID NO: 22419 - DNA, 661 bp, Homo sapiens
tttgggaggcagaggcgggaggatcacctgaggtcaggagtccaagaccagcctgaccaacatggagaaactccatctctactaaaaatacaacattagccgggcgtggtggcacatgcctgtaatcctagctactcaagaggctgaggcaagagaatcgcttgaaaccaggaggcggagggtgcagtgagccgagatcgcaccattgcactccagcctgggcaacaagagcaagactccatctcaaagaaaaaaaaaaagaaacatagagaatgaaaacaatgggccatgccagccaggtctgtttcctttcccatattttttaataaaaagaatgccttctttgagttatgtttgccctaytcataataatttgccttctcttttataactggagactctgaagagtcacataacctctttaggtcttagtttcagtcaaatgagtgacctgcactagatgatctctaagcaccttccagctcaaacattcttagattctattaacttgcttatcttctcattatttttaggagaaaagtagaaagaaataggagagtttacctatttaagaggcaagaactgaagtctaaggatgtagaatgtccagagctttatcccctgaatggcagaggtctcaatttaagttaaatcaatatac

SEQ ID NO: 22420 - DNA, 661 bp, Homo sapiens
tttgggaggcagaggcgggaggatcacctgaggtcaggagtccaagaccagcctgaccaacatggagaaactccatctctactaaaaatacaacattagccgggcgtggtggcacatgcctgtaatcctagctactcaagaggctgaggcaagagaatcgcttgaaaccaggaggcggagggtgcagtgagccgagatcgcaccattgcactccagcctgggcaacaagagcaagactccatctcaaagaaaaaaaaaaagaaacatagagaatgaaaacaatgggccatgccagccaggtctgtttcctttcccatattttttaataaaaagaatgccttctttgagttatgtttgccctattcataataatttgccttctcktttataactggagactctgaagagtcacataacctctttaggtcttagtttcagtcaaatgagtgacctgcactagatgatctctaagcaccttccagctcaaacattcttagattctattaacttgcttatcttctcattatttttaggagaaaagtagaaagaaataggagagtttacctatttaagaggcaagaactgaagtctaaggatgtagaatgtccagagctttatcccctgaatggcagaggtctcaatttaagttaaatcaatatac

SEQ ID NO: 22421 - DNA, 661 bp, Homo sapiens
tttgggaggcagaggcgggaggatcacctgaggtcaggagtccaagaccagcctgaccaacatggagaaactccatctctactaaaaatacaacattagccgggcgtggtggcacatgcctgtaatcctagctactcaagaggctgaggcaagagaatcgcttgaaaccaggaggcggagggtgcagtgagccgagatcgcaccattgcactccagcctgggcaacaagagcaagactccatctcaaagaaaaaaaaaaagaaacatagagaatgaaaacaatgggccatgccagccaggtctgtttcctttcccatattttttaataaaaagaatgccttctttgagttatgtttgccctattcataataatttgccttctcttttataactggagactctgaagagtcacataacctctttaggtcttagtttcagtcaaatgagtgacctgcactagatgatctctaagcaccttccagctcaaacattcttagattctattaacttgcttatcttctcattrtttttaggagaaaagtagaaagaaataggagagtttacctatttaagaggcaagaactgaagtctaaggatgtagaatgtccagagctttatcccctgaatggcagaggtctcaatttaagttaaatcaatatac

SEQ ID NO: 22422 - DNA, 523 bp, Homo sapiens
tattttaaatttacctttactacctatttatttggttcaaggctccatttcgtccactttgggactaggtaatcaggctttaaactacttacctctgcctgtcagaagtcactaacctcatgacaggaataatttaggttagaggagtagcaaaactattactcaactgtttctttagaaaaggagaaactcataaaacatgggaccctaawatttgaatattatatgtaagacggggttaaaatgtgttcaaaaagtgtcttctaaaaatgtacaaacaacagaggtgtgacagtatgctgaaaaaaatatgaggggggtggaagagcgggatagagagtggtcctccttccctactccctttacaatgttgatttcatccttgggttttcataatgaacttctgtaaaggggagatttgcatccagttttaagaccattttcagcacaagtgcttttttattaagtatttctgtggttccccttccccagacaaaaaggaaaggggaagctattgttcagg

SEQ ID NO: 22423 - DNA, 639 bp, Homo sapiens
cgtgaacccgggaggcggagcttgcagcgagccgagatctagccactgcactccagcctgggggacggagcgagactccgcctcaaaaaaaaaaaaaaaaagaaagaaagaaaagagaaagaaagagagagagagtgaaggaagtgagggagggaggaaagaaaakaagaaaagaaaagagaaaagaatttcttacagttctggaggctaggaagtccaaggtcaaggaacctgcctctggtgagggtcttcttgctgcatcatcccatggcagaaggcagaagggcaagagagagcgaaagagcaagagggcaagagggcctgaactctctttcacaaaggctagcaaagaagtatgcacaggttaagggaaaaagtcacaatgaatcctgtagtacagactactttatcaaaagcagctaaaaaaagatctcattaactcccccaactcatctccacccacatctaaagagccacacacagcaccaccaaaggcagcagaatgagaacagcgttctcctcgacagaccagctgtgagtatccagacagacacccgacctcaacagctccagagcagccccagaacagcccctccctaaccaccactcaagtaaccagctgggaaagtattcagaaaa

SEQ ID NO: 22424 - DNA, 1635 bp, Homo sapiens
gttcctctttataacttatttcacagtagtaagcaatgaagctgacaaacaacttcacataatacagctaagaatctgaacaacttggttatttccctgagaggccggatgcagttaccaaaccttataccacctcagcaactcccatctaaaatacagggacaaatattacacaaacagtaagcttatgctcttacagatagtaaatcatgagggtaactgaaaaggtatgcttatgaataataatattataataagcaaggaataaaataagccaaatctatactattcctatacgagaagccaatgggctacycttgaatgtgcttcacttcctctgtgaagctgagaacaaaaatgcttagatttttttttcccaatagcactgctctgagaaaggtaacaattcccaactgcagaagctcctctgtcaagatgacccttgagagtcccaaagttcttaacccacagagactgacaatgtacaaaatacagaagcagaaaaccgagtataggaaaaaaggtacattataaactacattctggcagcagtttcctcggttaagtcattgatcatcttgaagggctaaattaaaacccaacattaatctggcagtaggtgtaaaaaacatcttatttaccaaaatagaaaaaggaggaagaaaaataagacacgtaaagtgtttgagatcaaattacattgtaagggaagctgcaatatttggagaccgagacctagacagattcatcagctgagttggaaatcatttgatgtgaccttggactaattatttaacttctctgcctctgtctctcatctgtgcctgagtctcccctcaatgtgaaggagaacaaatgatttcagccccctcctatcttaacagggatgttatgagtctgagatcacagaggacactgtctttagtaggataattaaggaccaggctgctcttagaaacacccccacagcatggaggctctctctccctggcatcatttggcttcagagttgggcaaccaaatatgcccacataacatgacaaactcagggtttggggccagcatcttgacagatactgtcaggagccctagatgtgaatccattctcacatatataattactatattcaagtgtttaataaacatttagtaatgcttttaagtcaccagtatcttcacagaaatgaccatattgttgcccatctattagaagagatggtgttcaaggtatgaagtagtagaaggttcgtgatcatgaacccctgggcaagtcaagatcctcaattgccacctctataggtggaagtataggcctaacaatactaaggattaaaagtgaaatgctgctggcgcagccctgggctcacagaagcagcaaaacaagcactaaagccctcctcccgcccacggttctgctcaataaataacaagtgctgttaattctttaattgtggatccgaggaaaatgaaacagggttcacccataaacatcttatctgccttgattccccctgtaactccttgactggagcagagtaaacaggctgaactttaattaggatcataacatgaaaatgatcccaggtaagccaggctcataaactccagacaattgggaggagactggtttctaat

SEQ ID NO: 22425 - DNA, 1635 bp, Homo sapiens
gttcctctttataacttatttcacagtagtaagcaatgaagctgacaaacaacttcacataatacagctaagaatctgaacaacttggttatttccctgagaggccggatgcagttaccaaaccttataccacctcagcaactcccatctaaaatacagggacaaatattacacaaacagtaagcttatgctcttacagatagtaaatcatgagggtaactgaaaaggtatgcttatgaataataatattataataagcaaggaataaaataagccaaatctatactattcctatacgagaagccaatgggctacccttgaatgtgcttcacttcctctgtgaagctgagaacaaaaatgcytagatttttttttcccaatagcactgctctgagaaaggtaacaattcccaactgcagaagctcctctgtcaagatgacccttgagagtcccaaagttcttaacccacagagactgacaatgtacaaaatacagaagcagaaaaccgagtataggaaaaaaggtacattataaactacattctggcagcagtttcctcggttaagtcattgatcatcttgaagggctaaattaaaacccaacattaatctggcagtaggtgtaaaaaacatcttatttaccaaaatagaaaaaggaggaagaaaaataagacacgtaaagtgtttgagatcaaattacattgtaagggaagctgcaatatttggagaccgagacctagacagattcatcagctgagttggaaatcatttgatgtgaccttggactaattatttaacttctctgcctctgtctctcatctgtgcctgagtctcccctcaatgtgaaggagaacaaatgatttcagccccctcctatcttaacagggatgttatgagtctgagatcacagaggacactgtctttagtaggataattaaggaccaggctgctcttagaaacacccccacagcatggaggctctctctccctggcatcatttggcttcagagttgggcaaccaaatatgcccacataacatgacaaactcagggtttggggccagcatcttgacagatactgtcaggagccctagatgtgaatccattctcacatatataattactatattcaagtgtttaataaacatttagtaatgcttttaagtcaccagtatcttcacagaaatgaccatattgttgcccatctattagaagagatggtgttcaaggtatgaagtagtagaaggttcgtgatcatgaacccctgggcaagtcaagatcctcaattgccacctctataggtggaagtataggcctaacaatactaaggattaaaagtgaaatgctgctggcgcagccctgggctcacagaagcagcaaaacaagcactaaagccctcctcccgcccacggttctgctcaataaataacaagtgctgttaattctttaattgtggatccgaggaaaatgaaacagggttcacccataaacatcttatctgccttgattccccctgtaactccttgactggagcagagtaaacaggctgaactttaattaggatcataacatgaaaatgatcccaggtaagccaggctcataaactccagacaattgggaggagactggtttctaat

SEQ ID NO: 22426 - DNA, 578 bp, Homo sapiens
agaacaaataaaatgctgtaagaattcagaagatggagaactttcttccttctgggagaatcaggaaagtttcctggaacagggagcacctgagatgggtcttaagacatgggcatgrcttagacatgcaaagatggaaagactgaccacataacctcaagtaacaggatgccagtgactcactggagtgaatgttctgtttggctcgggtatagtggaacagaaacaagaaataaggttggaaacctgtttgaggctttccagatgtagaggggcttaaagaccaagccaaaaagtgtgcacctttgtgaatggaacagcatttcccaaatgtcaatgtgcacacaaatcacatgctatgttgtgggatcttgttatagtaggactggagtaggacctgagatactgcatttctaacagtacagatgaagctgacactgagaaactacaatttgatatcaaaaacatagatgggctgggtgtggtggctcacacctgtaattccagcactttggaaggatgaggtgggaggatcacttaaggccaggagtttgagaccaaactgggcaacatagcga

SEQ ID NO: 22427 - DNA, 578 bp, Homo sapiens
agaacaaataaaatgctgtaagaattcagaagatggagaactttcttccttctgggagaatcaggaaagtttcctggaacagggagcacctgagatgggtcttaagacatgggcatgacttagacatgcaaagatggaaagactgaccacataacctcaagtaacaggatgccagtgacycactggagtgaatgttctgtttggctcgggtatagtggaacagaaacaagaaataaggttggaaacctgtttgaggctttccagatgtagaggggcttaaagaccaagccaaaaagtgtgcacctttgtgaatggaacagcatttcccaaatgtcaatgtgcacacaaatcacatgctatgttgtgggatcttgttatagtaggactggagtaggacctgagatactgcatttctaacagtacagatgaagctgacactgagaaactacaatttgatatcaaaaacatagatgggctgggtgtggtggctcacacctgtaattccagcactttggaaggatgaggtgggaggatcacttaaggccaggagtttgagaccaaactgggcaacatagcga

SEQ ID NO: 22428 - DNA, 578 bp, Homo sapiens
agaacaaataaaatgctgtaagaattcagaagatggagaactttcttccttctgggagaatcaggaaagtttcctggaacagggagcacctgagatgggtcttaagacatgggcatgacttagacatgcaaagatggaaagactgaccacataacctcaagtaacaggatgccagtgactcactggagtgaatgttctgtttggctcgggtatagtggaacagaaacaagaaataaggttggaaacctgtttgaggctttccagatgtagaggggcttaaagaccaagccaaaaagygtgcacctttgtgaatggaacagcatttcccaaatgtcaatgtgcacacaaatcacatgctatgttgtgggatcttgttatagtaggactggagtaggacctgagatactgcatttctaacagtacagatgaagctgacactgagaaactacaatttgatatcaaaaacatagatgggctgggtgtggtggctcacacctgtaattccagcactttggaaggatgaggtgggaggatcacttaaggccaggagtttgagaccaaactgggcaacatagcga

SEQ ID NO: 22429 - DNA, 578 bp, Homo sapiens
agaacaaataaaatgctgtaagaattcagaagatggagaactttcttccttctgggagaatcaggaaagtttcctggaacagggagcacctgagatgggtcttaagacatgggcatgacttagacatgcaaagatggaaagactgaccacataacctcaagtaacaggatgccagtgactcactggagtgaatgttctgtttggctcgggtatagtggaacagaaacaagaaataaggttggaaacctgtttgaggctttccagatgtagaggggcttaaagaccaagccaaaaagtgtgcacctttgtgaatggaacagcatttcccaaatgtcaatgtgcacacaaatcacatgctatgttgtgggatcttgttatagtaggactggagtaggacctgagatactgcatttctaacagtacagatgawgctgacactgagaaactacaatttgatatcaaaaacatagatgggctgggtgtggtggctcacacctgtaattccagcactttggaaggatgaggtgggaggatcacttaaggccaggagtttgagaccaaactgggcaacatagcga

SEQ ID NO: 22430 - DNA, 588 bp, Homo sapiens
ataatgtatgtaattttccatgtttctcaccctcccatagtttcaaaacttcttttctgttcatctaaaaatgttttcaactaattttaattaatgtatcattttaaattatcagttggatcttcaggtggaaaatttgattaacattttcatgactgaagaaaaatatcaatagaacttatcacatttaggctagctgaatttttaagtgaagcatcttcttggacttgagtttgtttaatgaaacagaggtcttgtatagttttgctcttcacgtcttttctagatgaacaygggggacagaaaaggaaccagagagaccccgttatagttttaccttggagagcaggctaagatgtggggtagaaagattatagaagcaagatttttcaattggatgtctaattatttttaaggcactatgtttctcttagcctgatttacattaaatccagaatacgctgtctttcattaaaacaatttttggtaacacgaaggcagaattattaatagcttcatcattcttcttatccaatgctgaaacattcaagatagacttttaaattattggtactgaaaaaaactcat

SEQ ID NO: 22431 - DNA, 515 bp, Homo sapiens
tcagaactggaaaaacaaaatcacaccaaattgcagacttttttggaagagcgtgttagacaaggtttgtggattgtttgatttttaccaagaaagaaagctttctcctaagagggtaagatttctacttgagtgagctctaagaggagtcccagtttgcaagagatattattacagttctcatctgtgcggaccagaaagttttccaaattcatgcatttcagttatctaacagatatttactgagcatttaccatgttcagtaaccagggccctgggaatataataggagaaggcagatgagatccttgccttcaccaagcttatrtttttctattttaagtaaaatttgccatgacaaaatttctatcagcggaagagccagtaactcttattgtaataggttttacccagttttagaaaaggaaagtagctaaactcttggttccttggtgtgtgtttttgtttgttcatttctagtacttgtctatgtctttggggtaatttttgattta

SEQ ID NO: 22432 - DNA, 737 bp, Homo sapiens
aatctatcttggtgtttactttttcttttttttctttgagagggagtcttgctctgtcatcaggctggagtgcagtggtgcagtctcagctcactgcaacctctgcctcccgggttcaagcaattctcctgcctcagcctcctgagtagctgggactacaggtgcgtgccaccatgcccaggtaatttttgcatttttagtagagatgcggtttcaccatgttggccaggatctcttgaccttgtgatccacccgccttggcctcccaaagtactgggattacaggtgtgaggcactgcgcccgaccgatgtttacttttttttttttttttttttagtagagacggggtttcaccatgttagccaggatggtctcgatctcctgaccttgtgatccacccgcctcagcctcccaaagtgctgggattacaggtgtgagccaccacgcccggctgtactttttcatgagacrgcaagaatatgtgatttgggaagagatgttagctccaacatcatcatatatatatatgattttttttttgccgtagattttactatgagcagcgattactacggaaggtcttcgaagaatggaaagaggagtggtgggttttccagcacgagtggaaactctgtgttcgagctgactgtcactacaggtcaggtttcatgttacactccttcagttttactgatgcacattatcagatgattatttgttggcgtgtttatggtca

SEQ ID NO: 22433 - DNA, 564 bp, Homo sapiens
tctctttcagatgatctttttgaagttatagtcatattccagttttgaacagttttagattattcatgtagattatccttttgagttcttgctaacatcagttaggctcatactgttgggcatgtgtgtgtgtgtgggggggtttatttatttttttatttgagacggagtcttactctgttgcccaggctggagtgcagtggcgtgatcttggctcactacaatctccgcctcccgggttcaagtgattctcctgtctcagcctcccaagtagctgggattacaggtgcccaccactatgcccagctaattttgtatttttagtagagacggggtttcaccatattgatcaggctagtctcgaactcctgacttcaggtgatccacccgcctcggcctcccaaagtgctgggattataggygtgagccaccatgcctggccgtttcttttttcttttttcttttttttttttttttgagacgaagtctcattgtgttgcccaagatggagtgcagtggcacaatctcggctcactccaacctcctcccggcttcaagtgattc

SEQ ID NO: 22434 - DNA, 522 bp, Homo sapiens
tgtcaagtgctttgtttgaatcatatcttccctatctagattagcttttcagtccgtttaagcctcagggttcacatctataaaacrgaaattgaaataaatttcttgctttccatctttgttcaagtaaaagaatgcacggaaaagatatttgtaagtggcatggtgctgtaaaaatgtattattaccttcagtaattattttattcattcatttttatgactcccatgttccatataaattttaaaaaattgtatgaatgaaaacaaaaatgtaataaccataacttttccatcaatgttttgcatgctcaaatttgtgattataatataacaaacacataacaacttatgcatctaagtcaaagttggccccttgaattagttaccattgagtttatatttaaattgacatttattggcacctactaattataagacatttgctaggtattttacaaatgttatttcaactaatccttacacagttatacatgggtatcattaaccgcatttttcatgg

SEQ ID NO: 22435 - DNA, 522 bp, Homo sapiens
tgtcaagtgctttgtttgaatcatatcttccctatctagattagcttttcagtccgtttaagcctcagggttcacatctataaaacagaaattgaaataaatttcttgctttccatctttgttcaagtaaaagaatgcacggaaaagatatttgtaagtggcatggtgctgtaaaaatgtattattaccttcagtaattattttattcattcatttttatgactcccatgttccatataaattttaaaaaattgtatgaatgaaaacaaaaatgtaataaccataacttttccatcaatgttttgcatgctcaaatttgtgattataatataacaaacacataacaacttatgcatctaagtcaaagttggcccctygaattagttaccattgagtttatatttaaattgacatttattggcacctactaattataagacatttgctaggtattttacaaatgttatttcaactaatccttacacagttatacatgggtatcattaaccgcatttttcatgg

SEQ ID NO: 22436 - DNA, 623 bp, Homo sapiens
tgtgtagatcctttgctcagctagtctagtcttggaccactgatgggtggaaagtggggtagcygggagctggttctctgggaagaggccctcatatataagcttctctctggcccttacttttcctaggcagtttctgggttttacatctcctgtaagagttttgaaaccactacaggctttgaccctcacaggggcacccccctctctgatcatgaagccctgatggctactctgtttgtgaggcacagccccccacagcagaaccccagctctacccacggtgagtcacccccaccctttccttggcccttgccccgcttgaagcagcccttccactcttgactctctcctgccccactgccctgctctgttgtaggaccagcagagaggtcgccgttgatgtgtgtgctaaaggaggcctggacggagctgggtctgggcatggctcaggctcgctggtgggccaccttcgctagctatgtgattggcctggggctgcttctcctggcactgctgtgtgtcctggcggctggaggaggggccggggaagctgccatactgctctggacccccagtgtagggctggtgctgtgggcaggtgcattctacctcttccacgt

SEQ ID NO: 22437 - DNA, 623 bp, Homo sapiens
tgtgtagatcctttgctcagctagtctagtcttggaccactgatgggtggaaagtggggtagccgggagctggttctctgggaagaggccctcatatataagcttctctctggcccttacttttcctaggcagtttctgggttttacatctcctgtaagagttttgaaaccactacaggctttgaccctcacagkggcacccccctctctgatcatgaagccctgatggctactctgtttgtgaggcacagccccccacagcagaaccccagctctacccacggtgagtcacccccaccctttccttggcccttgccccgcttgaagcagcccttccactcttgactctctcctgccccactgccctgctctgttgtaggaccagcagagaggtcgccgttgatgtgtgtgctaaaggaggcctggacggagctgggtctgggcatggctcaggctcgctggtgggccaccttcgctagctatgtgattggcctggggctgcttctcctggcactgctgtgtgtcctggcggctggaggaggggccggggaagctgccatactgctctggacccccagtgtagggctggtgctgtgggcaggtgcattctacctcttccacgt

SEQ ID NO: 22438 - DNA, 339 bp, Homo sapiens
ttgaaattgtacaattttaaaaagaaattcatttttattataaagaaattaaattatatagtattgtataagattaaaaagtagaagtctttcatcacactcctatctctatttctaccctcctacctggaattaattttggttaacaatttggttaggatccttacaaatgttttactatatatatatttaattacatcatattttaaacataaatgggattattttattttctacaactttaaaaaaattagcaatatatttaaatttctttccatatcagaacatrcatctcaattttttttcaatgaattaaaaaaaatttcagcttttatttta

SEQ ID NO: 22439 - DNA, 607 bp, Homo sapiens
gggaagcggaggcaggagaatcacttgaacccaggaggtggaggttgcagtgagctgagaatcgcaccattgcacttcagcctgggcgacaagaacaaaactccctctcaaaaaaaagaaaaagaaatatttcaatggatattttttaaagcaaagaaccttttgtaaaagtaatcttgactgttgaatgcatcttttttcatgactgctattgtgatatattgtgtttccttaaaggggatgtacatcaattcagctgggataacgacagcacaattccacatctttctaagagctgagcaactattgcattatggcaattgtgctttgccttgaagtggcagrgggcagatgcaatagctgactctactgagtcttcagtgtgcagacagtttggttcacttgttaaatatgtattgtgatttgatgtttactctacttggcatctcagccaaatttcaccttaggaacttacatatacttcatcaagacaacattacaaatacttcaaaatgattcatttcctcttcacacaaatctaagttagtccttgcatagaggctatttacatgtgaaatttctttttcagcctactaacaaaatcaga

SEQ ID NO: 22440 - DNA, 563 bp, Homo sapiens
atgtgggatctgaatcattgctatgatttctgtctttcagatggtgtaaggatcactagatttcccttgagagtaaaagatcgaaagcattcacagcaccttctttgcttgggggaaaaataaaagcaactagtaattttcaccattaattcagtaagattctaagaagtgtaaacttgcttttctcacygttgttgaaaacagcccactcaggtttcttaatcacatcagtgaatacggttattttggcactttgggaacactagtagctggacctggtctgtccagagatgacatttaattggatggtttaagttgtaggaccccaaaagatgggcttcacaatggcaaaccattaaatggtcatcctttgaaccatatatacactacctcttggttcatcatcctgacttccgtcattcctatgggactaaggataatactttgtgttcgggcagaatcattccctgtgtaccaccagcgcggtgtgcatctcttgggccaccaccaacagttacacaagctttgtactttgtaactcccaggagtacaactcacatcca

SEQ ID NO: 22441 - DNA, 889 bp, Homo sapiens
agtgctcaaggcagatccttctccacaagtcaaaacttgttttcctgaactgatccagaagaagccagcatctattgggctaattctgccctgccctgctttcatatgggatccaggtgccttctctttcaagtgaaccccacggagacaccagagtcagaaatcaagacaggagtttccaccccttgccagacgccagtgtaatacttcgcgtgtgttttcccaatctgtcttcctccaccccgtagggagccaaaacgttagaccaaaagtgaagtgttaacataccttgtattctgtaagatgttgtagttataccgtgttaagcagcccttccatctcacagtcgttggcttctcccatcctttttaactgttccctggcttcgagaaagatcaaattagcgcagtattatcctttatcaataatcagctttttwaaatgacattcttttttaaattctagaacacagcatacccagccccaaacataccaaatttaacaggctttctctttgcctacaacaatatacaaatatatattcacctctctatgggtttgggttttattttaatggcattatgttgtagagttagcagcttccttttttcacgtagctgtctaccatgcacgtggctgtaggtcgatcacacagggccaagacatgtttctccaatatctctcgttctcgtaaatcgtagttcattcagctgtcacttatcaccagacatttcagttgttttcagtttttccctctgataaacattgctgcaataaacattttgtgaccctactgttagtagtggtgcatttatttttgtgggttagtttcaaagatgggctaaaggttgtgcccatttattaaatactacctaatgacctacccaaa

SEQ ID NO: 22442 - DNA, 535 bp, Homo sapiens
gtatttcctgagggaacagttccaactaaacatcccactttgtgcgtaactttacattcaatccatcatcacctcaagaacaaaatgttctttctccgcctcaaacatggaggacagaaaaacagaagttctctcaaacccaccaagcacgctgttttcctgagacggaaaagaaggataacagccgctacggcgcacagcctgtaggggaggacggcaaccaggaaaggccaaacttagccgcagtagtgccggggcgygctcgcggcccacggcgtcccacgtcgtcccacgtcagccttgtcccggcagagcttcacgagaggaaaggcgggattcagggtgggcgcgtgccctacgaagacgaaacgaactttgaagacaactagaggagctcgccccctgcctgtgacagcttagggtcgcctactttttgtggacacactgccgtccacggagtgcagaggccgcctgcagttttcttgcgtccctgtgagacgcacggtggcgcaattcccgagcgtgccaatcccgg

SEQ ID NO: 22443 - DNA, 539 bp, Homo sapiens
aatttccaagaaaaaaaggaagtcatatacaaattgactttctttaaggacactgacattttctacaacgttgagagtttaaagaaaagtaagcaagtctttccaaattctgagagaaaataaatctattcttgaattctgatctggggtaaattgttaagtgaaagagctatattttttaaatctttcataccccctctttcaggaaataaaggatatgaaaatgtggcaatgaatcaagaaaaggagaaacaaataattcaattcaataagagaatgtggtaaagagaagttagacataaayggtgtgggaaagttccatgctaactgctataaagcatgtttaggctataacaaggctgaatgaagtagaagcacagagagctttagtagagatatctccaagaaatttttttttcaaaaggaagaaagataaattatctaatgtattttattttaatgagaagaattttatatttctgtcaaaaaatttggacctaaatttagataattactttaaaaagcaagcaaatgaaaca

SEQ ID NO: 22444 - DNA, 544 bp, Homo sapiens
cattttcaagtatctgtagctgggccaaatgaaaactggactaaactgtacattcagttactttactctctatttagttctaccagacagctcaaatgtcaacagatcagtatgtggtactgacaagacagcataaggttctagaaagggctcaggctttggggactagtgttctggccttggcatactgtccaacctgtgcaacacctcagatgattgttaggaggaagaacctaggtgtaccaaggaaagcgcccagcatgtggcctatcatctagcaggtttcaacaaatggaccgtctctttctacctggcatattgagcaaattgtccttactttagaagccacaatatgactccctttttgtcattctccccccaaaaccttattttccaaataaatttaagacatagtaacaagatacctattgctatggtttgaatgtcccctccacaactcrtgttgaaatgtaattgccattgtgacaatattaaaaagggaactgttaagatgtaattagcctgtgagagctctgtcctcatg

SEQ ID NO: 22445 - DNA, 565 bp, Homo sapiens
tgctactataaagacacatgcacacgtatgtttattgtggcactattcacaatagcaaagacttggaaccaacccaaatgtccaacaatgatagactggattaagaaaatgtggcacatatacaccatggaatactatgctgccataaaaaatgatgagttcatgtcgtttgtagagacatggatgaagctggaaaccatcattctcagtaaactatcgcaaggacaaaaaaccaaacaccgcatgttctcactcataggtgggaattgaacaatgagaacacatggacacaggaaggggaacatcacacactggggcctgttgtgtagtggaggaagtggggagggatagcattaggagatatacctaatgtaaatgacaagttaatgggtgcagcacaccaacatggcacatstatacatatgtaactaacctgcacgttgtgcacatgtaccctaaaacttaaagtataataaaaaaaagaaaaaaaaaacactcactggcatttaagagtctcctaaaggaatggccagattcctgcctgtttacctatggtaatgagcac

SEQ ID NO: 22446 - DNA, 657 bp, Homo sapiens
tctcaaaataaaataaaagtaaaaagaattcatctgtatttttaatttaattaacaataaaaagggttggtttgtatcttttttatggagtcttatttttcaccttaaattttaactactttcatcaccttgtcgatatgtcttctcatttaattccattttgataactttttaaaataaatgtggaaatttattttaaaatctataaaaaatatatctttttttttggtaaattcaccacctaagtctttaagcatagttttgatcataacactaccctgaaagaaatccttgaacagctccctgtttccagtaaatcagacaggctcacttctagctctggagcaacaaagggaggcctacatagcccacctgaacatttaaaaactagaaactgaatgaagcactacaggtatgcctttcatgagggcctagaatgccaggttcaaattcagaattctcagacgcctcagagttccatcatggaatatgaaaacccgggggagagctgtttctgacccacaayccacccccttctctttctatcccctgcccattctcacatttggagggtttttgtacacacaagagtggaagttcagacctgtccacacctcccctgagcagccatactcaaatagtcacgcctgggctacc

SEQ ID NO: 22447 - DNA, 563 bp, Homo sapiens
tttcagaacggaaacctgtttttagatatgaaaataatgtatgcccactgtaaaataaaawcagataatttaaaaagtcgtaatgaagaaaataaaaattactaggaatctcattaattggaaacagcctctagcataattttaggttatgtctttcctgaattattttatgatagaaaaagttttacataggtaatatattcacctggctcaaaagccagaatacacaaggtacccagtaaagcccgtttgcatccctgtgccccttggccctgcccctcccaccccacagatgacatccttcactagttcttagtgacaaggatctccctctctctctctctcaatagatgtattatatttatcctgtgttttatactcaaaagatatatcatatatatttttctacatcctgctgtttgcaacaatacatattagagatttttccacatcaacacttaagagttccctgtttaaaaaaatagctgggctgggcacaggtccctgctctctgggaagccaaggcaggaatatcatttgaggcaggaatttgagcaacatag

SEQ ID NO: 22448 - DNA, 1989 bp, Homo sapiens
ggcaggtagtccagggtgccacagagagtggtcctcctgaaaacggagggaggctcaggttgatgtgcttctcgttttatgatcacaacagctgctaacaatcattaaagagtccactaacactgaggtcttcccctgggccagatcctgtgccctaggaagtagctactattataaattcccataggaaacagatgaagcgaggtgtgtaaggtcacacagctagccatcaggcttaaccccaaatctgtccaactccagaacctccctgaataatctagaatgtaagaaactgaatgtatcactaccatataaaagctgccatgcaaagttctctgtaaatacgatttggattctacatctgcatgtggatattacagatatgctaagaatcttaaaagcctggtcgcaatgacaatacactagaaactgtcccactgtaacagcactggggtggagatgtagacacatgctgccttgtgatagatacttggtacgagtgatgctgaaattttgagggtggcctatgaagtactcttgccaaaaatatttaacctggctgggtgcagtggctcatgcctgtaatgccagcactttgggaggccgagggaggcggatcacgaggtcaggagatcgagaccatcctggctaacatggtgaaacgccgtatctactaaaaatacaaaaaattagccgggtgtggtggtgtgcgcctgtagtcctagctactcaggaggctgaggcagaagaatggcgtgaacccgggaggcgagcttgtagtgagccaagatcgcaccactgcactccagcctgggtgacagagcgagactctgtctcaaaaaaaaaaaaaaattttcttaacctgaatctcttcaggacctgagacctacattccagttttcagcaaatacggggaataaaggtccaagttaagtggcaacacaatcagaaaagtcctctttaaagtgggagactggtctggctttagaccacagagacaatccaaccacagagacagtccaaccacagagacagtccaaccacagagacaatccaaccacatagacagtccaatacaaagcatgggctttggttgagttctgattttacaaaccagctataagatgtcatggacaataggagaaatctgaatgtggactaaatattagatactgacaatgctgttaattttcttaggagtgatcatggttctagttatataggagaatatccttatttaggaaatgcattctattatagtgcttaaggttgaagcatcatgatgtttgcaacgtattttcaagtgttcactaaaaaagcagatgcagcccttctgactaaatgggaaaaactgctgaacgtaggcactgtatagacaggtatgccatcaactaccaattccgcatttttatcggtttaggtttttttaacgaaggttggaaaaaagctgggaacagcagacascaagccagaacagtctgtgtgggttcgtgttgctttgttatcagctgctcttcaccatggaggcttacgtggtcacagccctggtgctgtgttcagccaggcctggcacccactgagcacacaaacagtcactcaccactgaattgtgacgtaggattaagaagctaccactctggtcatctaacccctccatcagcaccgacggactgaatcgggggttctcaaactgaggcaataaccaggaaatgatgatgattaacatctgggatttggagtgaagtgactatcggttatgtaagtaatcttttcaaaaagcaagaagccatcttttctatcacaattcaaccggttaagatacagtttaactctgcgattccatgaagcctgtaagtctttattctggtttgtctcaccagataacagctcccactaatgacaaccagtttaaaaaaaaaaaaaaaaaaaaagactgcaatagcagattcagtgcattgctggaacaattagaagtgctctgtaacaaaa

SEQ ID NO: 22449 - DNA, 547 bp, Homo sapiens
gaattatcatgaactgaattgatctgtcttttaaaaagttatccttgtaaattgggtctatcttttaagtattaaccttatttccctcaattcaacttatttccaaataaytattaggcctgcccattaggtgataagtttttttaaaaataatttgtcactgtagaaatattcaaacatatacaaaaatagagagtatagcctgtgaactcctacatccctagcacccagctttgtcactcctccatattatgttgaagtaaatctcagatatctttctactataaatatttcaccatattcttttaacagctaaggaaacttaaaaaataaccatcatacaatttattacttaaatttattaatacatttttaatatcagatggtaagttacaggatggagctgtgacacccttgtcatgaacaagcctacagttgtagacttatgctcacaaagggtgctcagctccctattaatgaattgattgatgaatcaattaaatgatgttgtgattattggctatcactgacacttgcagaaggtagc

SEQ ID NO: 22450 - DNA, 547 bp, Homo sapiens
gaattatcatgaactgaattgatctgtcttttaaaaagttatccttgtaaattgggtctatcttttaagtattaaccttatttccctcaattcaacttatttccaaataattattaggcctgcccattaggtgataagtttttttaaaaataatttgtcactgtagaaatattcaaacatatacaaaaatagagagtatagcctgtgaactcctacatccctagcacccagctttgtcactcctccatattatgttgaagtaaatctcagatatctttctactataaatatttcacsatattcttttaacagctaaggaaacttaaaaaataaccatcatacaatttattacttaaatttattaatacatttttaatatcagatggtaagttacaggatggagctgtgacacccttgtcatgaacaagcctacagttgtagacttatgctcacaaagggtgctcagctccctattaatgaattgattgatgaatcaattaaatgatgttgtgattattggctatcactgacacttgcagaaggtagc

SEQ ID NO: 22451 - DNA, 522 bp, Homo sapiens
tacactttttaaaactgttcctgttttgttgtgtgtacttatgctcaggttttgagtttacccctaaatctcaaaagaagtatattgaaaagtatgaaattgccatttattataatgatgaaatcaacttccttaagaatttcacatatgtcaatgcatagaaattatttcaaataaagtatgtttctgtgaacataaaacatttacttgttatgacactgtaatcagggcgtcacagattctaggatatgaaatgctaagcaccccatctctaccaaaataaaaaaaatttagccyggcgtggtggaacacactgtagtctcagcttctcaggaagcaggggtaggaggacaacttgagcctgggaggctgcagtgagctgtggttgtgtcactgcactccagtctgggtgacagagggagactatgtctcaacaaacaaacaaacaaacaaacaataaataaatagaaagaaatactaagtagacatttgattatctcatgcccaggttgtatctggaga

SEQ ID NO: 22452 - DNA, 522 bp, Homo sapiens
tacactttttaaaactgttcctgttttgttgtgtgtacttatgctcaggttttgagtttacccctaaatctcaaaagaagtatattgaaaagtatgaaattgccatttattataatgatgaaatcaacttccttaagaatttcacatatgtcaatgcatagaaattatttcaaataaagtatgtttctgtgaacataaaacatttacttgttatgacactgtaatcagggcgtcacagattctaggatatgaaatgctaagcaccccatctctaccaaaataaaaaaaatttagcccggcgtggtggaacacactgtagtctcagcttctcaggaagcaggggtrggaggacaacttgagcctgggaggctgcagtgagctgtggttgtgtcactgcactccagtctgggtgacagagggagactatgtctcaacaaacaaacaaacaaacaaacaataaataaatagaaagaaatactaagtagacatttgattatctcatgcccaggttgtatctggaga

SEQ ID NO: 22453 - DNA, 522 bp, Homo sapiens
tacactttttaaaactgttcctgttttgttgtgtgtacttatgctcaggttttgagtttacccctaaatctcaaaagaagtatattgaaaagtatgaaattgccatttattataatgatgaaatcaacttccttaagaatttcacatatgtcaatgcatagaaattatttcaaataaagtatgtttctgtgaacataaaacatttacttgttatgacactgtaatcagggcgtcacagattctaggatatgaaatgctaagcaccccatctctaccaaaataaaaaaaatttagcccggcgtggtggaacacactgtagtctcagcttctcaggaagcaggggtaggaggacaacttgagcctgggaggctgcagtgagctgtggttgtgtcactgcactccagtctgggtgacagagggagactatgtctcaacaaacaaacaaacaaacraacaataaataaatagaaagaaatactaagtagacatttgattatctcatgcccaggttgtatctggaga

SEQ ID NO: 22454 - DNA, 659 bp, Homo sapiens
cactctgttgcccaggctggaatgcagtggcgcgatcttggctcactgcaacctcctcctcctgggttcaagtgatgtggtggctcaagcctgtaagttgtacatttttgttgacatttcctcctccaagaaccaactatatggctgacctggcccagcctgcccctgctgtgtctggagggagagttggggacacatttcagaggagccaaagcccccatccacttacccccacaccttttctaataacatgtcacaaatgccccctggagaactcacccttctgtcctcagcagcctccatcaggttaaaacttcacaaactccaggaagcttccctgttggtcccctaagccttggaagcctgggttaggtacctctctttggtgtttccttagcacactgagttcacttttaatggttttatttaacaaacacttgcactgcataacacttgctaagcacttttagaaatgtttcctcgttgaggggggcggttccaagatggccgaataggaacagctcgggtctacagctcccagcgtgagcgacgcagaagacgggtgatttctgcatttccagctgagcttggaagagagtagtggttytcccagcacggagcctgagatctgagaacagacagactgccacctcaagtgg

SEQ ID NO: 22455 - DNA, 614 bp, Homo sapiens
gatagagccttgctttgtggtgatctgggttcactgcaacctctgcctcctggattcaagcgattctcctgcctcagcctcccgagtatctgggattacaggcacctgccactgcacctggctaatttttgtatttttagtagagatggagttttgccatgttggccaggttggtctcaaactcctgacctcaagtaatctgcccacctcggcctcccaaagtgccgtgattacaggtgtgagccaccgcgcctggccatgaaacctcttaacaatgggaaaacatacccaactctaaatctaacctcgtgttctccwggagcgcaaaatcaggttgcagagaatcaaagtatacatacagcacagttaaggcacgatttgcggcactgaagggaatggttattgaagcgtcaggagacttgaatgagacatgagtcctctgagaagaagcaggtgtctggaggctgaagctgggtggggaggaagagaggatggtgggaaggaagtcgtgggggcagtttgggaattgggaatgaactggaaggagaggtccgagatggggaggaagcttttttctgttgttgtcagtcctttgtgcttttgcagggtccctg

SEQ ID NO: 22456 - DNA, 576 bp, Homo sapiens
attagaagaatgcctggaataacatattgctatacaaatgtgtattattaatagatacaatgaacccttatatttgaataaggatattatattgttcacatttaatatttcttatgtgttctgaaatacctacaattgaaaaagactttcttaatagggcgtttaaaaattatgcatctttatcgtaagctggagaatgttttaattttgccatgtgagccaagaaattcaccctggataaggtgaackctaaccaatatgagtttagaaggcataagaaaacctgctaactttttttttgtttccaacttttattttacgttcaagaggtacatttgtaggtttgttacatgagtaaattgtgtcacaggggcttggagtacagattatttcatcacctaggtaataagcatagtacctgacaggtagtttcttttatccttaccatcctcccagcctccactctcaagtaggctccaatctctatgctcttctttgtgtccgagtgtactcaaagtttagccctactatttataagtgagaacatgcagtatttggttttctgttcttgcattg

SEQ ID NO: 22457 - DNA, 1021 bp, Homo sapiens
ctataaataaagttcattagctatttttatcagtttttagatttttagatttatcagtttttagtttttagattttttagatttgtcagtctgcaaacaaaagcatatgtgcatgttcattttggaattgccaaaattctttaaccaaaggagttatgatacaaattagatgcattgatcacgtagctactgtagacaaacgtagacgtaagatacaacaattgagaagataacaaactgtacttaagggaaatcctatccattttcataaaaaatgttggtcattaaagaagtgctcagtgtctgaattttgaaacatactgaaaattagcttcaattgaactgaacccacataaagagaagttgaaacatcaaggcactggattgaaaatgtgatgaaagtgaaacaaccactccaatgtttatcaatttcttgttatatgagatatacttaatatatgactttaaaatattattatttctttttwaaaaattaatcaacccaaagaatggaaacactatggctaatttgctgcaatgaagtagcaaaaataaaacacaaatttcaaaaaaaatgctcaaaggctattgaagcagctcatgcaaaaaaaaaggggcggggaagttttagataaataattttttctgctaattataaattacaaattttataattagtcattatgttagttctcaagaggatttttaaatatcacaaagaaaatataacaggctcttgaattatgttcgaagcaattagaatgagtactaaaaaagcctgttaacaggacctattaacatattggttggaaacaatgattgaggaataaaaattatagttttcattcctaggtggctgatgaatcagttacttttcaaaggtcgaaagtacaggagcaaagtatgtttttcagggacaataatgaaaaattaaggatttgtggagtatgatgtgttagaagcactgggcaaaattgtccttagacaacgaaatatctggttcctagagctcaaaaaaatt

SEQ ID NO: 22458 - DNA, 546 bp, Homo sapiens
taaatataagacaggagtccttaaccttagtacaagaatcgttcaggagagagctgtggattacatgaaaatgaatcatcaagcgtattgattttctattgctattgtaataaattgttacaaacttagcagtttataacagcacaaatttattacttcatagtttcgagtggtcagaaatctgacacacrtctcatcaggctaaaatataggtgtcaacaggattgcattgcttattggaggttctcgcaaagaagccacttccaggtttattcaggatattggtcaaattcattttcttacagctgtaggaatgaggacaccattttcttcctagctgtcagttaggggctgtcattagctcctaaagaccttctctagtcctttcacatggctctccacttacaaccagcaaggcacatcaaagccttcttactataggaatttctctcaattcctccttcttttggatctcttttcccttattcctctgccccaactcgctaactgactcttctgctttccttttctgcttttaaaggctca

SEQ ID NO: 22459 - DNA, 546 bp, Homo sapiens
taaatataagacaggagtccttaaccttagtacaagaatcgttcaggagagagctgtggattacatgaaaatgaatcatcaagcgtattgattttctattgctattgtaataaattgttacaaacttagcagtttataacagcacaaatttattacttcatagtttcgagtggtcagaaatctgacacacatctcatcaggctaaaatataggtgtcaacaggattgcattgcttattggmggttctcgcaaagaagccacttccaggtttattcaggatattggtcaaattcattttcttacagctgtaggaatgaggacaccattttcttcctagctgtcagttaggggctgtcattagctcctaaagaccttctctagtcctttcacatggctctccacttacaaccagcaaggcacatcaaagccttcttactataggaatttctctcaattcctccttcttttggatctcttttcccttattcctctgccccaactcgctaactgactcttctgctttccttttctgcttttaaaggctca

SEQ ID NO: 22460 - DNA, 554 bp, Homo sapiens
tgatcacccttttcattaagtggtgattttcactatggcagggtttatgtctgtttttactcattttattgctagaacctagtgcagcatttkgtcaatgtggacactcaatattattcagcagaagaaagaatcttttatgattttcaatgttgaaatctcaaattgaaggagtagtatcatttaaaattatgaaggcaatcacttgaaaaactgaaaatactgtaaatcagaatgaaaacagaagaagactctagtaagggaactaaattcctcctttgtagaatggagtgtgcataagctatctaaagcccagtacttatagtgacaaacactagaactaaaattagaaatatttaaatgtaattgtctctgggaaatgagactgaggctgaggaatggagattgggaaggtgaatttctaagttttacccttatttttaatttattttattacatttattataacatatatcagaaagatgaaactcaaggtcacaatacatgcccagttttagaaaactttggaagactggaagacctaatttgtatat

SEQ ID NO: 22461 - DNA, 554 bp, Homo sapiens
tgatcacccttttcattaagtggtgattttcactatggcagggtttatgtctgtttttactcattttattgctagaacctagtgcagcattttgtcaatgtggacactcaatattattcagcagaagaaagaatcttttatgattttcaatgttgaaatctcaaattgaaggagtagtatcatttaaaattatgaaggcaatcacttgaaaaactgaaaatactgtaaatcagaatgaaaacagaagaagactctagtaagggaactaaattcctcctttgtagaatggagtgtgcataagctatctaaagcccagtacttatagtgacaaacactagaactaaaattagaaatatttaaatgtaattgtctctgggaaatgagactgaggctgaggaatggagattgggaaggtgaatttctaagttttacccttatttttaatttattttattacatttattataacatatatcagaaagatgaaactcaaggtcacratacatgcccagttttagaaaactttggaagactggaagacctaatttgtatat

SEQ ID NO: 22462 - DNA, 541 bp, Homo sapiens
ttttacttgaaagaattcaaccgaggacccaccataactgcctgcctgacctgtttcttcctttctcctctctcagaggtgagcagattacttgagtccaggagttcaagaccaccctgggcaacatggtgaaatccagtctatacaaaaaatacaaaaattaaccagacatgctggcacatgcctgtagtcccagctgcttgggaggctgaagcaggatgatcatttgtgcccaagatgcggaggttgcagtgagtcaagatcacaccattgcactccagccaaaaaaaaaaaaaaagcaaaaaaacaaagaactgtaacattattcaattcccaggtctactgccatttgccaggtatcctctggttcatgtaccrgtcagatggggctgtgaaataggctttgagctggacagataatatgcacctttgccagttcctcaacagttgcacttatttcagcatgattcccaagcagtttgtattgtttaatgttgacagcttgactaggggcagggaatagtatgggttcccgttttgc

SEQ ID NO: 22463 - DNA, 578 bp, Homo sapiens
tttttttaatgctatatttggacaaacaagatcctctttggctttgtatttccactgctcacttcctaaactgcctgtaatagtcgtgtgttataaacattagttgggattgggcacggtggttcatgcctataatcccaacactttgggaggccaaagtgggtggatcacttgaggccaggactttgagaccagcctggccaaaatggtgaaaccccatctctactaaaaatacaaaaatgaggtgggcctggtggcacatgcctgtaatctcagctacttgggaggctgaggcagaagaatcgcttgaatccrggatgcggaggttgcagtgagctgagatcgcacctctgcactgcagcctgggggacagagggagactctgtctcaaaaaaacaagtaaacaaaaattagttggatttctgggtagaagattactgttattttgcttagtaagcactttgttaagtatttaacttgacatttgttaatatgattgtgttcaaaatatcaaattaagaaacctttaacattattggacagttagaataattttactatttaaggtaataatgcaa

SEQ ID NO: 22464 - DNA, 734 bp, Homo sapiens
tccctcaatatgtgacatgggctccattctaatctgactccatggtgactttgcaattttaaggaactaagctcaaggcgagccccacagagccaggacttgctcccttaaaaagccccagcagatctggattgcctctgaggcgagagacgccccaggccattgctacagcactgctagtgccatggctttctgaattaacaggtggacactgtttagtcctctttaagaaacaggattgactctttcccctaaatgatgtcatgaagcatctttgatgaacaggatttgtttctcacagttctgggggctgagaagttccagaccaaggcaccagcagtttagtgcctggtgagagcctgcttccrcattcatagacagcaccttctcactgtggcctcatatggcaggaaaagcatgagagagctctctgggatctctcaggtcactcatctcatcacaggttgccactgtcatgatctcatttaaacctaattacttctcaaagatcccatctgcaaataccatcacaccacgagttaggtttcaacatatggattctggggggacaaacagtccatggcactgtcctgtagcccctaagtcagcaccctctgccctgggcgtttctcctctaaggtccacatcacctggcacactttatcaccatgagcctaccctgtgtttcctgaggatctgccacctccttggatcatcattgcccctccttgtca

SEQ ID NO: 22465 - DNA, 540 bp, Homo sapiens
aatactaaccatttaatacaaactagtgacacacaaaaaaatgaaaattgctcatttggatagatgtatgctggcttagcagaaggaaatgacggtttctttgaattcaggtttagattattttccctcatagagaatggaaaatgtatcacaaaaaaatataaaaatctgaataaggtgaatgacttcactgcttaccttaaatgcaggtggtgacttacaaagctggcttatttaggagatccagctaacacctgaaaggctatactatacatttctgtacaagattgctgtaattaatatttatcatagaaactaggagttgagactcttcacttatatgtcatcgaaattatactagtcatggtaaaaatcattattagacatctttctttcctaacagttctttgacaaatatgtctcctagattstaaaagagactgacaaaaaatcagagaacctttagcccagcaaatgacataaatgacttaccttcccaccagataatacttgtcaagaaatataccaaaattaggctga

SEQ ID NO: 22466 - DNA, 608 bp, Homo sapiens
caaaaaattagctgggcgtggtggcggcagcctatactcccaactactcaggaggctgaggcaggagaatggcatgaacctgggaggtggggcttgcagtgagccgagattgtgccattggcactccagcctgagtgacagagcgagactccgcctcaaaaaaaaaaagaaaaaacattaggtcacaccctatttcagtacaagaaccaggccctctctttctttatgtcctggtgctagtctttgtgcgtacagggtatttagtatactgcagctcatggggctactcctacaaggtcaccatgagtggctggggagggtcatcaagaggaggaaaatgggaatgacagtttccatttatcgtaccatcctggtaggctaggaccatcaaaaatattgtttccaattgtcattgrgcaaaaagtacaaaatcagggccatggagattacataatgtgtctatattcacactcagagactgatctaggacacagaataagcccatgtgatgtagctagagaaagtgtgcacagtgctgggcagtgaggggaaaagtgagaagaacaagagcttcaagtacaaagacatttacacgaggatccaaagca

SEQ ID NO: 22467 - DNA, 562 bp, Homo sapiens
agtaacctttactcctgtcattgaggatattggaaaagttcttgtttgccgagctaaattacacattgatgaaatggattctgtgcccacagtaaggcaggctgtaaaagaattgcaagtctacagtaagtacttgtgcgatgtgttccagtctttgtgggaatcccaccttggttgtgtatagcaataaacttagcagaaaagtaaaaaaaaaaaaaacttgtatatagtttgtattccatttgtattcattcasaacataatgtttgtcaatagtataattcagtgaaaagaacactggatttggactgagaaggcttgagcttaatttctggctctattaactgtgtgagtttgggttacttaatttctctatttcccagtgtataaaaggggaatagtaataccacctgattgggtagtgggaaataggctcaaatgataaaacattttaatattgttttgtaaactcttatagtatgccttgaactattagttgcacaggtacagaaacttgacaaggtgatcacttattctgtgtgtgtatgtgtgtgtgtgtatg

SEQ ID NO: 22468 - DNA, 643 bp, Homo sapiens
tttgtgtgagaccctatgcatatttgagcactggagccctgaagcctttaaggacctgtcttagtcattgccattcactatctgagaatcttagcacctctttcccctaggcgtttttatttataagccaacatagacaaagatagcaacaaagaaacccaaacagaaaaacaggtagaactaagaatacatagattacttttaagaagcattaatggggagtgaatttaaaaaaagaaatgggaatttcacatgtgcctctaagaartaaaattgctatgtacatgttcatgtgtatttatatatatagctccataacccctcatccaaaacctttgggtctaaatgtatttcagaatttgaaattctttttttgcattttggaaggttaataggatttatataccatgtgttatatgtccccattaaagccagcagcagcaccttataagtcaaacaagcatatgaaaatttgtttggcaaaaacacatatactccatgacccagccttttcactcctaggtttatattcttccaacagaaataagcacacacgcacatgtaaaacagatgtgcacattatagaagctttatttgtaatagccctgaattagaaacaacgcaagtgaacatcaacattagg

SEQ ID NO: 22469 - DNA, 534 bp, Homo sapiens
ggtgccttctcggctcttgagacttagccgctgtctcgccgtgycccgggtcgaccggcgggccttctccaccgagcggcgtgtaagagtgcccgtcgggacgagccggacccgccgcgtccccgtctcggtcggcacctccggggtcgaccagctgccgcccgcgagctccggacttagccggcgtctgcacgtgtcccgggtcgaccagcaggcggccgccggacgctgcggcgcaccgacgcgagggcgctgattcccgttcacgcgcccgcgacctccaccggcctcggcccgccgtggagctgggaccacgcggaactccctctcctacatttttttcagccccactgcgagtttgcgtccgcgggacttttaagagggagtcactgctgccgtcagccagtactgcttcctccttttttgcttttaggttttgtcttgccttttttttttttttttttttttctttctttctttctttctttctttctttctttctttctttctttctcgctctcgctctcgctctct

SEQ ID NO: 22470 - DNA, 534 bp, Homo sapiens
ggtgccttctcggctcttgagacttagccgctgtctcgccgtgtcccgggtcgaccggcgggccttctccaccgagcggcgtgtaagagtgcccgtcgggacgagccggacccgccgcgtccccgtctcggtcggcacctccggggtcgaccagctgccgcccgcgagctccggacttagccggcgtctgcacgtgtcccgggtcgaccagcaggcggccgccggacgctgcggcgcaccgacgcgagggcgctgattcccgttcacgcgcccgcgacctccaccggcctcggcccgccgtggagctgggaccacgcggaactccctctcctacatttttttcagccccacygcgagtttgcgtccgcgggacttttaagagggagtcactgctgccgtcagccagtactgcttcctccttttttgcttttaggttttgtcttgccttttttttttttttttttttttctttctttctttctttctttctttctttctttctttctttctttctcgctctcgctctcgctctct

SEQ ID NO: 22471 - DNA, 534 bp, Homo sapiens
ggtgccttctcggctcttgagacttagccgctgtctcgccgtgtcccgggtcgaccggcgggccttctccaccgagcggcgtgtaagagtgcccgtcgggacgagccggacccgccgcgtccccgtctcggtcggcacctccggggtcgaccagctgccgcccgcgagctccggacttagccggcgtctgcacgtgtcccgggtcgaccagcaggcggccgccggacgctgcggcgcaccgacgcgagggcgctgattcccgttcacgcgcccgcgacctccaccggcctcggcccgccgtggagctgggaccacgcggaactccctctcctacatttttttcagccccactgcgagtttgcgtccgcgggacttttaagagggagtcactgctgccgtcagccagtamtgcttcctccttttttgcttttaggttttgtcttgccttttttttttttttttttttttctttctttctttctttctttctttctttctttctttctttctttctcgctctcgctctcgctctct

SEQ ID NO: 22472 - DNA, 789 bp, Homo sapiens
tacatacatacgtacatacatagatayacacacacacacacacacacacacacacacacacacacacacacatacctacctacggaaaacatgagaaacaacataaaagtcagccggtgtggtggtgcgcgcctgtagtctcaggtaatggggatgggagggatcagaggcagaacgaccgtttggtcggtccaaagcgttgaggttggggtgatcctgggcggcagagacagaggaagaccctgccagtaagggagggaaggaaggaaggaaggaaggaaggaaggaaggaaggaaggaaggaaggaaataaacaggcaagcaggcaagcaaacgatgaacgtgacaatgacacagaagaacccatgagaataaacgagcaaataacagggtatgaatgaagctaaaaggcaattgagatcgcaatcaatcgttttctctgcaccccaccccaccccaccccaccccaccccaccccaccccaccccaccccaccgcagcccacgtaagctggagtggaagtgtgcgatcacagcccacgttaacctctccctcccgggcttaagagatccctgtagtcccagctatttgggaggctgaggtcaccagagcgcagagacagaagaccaggcgggccggccccaaaagaaaagaaaataaataaacgaaaattattaataaataatgaatgaaggaagggaggaaggatatacatacacgtgtatgtaaatgaaatggggcttcgatacatattcatccattaaaagtaacataatataaacgtattaa

SEQ ID NO: 22473 - DNA, 583 bp, Homo sapiens
cagttatgtaactatttaagaaaaattactgatctattatttattaggcatgatgttgaccaagccctcagggaacttaagactagtagaggaaagggaaggttaataagaatactttaatccaatgttgtaagcactatggtgtgacacagtggatgcctagattattatgggaacccagagaccctacataactcagctggaaggtgggtgggcttggaaggaatcagagaaactccctaagagataatgctaatattagctcattcagaaaggttgtacaagagttagtcacaaggagagagaagggaaggatgttcacaatgagaataggatgacctaaaccttggaagtataaaatagtgagggatgtgtttgaattgtgtgcgtatgggtgtatcatgtggacatagactagcttggtgtatcagaagtataatataaatgtgggtaagtgtccttttaagggttagttgggtgtttatgtgctagctggagaacctaaccacacaagatagccttatttgtctgggaagtacattttaatatccaytaagtcaatttaggaaggagattgtgagtg

SEQ ID NO: 22474 - DNA, 360 bp, Homo sapiens
tataaaactagactaggtttaaggcaaaggattggcraaattgaaatgatttaacaagaagtcagtatttcaaagaagtagctaaaagaaaaagtaactgtgggaagggaaatggcaatattgaagaaaaaatgacaatggtacacctttcaagggctaagtgctcttaacagtgctggccatagaaagcagaaaaatttgctcactgtaggaacacagatatgataggagaaacccacatcccaggttttgaacttcacagatggtgaattattccttttcatgaggatccctctatgatatgtgacttttaagctattccatttccatcaactaatgctaaataacgtagtaaatgtt

SEQ ID NO: 22475 - DNA, 881 bp, Homo sapiens
tttgtttagtttttactacctttttcatccagaaaaataagtaaaagccaatatagcttttgaaatggaaaaattgtttcaaatcattggcaaagcttaatgacttctgactgctgagatatgttaatttaagccagaccaaatgttcctcagctgcaaatatttggtgttgttcactgggaactggcaagatttatgagggcccagtggcaaagactctgtgctcatatccctctcattgtaattgtttcccatgttcaatgatgaaggaccgatacggaagaaaataccaacttttcaggggtggtcacttagactcaaataagatgctatttcacatttgatttactatggcatcctcatgccatcttagttatcaaagccctttcaacttttctactccaattttgggaaaatacaatctgttactatccaagttgctccgaagttgcaacgcaaagaaggaaatgacttacatttggcaatttgtaactataagatatgcaatggtaatttaaaagttatatgagtaatgtgtagtacaaatataagtataatatgcttatattatttttaacagcattttaacctctttttataaattagttgtgatgcattcaagaataaccaaagatattttaatttaaattaaattaataatttaatyattatttactaatttaaataattgaaataatattaaattgatcttgcaaacatattgaaggcaactcacattctgcaaagacaaaaagtaatgctgttaaatacacatgaaaatttatatttatgtgataatcatttactgtttagaagtattaataattgcaagtgtttttaatacctcttaaagattagatattaataacagaaataattcc

SEQ ID NO: 22476 - DNA, 1018 bp, Homo sapiens
gccaagctaccaagattttgaagttcatttgttacagcaggcagaattatcccaactagcacagagaaatggaataagtttgacgagccagccagggagtgggaagactggagataaactcagatctgcccaactccagaggaacacccaggccaatcaggtgcacaacctgccaatgcaggtctcatatatgaggggctccccctgcccatagagcctgcgtgtctgttttcgcacctaatgctattgtaatggggcgaatgtgggctggcccaaggagtggacacaggataactattctgagtctgtgggttcccctctggggtcagcatccaagctgtgggacattatgctgaaacttcataccaaccccacttccaggtgggaccagacaggaccagacaggaggtccattgaggtgtggccagcagacaatgtctgtttatttttgttttttggggttttttctttgtttgtttgtttgtttgtttgttttggatcgaaacayagatggggcggtcttcctagaaaggtacctgttcactggattgtccatgctaactcaaggaccctggagtaggaactggaaatgggtgaagaagttccacatatagactccagcagagcttgggagccatcccgagggcttcagcttctgctgtttgacgtggaattgacttgacagtaacagtgataacagcagctgacgtttatccagggcttccagggttccaggcactgagctcacactgtaccatctcgtgtcatccccgcagcagtctcacgagcgagggtcttctgccaagttcactctgtcaatgagaaaatgaggatgtagagggaataagccccttgcccggagccacacaattacagagcagcagagctgagactcacagcaaactctgcttccagaattctgctctgaatcactggtctccaaatgctctggatcttgctctccatcagagacaaaaagagcaaaatttaaaaattcattttatacatatgcaactct

SEQ ID NO: 22477 - DNA, 1018 bp, Homo sapiens
gccaagctaccaagattttgaagttcatttgttacagcaggcagaattatcccaactagcacagagaaatggaataagtttgacgagccagccagggagtgggaagactggagataaactcagatctgcccaactccagaggaacacccaggccaatcaggtgcacaacctgccaatgcaggtctcatatatgaggggctccccctgcccatagagcctgcgtgtctgttttcgcacctaatgctattgtaatggggcgaatgtgggctggcccaaggagtggacacaggataactattctgagtctgtgggttcccctctggggtcagcatccaagctgtgggacattatgctgaaacttcataccaaccccacttccaggtgggaccagacaggaccagacaggaggtccattgaggtgtggccagcagacaatgtctgtttatttttgttttttggggttttttctttgtttgtttgtttgtttgtttgttttggatcgaaacatagatggggcggtcttcctagaaaggtacctgttcactggattgtccatgctaactcaaggaccctggagtaggaactggaaatgggtgaagaagttccacatatagactccagcagagcttgggagccatcccgagggcttcagcttctgctgtttgacgtggaattgacytgacagtaacagtgataacagcagctgacgtttatccagggcttccagggttccaggcactgagctcacactgtaccatctcgtgtcatccccgcagcagtctcacgagcgagggtcttctgccaagttcactctgtcaatgagaaaatgaggatgtagagggaataagccccttgcccggagccacacaattacagagcagcagagctgagactcacagcaaactctgcttccagaattctgctctgaatcactggtctccaaatgctctggatcttgctctccatcagagacaaaaagagcaaaatttaaaaattcattttatacatatgcaactct

SEQ ID NO: 22478 - DNA, 561 bp, Homo sapiens
tcatgaggtcagaaacctgcatttgtctagcttgccaaggcattggagatagtggaggggagccaataccatctgggcttctccatgtgcagagcctcttcctgagagtacatcaggatgtcagggaggcaggcggtctcagagtgggccagcaagtcttggaaggtgtcattcataaaatattgaaacaccgaggctgcggagcacaaaccaaatggccatgacaggttctgcacaggggagagtacaatggaacccgacctccattcattcctgactctcatccggctcagtgggctccagtgtgtgtggacttcagccatgggagcaggtccggtgctgaaattagcagaagcaagcactcgccatggatggtcactttgggaagggcaccactcgcagttttacaacactgttctgtttctttgtaacaaaatatagcagagtctcagccaaaaagaggatggcacataaacctttgtcctaaagctatgttgagggattgaaaagagggtgcaagccctacttctgaccatgcccaggtttcygggtggctagcac

SEQ ID NO: 22479 - DNA, 508 bp, Homo sapiens
aagcactcctttctttttctgttaaaatttagctgcctctttttgacccagtaataccacacaaagggcttcttgttaatacaaaagaactaaattttcactgacttcatataaccttccagacttttaccaaaaaggatccataagattttctggctaaaagagaatagtgtaggtgtgctgaatttttttgtgtaaaacatatcagagaccgaaaacccacaccccccaaaatcattgagaagaaacatagatgcttccagagtacggacctcttgtgtgctctagaactccccrttgcctgtgagggtgagattagagactctgggccacgagctttaggaaaagggaaaagaggcctactgagtagagcattagtttgttccttttaggttgtattctgaaacaaatttaaaaataggagattcaaacaaaattattactcaagtcttgggcaaagatactggggattattttttaaataagacagacatcatttacaaaaagt

SEQ ID NO: 22480 - DNA, 545 bp, Homo sapiens
catttattagtattttttgcaakaatggatataaaacatactaccaagacttacataacaaaacatactaccaagacttacatatttgacaaattattgttttttcaaagtagtcatatgtgaaagttgtatgttcattgcaatgctgcgattgctcaaaatattgttagaatactaatttgtaaatttagaaattgcctccagagctaataagtttcaagaatataaattccatctcttttctgttttgtcttttctcttcttcctccctcctttctttcctttctttcctactttctttcttatcattagaaataacattactcctccccctacaaaacacacacattaaagacaggaaggagccctgtcattacagctatgggcaggttgtagctagagctgagaacttctaatggtagtcccctgaaggcccattcataaactcgagatacctggggctgccctggctacccttcctaagtcccggtggttcaactctttcttcagtcatctttttttacttctctttattttgctttagt

SEQ ID NO: 22481 - DNA, 564 bp, Homo sapiens
tcccctcaccctttgcttatggacgtgccaacgccacagttcattattccgcccacatggctgccagtagtcctgataccttaggtgtctgcgaaagggcgtctggcagggctggggttggtgacaggcacctgtctctcccacaggcctacttagagtttttcacttcccgcgagacagcggaagcacttctgcaagtgctgaagaagtacgagctccgggttaattaccaccttgtcaatgtgaaggtaggccaggccccagggttcccacagagtaccargcccttcgttgagcaaacacccagcacctagcctgggctaggcattgtgcaagacagagagatacaggcagaactggggccctgctcttaaggagctcccagcctagagtgagggaggcagatcaatgtgtgaccaccagccagtgtaagtgggaaaatcaagttcaggagaggatgctgtcgggtccagaggagggatatctcacctgggaggccagggaaggcttctcagagggtcatctgtgggaatcactgaggacaaagaggagttggccaacagg

SEQ ID NO: 22482 - DNA, 615 bp, Homo sapiens
ccaaacatttttcaaaatttggaaccctaggtaacctggcattcttagtctcagttgctttcaactgcttatatacatgaaaccattaaatcagcttaccaaactctgtaaatgtacttttcacttccccgctttctcacatttgctcttgatggtttatctttccttatcgcttaacatcccscctaaagtgaggggaaatttacattttatttttcccaacgagtctagctggaactttgcctcacaaactagcaacaagggagtctttgcctttctgaattttgtatatttgacataacttaagaaacactgtaaaacataagcgttaagcttcagaatttgaagattctctgatttctcacttagaattaaaaggctgagtatacagccatgtgtttcttcaaattgggcatgtacacacatacacataaattgcttatataatttccatacttatatatgtgaacatatacattgacaattatcctgtcatcagatcatccaatggctgtttcagagatttaagatgatattgatattacttctagaggctaaatgttgtataatgattttagcatatcatagatgctaatcttaatagtatttctaaat

SEQ ID NO: 22483 - DNA, 871 bp, Homo sapiens
gaatgtagtggcacaatctcagctgactgcaacctctgcctctcggttcaagcaatcctcccgtctcagcttcctgagtagctgggatacaggcgcacgacaacatgcctcgctaattttcctttcctctgctccttccttgacaaaagtgctagctttacctgagtggctttcggagcttgataaaaactctcttttttcaggagatttttggaagccaaagaaatttttatttgctcttgcttcatcatctgttttgaggtggtgagtctgtagtcccagccactctgaaggctgtggtgagaggatcatttgagcctgagagttcgaggctgcagtgagctatggttgggccacagcactacagcttgggtgagagaatgagacagtgtctcaaacataaataaaatgaaatccaaaagtatatttagaaaaaaataagtaaataatgatagaaagaaaaatgtgacttaatatgcagtaattaaatatccctatgcaaattaagatttctctattcctgctcacttttggtgtcyatttgcatggaatattttttccaccccttaaccttaagtttatgtgagttcttatgtgttaggtgagtcttctgaagagagcacaaacttggttgttgaatttttatccattctgtcattctgtatcttttaagtggagcatttaagccatttacatccaacattagtaattacatttattagggataaagtgtaggcataaaaagttagcggctagaatagagaaacaaaaacagaaagagttttagttccttaggaaaccactaaataagttgactgaaatcagaaaatgccttcttagactgttaggtgagaaaaataaagccttgatc

SEQ ID NO: 22484 - DNA, 1206 bp, Homo sapiens
tgtatgaaggacaagcctgatctctactgtgaatttctaccgaggtrttttagtagaaaaatgagtatgttatggtgctgtggaatgctaaagtgtgtaaaacattaagaatctaaaaatatgctcatttccaagttttgtcccagagcaactgtgcactctgattatatcgctactgctatttaaagttatccatttgcatgtctaaaaaatagattcatactgattgtcccattttgatctcaaaaaactcctgaatatgagagtcgtgatcaagggacgcttcatgaaatattccaaagttaaagtgtgcaatgaaaccagatttatcatagccttatttaaaataattatttctaaaattgttattgtttaattataaactgcatcctttcagatacttggaagatccataacagtgtttttattttcacagaacaagcataaattatttatgaaataataactcagatacagagattacttcctattggccttacatatgcatataaataaataaatgttatgaacatgagcatacttattttataattatgtaaatgtgtgtgtaatgtaatatataagttcaataaagtcagcttatacatggtttcaattcatgcttctaaaacccactcaatgtagtcattatcatatgttaataaataatctctgaaaatgtgcttctagtagttgcacaatatcccatcataaagattgtcatgctgtttttaagtcatacttttgggtatataagttatatctgatatttttctactacatagatactattataaatctattagtagttgattttttgtcaacacatatgattgtttcctcacaatagtacaagagttggttgtaactatttccttccaacatttattttaggttcagcgggtacatgtgcaggtttattatatgggtaaaatgtgtgtcaatgggattcggtatacagattacgtagtcatccaggtagtgagcgtagtatctaatagggagttttttgatcctcactctccccccgaccctccacccacagtagaccttgtgtctattgttcccttctttgtgtccatgtggactcaatgtttaacccccacttataagtgagaacatgcagtgtttgtttggttttctgttcctgcattaattcacttagaataatggtatccagctccattcatgttgctgcaaaagaca

SEQ ID NO: 22485 - DNA, 603 bp, Homo sapiens
ctctggggaagaaactgcaagctggcaggcaaccagcttgcagcaacggagaggaactccggcccattcccccttgtggttgtcgtgttcaggtcagtactaactttagccctgcagtcctcaaatggggacagtccactagtggattaaatcctccttaaatgattagaagcttttagccagagatcagaggaaaggaaattatttcatttattctctgctggtacacgatgacttccggggaagccatcctccagtgttttgcagaataataacactttctattcatatatcattgatctcccaggagctcaaagttctccacaagcatcttatcagctaatttcacctgaggtgcttgggaaggagggaggaggcaaggacaacatttgctttcttttttttttttaaccttgaagtgcaggggtacatgtgcaggtttgttacataggtaaacttgtgtcatgggggtgtgttgtagattatttcatcacccaggtattaagcctagtacccattagttatttttcctgatcctgtccttcctcccaccctcyaccctctgataggccccagtgtgtgttgtttccctctatgtttcca

SEQ ID NO: 22486 - DNA, 606 bp, Homo sapiens
ggtagtacacaagtatcttagaaaagagtatccccaatttctccctctcaacccttataacattgttattatacatttcacttattcataagctataatcamccaatatgttgctgctattattatttggacaattattctcaacctgataaagaacatctacagaatccctacagctactcacagaactcaggaaagcactttacttactattaccggtttatataaaagatacaattcaggaacagccaagtggaagagatacctaggacaaggtatgggagaaaggggcactgagcttccatgccgtctctaagtgtaccaacctcccagaactttaatgtgttaaccaacccagaaactcttcaaactctgttggttgttcaggggttatttatggaggttacatcatgtaggcatgattgatcattaactcagtctctagtccctctctccttcctggaggttggggtggagggggtagggccaaaagttccaggctttattgattattgggcttggtctttttggtgaccagcctccatctaaaagctatccaggggctcaccaagagtagcctcattgctgggcgcggtggctcacgcc

SEQ ID NO: 22487 - DNA, 583 bp, Homo sapiens
ctttcattgggtttattttgctgcttttctctggcttcttatcttggatggtttgtttatttttcttctttcttgttttctaataaatgtattttggatggtacactattcctgagaaccagtctggctggctactctctggggcacagtattataagactgtttctcatgtgattctgatgggtggatggagtaaaacgcactggtatggcttcagatcaaatgttttgaagatagaccagatgtaaatcctagcgtggctacctaccagctgtgacctgggcaaatcactcagtatctctccgaatcagttttctcagctgaamaacaagaatggcagtagctagctcattgagtgttgagataatttatgggataatacacacaaagtgctcagaaaggagcctggcacacactcatgataaacacctgcttatattgtcattgaaattcaattgcttaaaacgaagtgcaaaaaaaaaaaaaaaaaaatgacccaatggaagtgaatggcttgctacagtctcatctgtatataaataagtctcatttggatgacttttatttataattttaaaaacaa

SEQ ID NO: 22488 - DNA, 583 bp, Homo sapiens
ctttcattgggtttattttgctgcttttctctggcttcttatcttggatggtttgtttatttttcttctttcttgttttctaataaatgtattttggatggtacactattcctgagaaccagtctggctggctactctctggggcacagtattataagactgtttctcatgtgattctgatgggtggatggagtaaaacgcactggtatggcttcagatcaaatgttttgaagatagaccagatgtaaatcctagcgtggctacctaccagctgtgacctgggcaaatcactcagtatctctccgaatcagttttctcagctgaacaacaagaatggcagtagctagctcattgagtgttgagataatttatgggataatacacacaaagtgctcagaaaggagcctggcacacactcatgataaacacctgcttatattgtcattgaaattcaattgcttaaaacgaagtgcaaaaaaaaaaaaaaaaaaatgacccaatggaagtgaatggcttgcyacagtctcatctgtatataaataagtctcatttggatgacttttatttataattttaaaaacaa

SEQ ID NO: 22489 - DNA, 537 bp, Homo sapiens
ttgtgtctcttctcaactggagaaaaacagtccttagctgctgattgtctaatgtttgaaaatgattttttatatagtttgtctagttttctagttgtttatagtggaatcagtcattagctcctgattagaatctctcatctactgaactttttattttaatttaaaacttcttaaaatgttatattttaattttgttacagaatatagtaatacattatcctagtgtaaaatttaaaaggtaagtaatacatagtaaaaaaaaattcctcccactttcactcccggaagtaactgatgttacaaaatttttctgtcttttaaagttattatatgtatctacaaaacaaaacacaggaaactagccataataaaataatggggtctaaaggaattcaatcacataaaatgtkaggtcaaatttattgtgagattaataaaaattatacttttgttaaactatttctctcacaaaaagcacaaaatgattgtgaaacttacagcacacgttgctgactagtgaactgagtaaccgcc

SEQ ID NO: 22490 - DNA, 526 bp, Homo sapiens
tgcctcccgagttcaagcaattctcctgcctcagcctccsgagtagctgggattacaggcacgccccaccacgcccagctaatttttgtattttagtagagaggggattttaccatgttggccaggctgatcttgaactcttgacctcaaacgatctgcctgcctcagcctccaaagtgctgggattacaggcttgagccaccgcgcccagcctcaactgtaaagctttttgtatactgaaaatattaaacttttatgattatattccaactatttttcctccattagtaacctgtttcatagtgctgcttaatgcagagaattttattattgtagaccaatcaatctgcctttttcttttatcattttcccttggatttataagcttagaaaggcctttcctatcctaagagcaaatacaaaatctgctttacatattgaactaatattgggatggtactgatttttattgcaatatttgagaaggcaaaacagagtttaaggaaagaaaaaagaaatcccaaag

SEQ ID NO: 22491 - DNA, 526 bp, Homo sapiens
tgcctcccgagttcaagcaattctcctgcctcagcctccggagtagctgggattacaggcacgccccaccacgcccagctaatttttgtattttagtagagaggggattttaccatgttggccaggctgatcttgaactcttgacctcaaacgatctgcctgcctcagcctccaaagtgctgggattacaggcttgagccaccgcgcccagcmtcaactgtaaagctttttgtatactgaaaatattaaacttttatgattatattccaactatttttcctccattagtaacctgtttcatagtgctgcttaatgcagagaattttattattgtagaccaatcaatctgcctttttcttttatcattttcccttggatttataagcttagaaaggcctttcctatcctaagagcaaatacaaaatctgctttacatattgaactaatattgggatggtactgatttttattgcaatatttgagaaggcaaaacagagtttaaggaaagaaaaaagaaatcccaaag

SEQ ID NO: 22492 - DNA, 607 bp, Homo sapiens
ttctagtcataatggaaggtgaagggtgtaaagatcatgtgacaagggaggaaagaagagaaggaaggaggtgctggttctttctatcaaccaattcgcaagagaactaatagagaaagaactcacttagccctgtgggaacacattaatctattcataagggatctggctgtatgatacaaacacctcccattaggccccacctccaaattgtatcccattggggatcaaatttcaaaaagagatttggaaggaacaaacaaaccatatctaagccatagtaaaaggaatggcttttcaaaggtaaaatttactragtgtattaatattttaccaatttccagccaggagagtatgaatgttgcattattacattgctttgaaacaaagcattagtcttaattcagaagtttaaattcagatgttaacgttgcatatttaataatgcacaaccagtactaaaatcctcattgaaatgacaaataattttatttcgaatcccttatagaggttcacaatgttttaacaatgtagttttgactaaatagaagtagtcaaaacctgtcagattggaaatagtatttataaaacataaacaactcgtagt

SEQ ID NO: 22493 - DNA, 561 bp, Homo sapiens
attgcagtttttattgttattgaagtagagagtgaaccacattcagccagttgggaatttgaagagtcagttcctaactctttttgaaatgtcagttgccttgataatttacttgctacttggaatggcaacatgttctagcctcaccatatatattttctgccccagatctggaactatctatttcaatcagaatccctgatttwaaaaaaaattctgaataggaattcaagacacaatcaaggaattgctcatcttgtagtatttttcagtagaattagaaaataaatgtaagatcaaatacctcagcagttgttattgacgttcctctgtaaagactacagatatttacttaacttcttctctattacttctctattttctttcttcccctgaaaattgttgttctaaaggacaaaggcgatggcagaatttgaacatcattcaattatcctttctattttgtttggcattacacacacacaacaacaatctcagagaagcaatatatatagttgctgtcttaagtaattactgaaaatatttttaaagttttgcatt

SEQ ID NO: 22494 - DNA, 588 bp, Homo sapiens
aaaagcagatttatggttctattttatttctcctaaatcactatgacgatcttgttttaacttatgggttcttaattcaacgtcccctctgagaaagtcctaagttttgtctacyattctttcgggtgcatggtttgttaaatcttaagttgtaggtccccagaaattggtagatagtcttagaaaaaaataataattttcattctgaactatattttccctcctttcaaacctctggagatttccttagtttttatattttattcagaattttaatgaattctgtgtcagaaagatttctttggtcatctatttcatctggagataaaagtcagggctgtttttctaacacctgtctcatggacagaacaacaagtcaggctatgccctttatggagtgagagtagttccagggttctgccttaagcaggcctgagatcttagttcctgctcctgggtgggtatcaaaacactggtcccagcccctaaggcccaatttttgttctaataccaatttggatatttatctcaatgcctgatcacctcttcatctttttttttttttttttttgagacagagtctctgtc

SEQ ID NO: 22495 - DNA, 588 bp, Homo sapiens
aaaagcagatttatggttctattttatttctcctaaatcactatgacgatcttgttttaacttatgggttcttaattcaacgtcccctctgagaaagtcctaagttttgtctaccattctttcgggtgcatggtttgttaaatcttaagttgtaggtccccagwaattggtagatagtcttagaaaaaaataataattttcattctgaactatattttccctcctttcaaacctctggagatttccttagtttttatattttattcagaattttaatgaattctgtgtcagaaagatttctttggtcatctatttcatctggagataaaagtcagggctgtttttctaacacctgtctcatggacagaacaacaagtcaggctatgccctttatggagtgagagtagttccagggttctgccttaagcaggcctgagatcttagttcctgctcctgggtgggtatcaaaacactggtcccagcccctaaggcccaatttttgttctaataccaatttggatatttatctcaatgcctgatcacctcttcatctttttttttttttttttttgagacagagtctctgtc

SEQ ID NO: 22496 - DNA, 588 bp, Homo sapiens
aaaagcagatttatggttctattttatttctcctaaatcactatgacgatcttgttttaacttatgggttcttaattcaacgtcccctctgagaaagtcctaagttttgtctaccattctttcgggtgcatggtttgttaaatcttaagttgtaggtccccagaaattggtagatagtcttagaaaaaaataataattttcattctgaactatattttccctcctttcaaacctctggagatttccttagtttttatattttattcagaattttaatgaattctgtgtcagaaagatttctttggtcatctatttcatctggagataaaagtcagggctgtttttctaacacctgtctcatggacagaacaacaagtcaggctatgccctttatggagtgagagtagttccagggttctgccttaagcaggcctgagatcttagttcctgctcctgggtgggtatcaaaacactggkcccagcccctaaggcccaatttttgttctaataccaatttggatatttatctcaatgcctgatcacctcttcatctttttttttttttttttttgagacagagtctctgtc

SEQ ID NO: 22497 - DNA, 533 bp, Homo sapiens
gaattgcttgaacctaggaggcagaggttgcagtgagctgagactgcactactgcactccagcctgggcaacagaatgagactccatgtaaaaaaaaaaaaaaaaaaaaggtgccacctctgacagggttaagtcactatcagctactaacattattagcaagtgttcrctgagagaagccaataacacagaagaagagggaagatggccaggggccaggaacagaggcactgaccccattttctgctggaggactggccctgggcttgagctggaccagaaataatccgaaggcttagaggcaacatcccaagggatctgtgggaggagctggtcatcgtatattgaagattcatgtcatttttctcctcatgaaccctcagtggctccctactgcctatgcaataaagcctgcactttttagcctggcatttgtgagtgggtgttctgccccacttctcaccactctctccattcaaatgcctcagccaggctcatcagataacactgttcgccattctctccttctccac

SEQ ID NO: 22498 - DNA, 510 bp, Homo sapiens
ttgcaaactgaacattaattaatatagaaattactgagattatgtatatacatttaattaagtcttcaaatcccagggcattttatacttagagttttttttggcttaatagctacaggtggctkgtggctactgcacaggacagcacagtccttgaggaaggggatcatgtcctgctcttctgtgctcccagagcagcacacagtgcctaagtcacatcaggtgtcctataaacatgtatttaatgaagaatatcccccaacacctacctgaacttgtcatgctccaaagaacatgacagatacaactttacctcaaagtcagcattttagacaatttagaacaactggatttgtgtcatttttaaaggacactttagtaagtttttgtcgaatctgtgtttgcctcattattagactctagtcccaataacagtacctctccctagagtcagggttatccactttattcacttttatttgttatcattgacttatttatttaataacg

SEQ ID NO: 22499 - DNA, 510 bp, Homo sapiens
ttgcaaactgaacattaattaatatagaaattactgagattatgtatatacatttaattaagtcttcaaatcccagggcattttatacttagagttttttttggcttaatagctacaggtggcttgyggctactgcacaggacagcacagtccttgaggaaggggatcatgtcctgctcttctgtgctcccagagcagcacacagtgcctaagtcacatcaggtgtcctataaacatgtatttaatgaagaatatcccccaacacctacctgaacttgtcatgctccaaagaacatgacagatacaactttacctcaaagtcagcattttagacaatttagaacaactggatttgtgtcatttttaaaggacactttagtaagtttttgtcgaatctgtgtttgcctcattattagactctagtcccaataacagtacctctccctagagtcagggttatccactttattcacttttatttgttatcattgacttatttatttaataacg

SEQ ID NO: 22500 - DNA, 563 bp, Homo sapiens
tgcccatgccggtagttaactatttacctgtctttgttcttcgggagacatgagctggggtgcgggtctacagatggttcatcttttttttcttttatttccctggcccmccattgtgctgggtgcatgctagttcctcaataactgttgctcaaacaacttcatagagttctacaagaattaaaacttaatccctaacttccagaaaactagacaacagttatggaagagccacactcagtcataatgctctgagatggaggaattgggacatgaaccttgacttctgactcctcgtccagtgctctttgtaatgccttgagttgcctctccctatccccttggtctctgggtcactaaccttaattcttacccctgccagccgtggcctgtttcccctcacacccacctgcactgcatctctgtgcaaagctccatactctcctgtccttaatcattcctcctcatcccacccccacagtcccaccagctcacaacacagggcctgacaacacagccagggcagatgaccacagccaagatttaaattctggaaccccaag

SEQ ID NO: 22501 - DNA, 526 bp, Homo sapiens
gcaggtggggaaggagcactggggccctcattctgtcccaaaccgcccacttgctgccctttccgggtgcctgtaattccctcattcgagcccagctccctgggagaagacatgacygcctcctgcggcatccacactacctcccccgtgtcaatgctcgcgtgggccaagcgctgtactagaagcctttgcattccaggctccatttcacaatttcacaagagggagacagaggtagagaggtaaccatgcccagagtcatttgagaaggtgacttctcaaaccaggggctccactgccacacactggctggatctgctgtgaatacattgcccccctgtcctgaagatagaccctagtggtggcagataccccaaaacagttctgcgctgctcagcaatcctgctgtgctggggcctcctttctcccttacacttttttttttttttttttttttgagatatggagtgttgctctgttacccaggctggagtgcagtggcgtgatctcggctcactgcagcctc

SEQ ID NO: 22502 - DNA, 564 bp, Homo sapiens
tgttgtcactaggtcaattattatgaagattgagaattatgtcatattcatacaatgggatattactcagcaatagaaggaataagctaataatacaggcaacaatataatgatttgcaaaaacattaatttcagcttgttatgatcacctattcactctgtcagtgagggagggagtcatgccctaaggttctgggaatggccaaacacaggacacctgacacttaacagatgcatttggcagcagtttattagtcacatacactcacagtctgggggaggagtatacctgggtgttcatgggggggttgcacctaggagcagagtgaaccagaagaggttgtggcagggaggctttttagtaagaataggatggggtaacccctggctcccacaggaggatgtgattgacttatttractagtttgacaggctggcagggaaatgaatcccattagattgaggagctgatgaggtgcatctgttccagctgataggtggacaaaccaggtggggaattttcctgcttgaatgagaagcatacccggcaagaacagggaaact

SEQ ID NO: 22503 - DNA, 346 bp, Homo sapiens
tcgccccctggtgcttccggggctggtaagcgcgtagctgaggaaagggcacaaaggtggcgagctttgcgggagtagttgtgcagaacctgccggaccccagggcttggccggtaggctcgccttcggcggctgggctctccccttggagctcagactccccagccgcaggctgtctctcgggcgggccccagccagggcgcgcagccctgagcgtttgtcgctgcggcccggctggcaggccccgaggggcgcggggtcgcgggccggccggcagggctttgtgccgctcgttcccgggtgtgcgcgaggcgcggakcatccaaattgacaccatatgttttcc

SEQ ID NO: 22504 - DNA, 536 bp, Homo sapiens
gatggtcttgaacagtctcttttatctatcgcagtctgtcttctcatctgtaaaaattaagctattggcttgggtcatctctgaagtttccaatagctctgtgattctgtatcatttattttgtcttattcaggtcccaactatcctccaacaacccctaggattccctctagggccccaaattacactgaagaggtccactgccttcaggcaaggccagctctattttcttcctaacattttgggttcaagtaactgcagagatttggggagaaataatacatgtccttctggaaagtgaatgacctaatctctctggaacagaacgtgactttgttgtttaygttttgtttcatttttgttaccaggcaatcaatatggggcctgttggaatgatatgtgccagctgggatttctgcctcatcacactgccagagagaagagtgtgaagcccgcttggagaagaggaggaggctgaaaagaaggcaaagagtgaagatagagaaacaagatggaagtgggggagaaaaacaggg

SEQ ID NO: 22505 - DNA, 520 bp, Homo sapiens
ggcccttccccatcagcgccaggcaggaggggctctgtccagggaaacccaggaggatggcggacccctgtgagtatccagtcttccttggcgaggtgagccaggtctgcagagcatagcaatcccgtatgtgaccaccaagtggcgctctctggagcctgcgttggagagcagggaaagctctccttgtgcctggcctccctcccaggagctagcctgggccagactcagactgcatagagagctgagctgtgcaggctaggagaagtccttggaagcagaggggaagggctggccgytgaagaagggtggagtgagctggtaatgggtggaaaaggcgtagtggagcagaagcctgaagcctgctttctcccctctcagggacttacagtttgagatgccatgactgtgcggtcataaatgacttcaactgtcccaacattagagtatgtccgtatcatattaggcgctgtatgacaatctccattcgtaagtacctcttggtcatttggacacattg

SEQ ID NO: 22506 - DNA, 570 bp, Homo sapiens
  misc_feature (1)...(570): n = A,T,C or G
tgaaacatgatttctggtctgcatttaatttctcgggctctagaattcttaccataagaaatgaacaggacatttcattgcgtgtagctacatgancaaggtaccatgataccattttgggagggccagagncmannagaatgggcagctctagnatagaaaactatctccagaagaagttgttctgggagtgatgagagcccgctagtggacttggatgttctctcttagtcaagtgttctagacaattttatcacagcgtgggagtgtagaatgtgtacatggagctaattatggttgaatgtgaggtgtatgtgcctcaatatttacaagcagaaaatgtgaaatcaattattttcattgctgcttctttttttaggcataaattctcgtgaactacttgtttataagaactgtacaaacaactgcacatttgtatatgcagctgaacagcctcctgaagccccaggaaaaatcttcaaaactaatagcttctactgggtttgttgttgtaatagcatggtttgcaatgcaggaggacctactaatcttgaaagggacatgttaccc

SEQ ID NO: 22507 - DNA, 570 bp, Homo sapiens
  misc_feature (1)...(570): n = A,T,C or G
tgaaacatgatttctggtctgcatttaatttctcgggctctagaattcttaccataagaaatgaacaggacatttcattgcgtgtagctacatgancaaggtaccatgataccattttgggagggccagagncawnnagaatgggcagctctagnatagaaaactatctccagaagaagttgttctgggagtgatgagagcccgctagtggacttggatgttctctcttagtcaagtgttctagacaattttatcacagcgtgggagtgtagaatgtgtacatggagctaattatggttgaatgtgaggtgtatgtgcctcaatatttacaagcagaaaatgtgaaatcaattattttcattgctgcttctttttttaggcataaattctcgtgaactacttgtttataagaactgtacaaacaactgcacatttgtatatgcagctgaacagcctcctgaagccccaggaaaaatcttcaaaactaatagcttctactgggtttgttgttgtaatagcatggtttgcaatgcaggaggacctactaatcttgaaagggacatgttaccc

SEQ ID NO: 22508 - DNA, 565 bp, Homo sapiens
gtgttgaaaactcttcctccccaaagatgagcataattaccatgccactgattccctctcctagtaytgaaaggaaacaaaacatgctctcctcagtagcaggcaagagaacatcccttacctttctgccagattcatatttgcatttctgttcaactagactgtgcactgcttggggaaaggagcatagatacccaggccacattgatgatcagtatatatttatgaataagtaaagcctgaataataattttcaacacatgatgaggaaaacacaggtggatcatagggctgctgtctggaagtccatagctgaatcattctgtcacagcacttcccctatttctggcagttaaccacagaatagaatagcatcaagacattttaaattcaatcaaatgcttataagtcacctaccgtgtgtcagtcacagtgcaaatgctgtgaatacaaggaaaggtgaattttctgcttcctcccacagcatgtagcctacactcagaggcttagtgcccaaattagtctcataagtattctaacaaaaactgcctaagattcatttttt

SEQ ID NO: 22509 - DNA, 2039 bp, Homo sapiens
ttcagctttaagttttttttaaagctatgttgttgcttgcaataaatgtaattactgtgttactgactagtcctatccagaaagaacaaagtctaaaattgttaccataaaaaataaaacactttctcttctgttgattttaattggcaaataaaaatagaatatatttattgtgtacaacatgatgttttgaaatacgtacacattgcggaatggctcaactgagctaattaacatatccatcacctcatatgcttaccattttttatagtaagaacacttaaaatatattctccagcaattttcaaaatataatacaatgctataaactatcatcaccatgttgtactatactctgtgaaatttttttctgaatagatttggataaaaatttaaccaaaattaaaataaagaacaaaacacatcatttcccagaattaaaaataagtacagagttcactaccctgaagcgatggctatgctgtaaggtaaagaaaaggaattttctgagattaatcacagcatatttgtccatttctgaagagcaacccagaccactgagagctactaaattatgttacgaataatcagtgctaaggaatgaacaaaataagagttgaaaaaagttatcttataaatatccaccaacagtttctagcagaaatgctccaagaaactgaaaaagcatccccaagccaagtcacgtgagaaatacatgtctccttccctcttggattaagaaatcctattttctagttcagctcagcaggtatctattaagcactgttcactgatttggtgaacacttactccatgcttgctaggcacatgtttttgctaagtgcagggaatacagatagaaaatgcaaaccttgctcttgaaagcactctagccaggtcaacagcaaacaaataattataacatactgagataagtgtgatgggattctttcttagttttgcttcccccaagaaccagacctaatacaaggatttgagtgaacattgtttatttgggaggtgaaggaaacaccagttgggaatttaaaaaaaaaaaaaagtgagaaaggaaggaaaggccaccaataatggatgcaatataaagcaaggtactgctgtgagccactgctggggaactcagcgtgacagtgtggaacacacacctcaaagtctgggagggccataagcttcccagcattctccacctgcatatgagaagcaaagagtgagcttcagaaggccttcaggcaaagagaggcagttgttggctgttagaakcttggtagatatgcagtacttcccatcacatgcacacataagtccgagggcatgtagacatctgctgcagaaacattagcttcatagtcaatcctgtcaggaaaaggaggtgattacccttgagatcataaggtgtgtaagactcatgcaggttcagaaagaaggaaaatggtatttctggcagaaggacaagtgtgagggcattccaaccagaaaatctgaggcacttagagaagtcacaaatcctagcatacagaagcatgcaaagacaagagacaggggagagaactgctgagaattgaggctagatggggaggcaggacaaagagtcagccttgaaccccatccaaagatctggatccagcatcatgagatatttgggatgcatagaaatagggatacactataaaggattatggcacgacttaaatagcataaactcggtgacaatcagaacctctcttgactttcagatcttttgcttgtaattgaatggcttcagtcaaggaacttgagcccctactctggtactgggggcatatcaatgcacaggagacaaatggaagccctgccttcattagatttgggggtgaggggtaacgtataattacataaatagtaaataacaattttaaatagaagtatattgatgaaagggcagtgggataaagagtgactgggctatgcagctagacatatcaggaaagactggtctgaaatggggacattgaagctaagaaccaaataatgaggaggcaaaa

SEQ ID NO: 22510 - DNA, 2039 bp, Homo sapiens
ttcagctttaagttttttttaaagctatgttgttgcttgcaataaatgtaattactgtgttactgactagtcctatccagaaagaacaaagtctaaaattgttaccataaaaaataaaacactttctcttctgttgattttaattggcaaataaaaatagaatatatttattgtgtacaacatgatgttttgaaatacgtacacattgcggaatggctcaactgagctaattaacatatccatcacctcatatgcttaccattttttatagtaagaacacttaaaatatattctccagcaattttcaaaatataatacaatgctataaactatcatcaccatgttgtactatactctgtgaaatttttttctgaatagatttggataaaaatttaaccaaaattaaaataaagaacaaaacacatcatttcccagaattaaaaataagtacagagttcactaccctgaagcgatggctatgctgtaaggtaaagaaaaggaattttctgagattaatcacagcatatttgtccatttctgaagagcaacccagaccactgagagctactaaattatgttacgaataatcagtgctaaggaatgaacaaaataagagttgaaaaaagttatcttataaatatccaccaacagtttctagcagaaatgctccaagaaactgaaaaagcatccccaagccaagtcacgtgagaaatacatgtctccttccctcttggattaagaaatcctattttctagttcagctcagcaggtatctattaagcactgttcactgatttggtgaacacttactccatgcttgctaggcacatgtttttgctaagtgcagggaatacagatagaaaatgcaaaccttgctcttgaaagcactctagccaggtcaacagcaaacaaataattataacatactgagataagtgtgatgggattctttcttagttttgcttcccccaagaaccagacctaatacaaggatttgagtgaacattgtttatttgggaggtgaaggaaacaccagttgggaatttaaaaaaaaaaaaaagtgagaaaggaaggaaaggccaccaataatggatgcaatataaagcaaggtactgctgtgagccactgctggggaactcagcgtgacagtgtggaacacacacctcaaagtctgggagggccataagcttcccagcattctccacctgcatatgagaagcaaagagtgagcttcagaaggccttcaggcaaagagaggcagttgttggctgttagaagcttggtagataygcagtacttcccatcacatgcacacataagtccgagggcatgtagacatctgctgcagaaacattagcttcatagtcaatcctgtcaggaaaaggaggtgattacccttgagatcataaggtgtgtaagactcatgcaggttcagaaagaaggaaaatggtatttctggcagaaggacaagtgtgagggcattccaaccagaaaatctgaggcacttagagaagtcacaaatcctagcatacagaagcatgcaaagacaagagacaggggagagaactgctgagaattgaggctagatggggaggcaggacaaagagtcagccttgaaccccatccaaagatctggatccagcatcatgagatatttgggatgcatagaaatagggatacactataaaggattatggcacgacttaaatagcataaactcggtgacaatcagaacctctcttgactttcagatcttttgcttgtaattgaatggcttcagtcaaggaacttgagcccctactctggtactgggggcatatcaatgcacaggagacaaatggaagccctgccttcattagatttgggggtgaggggtaacgtataattacataaatagtaaataacaattttaaatagaagtatattgatgaaagggcagtgggataaagagtgactgggctatgcagctagacatatcaggaaagactggtctgaaatggggacattgaagctaagaaccaaataatgaggaggcaaaa

SEQ ID NO: 22511 - DNA, 805 bp, Homo sapiens
gcgcagatgccggcgcgggggaaatgggccctgaaatcccaccgtcaggccaggcagctctgagcgtgacctggagggctgttcagacggtctgggtagccgtgtcctgcgcatgaacatcctccgtcgggagaggaattccccacggattatcagagctgctccctccaccccccgccacgtcccacrcgggccacatcaactccctctgcagcctctggccagcggctgagccctccgtgtctcccctcgttaatgcctccttcaccatcccctcctgaagtttcccccattgcatacacgcgctgaggcccacccggtatcaaggactcccattgcttgcgaaaaagattccacccctcttagaacagagaccagggccgctgtagcaaatggccataaatgccacagcttaaaacaacagaaacggattatctcgcagctctggaggatggagtccaaaatctgaatcgctgggctgaaatccaggtgtgggcagggccgcgctccctctagaggctcccccggagattcccttccttgcctcttccagctgctggtggctgccagcagtttgggaattgcggccgcatcacaccacctttctgtttgttgttgacatccccgcctcccctgcctgcggggtcttagatgtctctctccttcccactgagtttcactccacatttgaattggattaactcatgccatgttaggcaaacgtgcccctcaaatccttccacttaacagacatttattgaaggttcctgtgtgcggggcccaagagaagggacattaaattagg

SEQ ID NO: 22512 - DNA, 530 bp, Homo sapiens
tctgattgtgaagttctctccactctaccatacaccctctttcaggaaaaagccagacactgagtgttgcagagatggaagcacaagaacccgtgttcaaaggtagaacaaaaccaggagattagagaaaaatgcaagacattaatcagtaaatatttactgagcacctactttgtaccaggaaatattctagtattctaatcacatgacatatatcaatgagtgaactggatgcaaatctctgcccttgttgagcttctaatctattgagtagcattatcaaagagaaaagccacgcattagatccaggatgtttatttaaatgtgcagtttcccaaagcagaattggaggtcgcagggcaccaacatgcaggggaatgctgttgggatcctggctyagttaatgagaacaccatcactgttgctgtatcaagggggaaccttggcttctggagtaactctgcagtagacgggacaatagctcagtgatttgacatctgcagtacaaatagctgatacaagataaggag

SEQ ID NO: 22513 - DNA, 639 bp, Homo sapiens
tttcaaaaggtcattttaatatgaggacataacctctcatgtaccaaatgcacattgatgcttacaaagatgaaaagttctcaaccattgtcaccaggatcgcagtcctgaggaagctcacgggtgtctgatgagtctcctccattcaggcccaggacagaaacctcagggagaytcctggactagaacggcagggattctgatcacagccaatagagagcctgggccagggtcagtgtcctgtagaagctcacagggttcacatctgacccttctcctgaccctaaagccaatccgcatcagcactgatctggtgctccttttgctcccaatacatgttctttctttggagtgtttgttctcccttttttatttgcttttctttcttcctgaaaaagaaacacatggtctctatgctctacactccagggctcaaggcattttcttagaactcaggcaaggctcaggcttggctactccagcccacgtgggagaggctgatgggatttccttctctccccatattctcagggccctcctctgtgttgtgtgtagactcatctgggaatgcaattggccgttaatagtgaaggggataaactcatttgatcaaaatgggatgtggatgtggaattaacc

SEQ ID NO: 22514 - DNA, 639 bp, Homo sapiens
tttcaaaaggtcattttaatatgaggacataacctctcatgtaccaaatgcacattgatgcttacaaagatgaaaagttctcaaccattgtcaccaggatcgcagtcctgaggaagctcacgggtgtctgatgagtctcctccattcaggcccaggacagaaacctcagggagactcctggactagaayggcagggattctgatcacagccaatagagagcctgggccagggtcagtgtcctgtagaagctcacagggttcacatctgacccttctcctgaccctaaagccaatccgcatcagcactgatctggtgctccttttgctcccaatacatgttctttctttggagtgtttgttctcccttttttatttgcttttctttcttcctgaaaaagaaacacatggtctctatgctctacactccagggctcaaggcattttcttagaactcaggcaaggctcaggcttggctactccagcccacgtgggagaggctgatgggatttccttctctccccatattctcagggccctcctctgtgttgtgtgtagactcatctgggaatgcaattggccgttaatagtgaaggggataaactcatttgatcaaaatgggatgtggatgtggaattaacc

SEQ ID NO: 22515 - DNA, 582 bp, Homo sapiens
tgtctccggagttcgagcagttctcctgtctcagcctcctcccagtatctgggaatacaggcacacaccaccatgtccggccaatttttgtatttttagtagagatggtgtttcaccacattggtcaggctggtctcaaactactgacctcaggtgacccacctgccttagcctcccaaagtgctgggattacaggggcaggccaccaagtccagctaatttttgtatttttagtagagaccrggtttcacgatattggtcaggctggtctcaaactcctgatctcagcctcccaaagtgctgggattaaagatgtgagctactgtgcccggccaacaccacctatattaatgttggattgaataactacaaagtctaccctaaccaagtgtaccatcaaacttaccattacccagaggaaagaatctttaacatgagatctatattcttaaatgttttaaggtgtaaaactgaccacagtacaatcacccaattatgattttggtaatgagttgtagaaactgcatgtatattttggatattaacattttttcagatgcacaccttataattatattctct

SEQ ID NO: 22516 - DNA, 582 bp, Homo sapiens
tgtctccggagttcgagcagttctcctgtctcagcctcctcccagtatctgggaatacaggcacacaccaccatgtccggccaatttttgtatttttagtagagatggtgtttcaccacattggtcaggctggtctcaaactactgacctcaggtgacccacctgccttagcctcccaaagtgctgggattacaggggcaggccaccaagtccagctaatttttgtatttttagtagagaccaggtttcacgatattggtcaggctggtctcaaactcctgatctcagcctcccaaagtgctgggattaaagatgtgagctactgtgcccggccaacaccacctatattaatgttggattgaataactacaaagtctaccctaaccaagtgtaccatcaaacttaccattacccagaggaaagaatctttaacatgagatctatattcttaaatgttttaaggtgtaaaactgaccacagtacaatcacccaattatgattttgstaatgagttgtagaaactgcatgtatattttggatattaacattttttcagatgcacaccttataattatattctct

SEQ ID NO: 22517 - DNA, 658 bp, Homo sapiens
aattatgttatttaaggcatggacaaaagcaagttgggttggtcatttaggtaatcataagggctgctgtcaagttaagtaacatggcagaaagcctgcaaagtctgagagctgggctgtctctcagctgggatttccttgaactgtttcaccagaactctcaagtctttgggattctgaagtttccatctgtcttaaaattacttttccataaagaggccttcatttccacagcctaaaataaagtgaggactgatgtcttggctaggtattaagaatctggayggttagtcagggatttggcctcacctcccactggaaggggaaaagggaagatgaatgcagagaagtcttttacagagtcttgctctgttggccagactggagggcagcagcacaatgacagctcactgcagtctcgaactcctgggctcaagcaatcttcccacctcacactccagagtagctgggacaacaggcacacaccaccatgcttggctgatttttaaattattttttgtagagtcagggtcttgctatattgctcaagctggtctcaaactgctggcctcaagtgatcctcccacctcagcctcccaaagcgctgggattacaggtgtgagctaccacacccagcccagacaaagtcttgacccca

SEQ ID NO: 22518 - DNA, 658 bp, Homo sapiens
aattatgttatttaaggcatggacaaaagcaagttgggttggtcatttaggtaatcataagggctgctgtcaagttaagtaacatggcagaaagcctgcaaagtctgagagctgggctgtctctcagctgggatttccttgaactgtttcaccagaactctcaagtctttgggattctgaagtttccatctgtcttaaaattacttttccataaagaggccttcatttccacagcctaaaataaagtgaggactgatgtcttggctaggtattaagaatctggacggttagtcagggatttggcctcacctcccactggaaggggaaaagggaagatgaatgcagagaagtcttttacagagtcttgctctgttggccagactggagggcagcagcacaatgacagctcactgcagtctcgaactcctgggctcaagcaatcttcccacctcacactccagagtagctgggacaacaggcacacaccaccatgcttggctgatttttaaattattttttgtagagtcagggtcttgctatattgctcaagctggtctcaaactrctggcctcaagtgatcctcccacctcagcctcccaaagcgctgggattacaggtgtgagctaccacacccagcccagacaaagtcttgacccca

SEQ ID NO: 22519 - DNA, 528 bp, Homo sapiens
ctaatactcagttaacagactgtggcataagcaaatatatgcaaagtgcactgcaaacacgcacttagcatagatcgtgggaactgtctttgtaaataattgttagcttcaattaatggcatttttattactcaagtttcctcttctgaagtgcataaaagatgatttttaaacctcatataaattgaataaagggctcatatgtcaaagttattttttatttatttattttgagacggagtctggcactgtcgcccgggctggagtgcagtggcgcgatctcggctcactgcaacgtccgcctcccgggttcaagcgattcccctgcctcagcctcccgagtagctgggattacaggcgcccgccaccatgcccggctcattttytgtatttttagtagagatggtgtttcactgtgttagccagcatggtcttgatctcctgacctcgtgatccgcccgcctcggcctcccaaagtgctgggattacaggcatgagccaccatgcccggccccaaggttatttttt

SEQ ID NO: 22520 - DNA, 528 bp, Homo sapiens
ctaatactcagttaacagactgtggcataagcaaatatatgcaaagtgcactgcaaacacgcacttagcatagatcgtgggaactgtctttgtaaataattgttagcttcaattaatggcatttttattactcaagtttcctcttctgaagtgcataaaagatgatttttaaacctcatataaattgaataaagggctcatatgtcaaagttattttttatttatttattttgagacggagtctggcactgtcgcccgggctggagtgcagtggcgcgatctcggctcactgcaacgtccgcctcccgggttcaagcgattcccctgcctcagcctcccgagtagctgggattacaggcgcccgccaccatgcccggctcattttctgtatttttagtagagayggtgtttcactgtgttagccagcatggtcttgatctcctgacctcgtgatccgcccgcctcggcctcccaaagtgctgggattacaggcatgagccaccatgcccggccccaaggttatttttt

SEQ ID NO: 22521 - DNA, 554 bp, Homo sapiens
ggcaattgcagatggccaacattataacactgaggcacagaaaatagtctcacctcttcccagtacttaggagcccagcgtggatagtggagagtgcacattccacatcttggttctgacactttcttgttgtatagtcttgtttcttcaccaatagaatgggtataagattatgtacctcatagatttgttgtgattatttaaacatatagcttcctaatccaatgcctggtccctaatgggtggttccttttaacaagcaaatattctcgactaccccataacatcagagaatagccttgaaacaatgttattgacattttaaaaatcaaacaatatgcaccccatattatagttatagtttcattgcaattacttaaaggagtgaatagacagactcaccttcatatccacttttaatctaactgagaatatctcaagacagtctattgagatggataaagtaagaaacagagacagagcttgttgatgtktgtgtgagtcatcctccttgtgaggttctgtgtgtgatgaatggctcactggcgccctag

SEQ ID NO: 22522 - DNA, 554 bp, Homo sapiens
ggcaattgcagatggccaacattataacactgaggcacagaaaatagtctcacctcttcccagtacttaggagcccagcgtggatagtggagagtgcacattccacatcttggttctgacactttcttgttgtatagtcttgtttcttcaccaatagaatgggtataagattatgtacctcatagatttgttgtgattatttaaacatatagcttcctaatccaatgcctggtccctaatgggtggttccttttaacaagcaaatattctcgactaccccataacatcagagaatagccttgaaacaatgttattgacattttaaaaatcaaacaatatgcaccccatattatagttatagtttcattgcaattacttaaaggagtgaatagacagactcaccttcatatccacttttaatctaactgagaatatctcaagacagtctattgagatggataaagtaagaaacagagacagagcttgttgatgtgtgtgtgagtcatcctccttgtgaggttctgtgtgtgatgaatggctcactrgcgccctag

SEQ ID NO: 22523 - DNA, 1029 bp, Homo sapiens
tcaataagattaacatacaaattttcatcagaaaccatggggttcaggaggcgttgggatgacaaatttaaagctgagaaagtaaaaggactatcaaccaagaattgtatgtctgcaaaactctccttcagaaatgatggagaaatcacgacattcacaggttaaaaaaagctgactgagatkgtctcaaccctacaagacatatatatatacacacacacatatatatatttgtaattcctctcttgtttttcctatttgatttaaaagaaaatgtccatcgaccaatgaatggagaaacaacatatagttttttcctacaatagaatattatttggtcataaaatgaataaagcactggcatatgctaaaacattgctgaatcttgaaaacaagacaagtgaaggaagccagtcacaggaggctacgtaacttatgagcccatttttgtgaaatattcataagaggcaagtcgatagagaaagaagtggatttgtggcgacagggtctgctggcaggtggaaatggagggtgactgcttaatgggtgcagagttccccctgaggtgataaaaacactctggaactagagagtgatgatggttacataacattgtgaacatacaaattgtcactgcattgtgcactttaaatggttacggtggtatcctttgtgtttatgtgtattttaccacaatgaaaaagaggctgaggaaggtattccaaaatcttttgtatagtaaactcctgagtttgcttgagaatctgcctatctgtcttttcttctcaggacatcatctcctacccagagcaaacctttgttcttctgcaagtagaaagccctctttcagaacattgtccaagatcagccaggcccaaccctcaaaatgactttctgtctttgacccaaatgctcaaatgcaactctggggctaatttcagtgggagtaagagattatccaatcaggataattcatttggagagaaaatgttttgcttaagtcagcaaagtcctttgctttcctaaaaa

SEQ ID NO: 22524 - DNA, 1029 bp, Homo sapiens
tcaataagattaacatacaaattttcatcagaaaccatggggttcaggaggcgttgggatgacaaatttaaagctgagaaagtaaaaggactatcaaccaagaattgtatgtctgcaaaactctccttcagaaatgatggagaaatcacgacattcacaggttaaaaaaagctgactgagatggtctcaaccctacaagacatatatatatacacacacacatatatatatttgtaattcctctcttgtttttcctatttgatttaaaagaaaatgtccatcgaccaatgaatggagaaacaacatatagttttttcctacaatagaatattatttggtcataaaatgaataaagcactggcatatgctaaaacattgctgaatcttgaaaacaagacaagtgaaggaagccagtcacaggaggctacgtaacttatgagcccatttttgtgaaatattcataagaggcaagtcgatagagaaagaagtggatttgtggcgacagggtctgctggcaggtggaaatggagggtgactgcttaatgggtgcagagttccccctgaggtgataaaaacactctggaactagagagtgatgatggttacataacattgtgaacatacraattgtcactgcattgtgcactttaaatggttacggtggtatcctttgtgtttatgtgtattttaccacaatgaaaaagaggctgaggaaggtattccaaaatcttttgtatagtaaactcctgagtttgcttgagaatctgcctatctgtcttttcttctcaggacatcatctcctacccagagcaaacctttgttcttctgcaagtagaaagccctctttcagaacattgtccaagatcagccaggcccaaccctcaaaatgactttctgtctttgacccaaatgctcaaatgcaactctggggctaatttcagtgggagtaagagattatccaatcaggataattcatttggagagaaaatgttttgcttaagtcagcaaagtcctttgctttcctaaaaa

SEQ ID NO: 22525 - DNA, 763 bp, Homo sapiens
tggtcctttgcctgcacaccagaggtgaggtgggaacagaggcagggactgcagtttggggtgatgagggatactcaagatggcggaggtgaactggacgcatggggttggggacaggaattcaggggacgcagaaggtgcatctggctcaccagaaatggctttctggacacattgggtgggggacatggtgcagaaggtgcatttggctctcaccagaaatggtttgctggctccatgtggcaaagtcggtcaggattaacgtgggggggacgagtttcctyggagctgggatctgtgttaaggagctggggtccttgtaaagctggggtctgtgtgcctgggggccaaggtgtaacccaccttgggttgcaggttggcctgaggacaaagctagtggggtaccccaaccaggggtggatggagcttatttggagaagtctggtcagtttaaagtgggtcaagtgaacggttcagatccatcgggggtaggggttcatgacattttaccatcagttaagtatttacaaacctaccgagagctctttgagagtgacttttttggtctgtttgtgggtcagttcaggctgcgtccgtccagacaggctcctcctcctggggctggggctgggtggggctggggagagaagccctcaccacctcttacctttctccttcctcctttacaggcatctcaggcagcgagggccacccctctcacccacccgcagaggaccgagaggaggcaggctccccaacattg

SEQ ID NO: 22526 - DNA, 763 bp, Homo sapiens
tggtcctttgcctgcacaccagaggtgaggtgggaacagaggcagggactgcagtttggggtgatgagggatactcaagatggcggaggtgaactggacgcatggggttggggacaggaattcaggggacgcagaaggtgcatctggctcaccagaaatggctttctggacacattgggtgggggacatggtgcagaaggtgcatttggctctcaccagaaatggtttgctggctccatgtggcaaagtcggtcaggattaacgtgggggggacgagtttccttggagctgggatctgtgttaaggagctggggtccttgtaaagctggggtctgtgtgcctgggggccaaggtgtaacccacyttgggttgcaggttggcctgaggacaaagctagtggggtaccccaaccaggggtggatggagcttatttggagaagtctggtcagtttaaagtgggtcaagtgaacggttcagatccatcgggggtaggggttcatgacattttaccatcagttaagtatttacaaacctaccgagagctctttgagagtgacttttttggtctgtttgtgggtcagttcaggctgcgtccgtccagacaggctcctcctcctggggctggggctgggtggggctggggagagaagccctcaccacctcttacctttctccttcctcctttacaggcatctcaggcagcgagggccacccctctcacccacccgcagaggaccgagaggaggcaggctccccaacattg

SEQ ID NO: 22527 - DNA, 670 bp, Homo sapiens
aaatttccttctataacttgaatcccagtacatcctatttgctcccagtgaaatcagcttgattactaccagtgtcagggacctcactgcctacaacgcaatcccttccatcttagtcatcctcttgtgagctctcttaggttgtatcttaaatgagtcacttttcttatgcccacagtagactgttaaatgaatgggcttcctgggtaccttctactcaacaattaaaggtcagaggaaggtcaggtggccaaggagaagtcccaggccaggccctcacatctcccggatttagagcagcatgttttaataagcatatgatttatgagggccatgtgcccagtcattatttgaaaatggtgacagtggctttcttcacgtcaactgagaggatgaatcccatcccccttttctgtttttctccatattgtgctccttttggagaaaggccacttcccaataaataagtaacaacaaatcacaaataaaataacaccgagtcctttccatcgtagagtcacacatgatttaccaggactgaaattcacaacctgcagcgtctgagtaaggggmggcagaggggacaagctcacggagccttcacattatctgaatccaaaatatgtgcctcgaagggaagggtttcgtttctattctcccagagaagaga

SEQ ID NO: 22528 - DNA, 589 bp, Homo sapiens
gatgggatcaccagacaacaagcctcagcgacacacagtttactcatttaacaagcctgcacatgtaccctctgaacctaaaatgaaagtagaagataaaataagacaagataaygatgtgcacaaagtatcaggaaataatattaagtaaaaaacacatctagacatacagctgtattttacggtatctcaattttacaaaacatgttctcacacaaaaacatatgtgagaacattttgtaaataatattattctacaagtgcaaacacatagtagaaaatgtatccattttgcaaacacaattattcaaataattcaaataattcaaatgtgtcaatattttcataagtatgtttaacttttacattagcatcattctataccagatgtgaaaggcagttttttattcattttaagattacttcctgccctcctgaaagttaatgatgttttatttttctagtggcaatgtataggggagaggcatggaagtcaatttgaaatagatttatattgtcaaagttcagaatttttagaagactttctgtatagcctggtgcaatatctcagtgtacttgactagaatat

SEQ ID NO: 22529 - DNA, 584 bp, Homo sapiens
taaggtgtcggcagggctggtccttctggaagctccaaggagaatctgttccttcctgttttcatcctcttgaactccttccttggcgcctgtttccaccttggtgtaaggaaccaccttaccacagtccagtgggactgtggcatcagcytctttcttctttgaccttgtcttcctcttagaccctgtgattgcatttagaacctacccagataatccagaataactcccccacctcaaaatccttaagtcagtcatgccctacaaagtcccttttgccatataaggtaacattcacaggttctggtgattaagatattaatatatttgggggggggggcactttcaagcctaccacagcgggtatcttttaataattgaagaagagcaggtttgtgtgagaggacgttattcgccaagtcggtcactccccaggagttctgagttgctggaattggttaagtgatctttaactagaggctgggaagggtgtgtgggtgggagcgaggatgaagagaggttgagctattcatgttgaaggtctaatgctctaaagatgcaaatctcaaatctcctaaggaagg

SEQ ID NO: 22530 - DNA, 584 bp, Homo sapiens
taaggtgtcggcagggctggtccttctggaagctccaaggagaatctgttccttcctgttttcatcctcttgaactccttccttggcgcctgtttccaccttggtgtaaggaaccaccttaccacagtccagtgggactgtggcatcagcctctttcttctttgaccttgtcttcctcttagaccctgtgattgcatttagaacctacccagataatccagaataactcccccacctcaaaatccttaagtcagtcatgccctacaaagtcccttttgccatataaggtaacattcacaggttctggtgattaagatattaatatatttgggggggggggcactttcaagcctaccacagcgggtaycttttaataattgaagaagagcaggtttgtgtgagaggacgttattcgccaagtcggtcactccccaggagttctgagttgctggaattggttaagtgatctttaactagaggctgggaagggtgtgtgggtgggagcgaggatgaagagaggttgagctattcatgttgaaggtctaatgctctaaagatgcaaatctcaaatctcctaaggaagg

SEQ ID NO: 22531 - DNA, 1214 bp, Homo sapiens
aagcctgcactggctggggaggagtgccccttgactttaaactgtgcatcccgaaacaggcctgtctccagctgtgtcagagcccctggggtggaattagttcactgaggtacctgcatagtgattacatctgccctcattttcttgtttctccggctgagccacacggcctgttgggacacgtcgagtcctgggaagccctcatctgtgtgattcacatgtcacttgtcactgttctctggctgtgccacgctttgtgtatgcaatcaaaatcccatttccttgcctcattccagcgagcctttgccttgctgtcactctggtcctgggccggggagggccaccttttctatttccrtcgtgccacctgccctgggttagacatagaccactttgctccatttacttagaatgatggaatggacctgggagtgatgacaccactttcttgtttttttgtttttgttttcttttttttttagttccccatttttagagaaatggcacaaaaccagtgggaaataccccaaattgcagataagccactaatgcaccaatcctggggccagacagactatgggcgccagcacttccctgagcctctctccccatcacgtctcggaaacggtgctggcaagccgtctggtctgttctttaccttacatttatattgactcctgtggatcggggtagggttgtggacagatagatgcttctatcagagagggatggaaccagaggtttctaaggcgatggtgtggctctagggttttacagaaagcatatttgaaggcagaagcatctgttagacagcaggagaacctggaacttgaatgctcatgggactcctgccttggctcttctctacacagagtcttggccttcaggagctttgtccttctcagggtggacagaggtaatgcagccatgggcgaaggctgggggaggggaacagggatgccaagccagctcctcatcccctccagtgaagacattgtggagtggactaagttaaagctggggctgccagcaggggcctgggtgctgggtttgtcttctggggccccagtctttccttattcctgaatcttgcctgaaccaggtatcggggcagatagtgtctgggcccggcaggtaatagcgctgagtgaggcaggtagaggtgcttcctcagggccaatgacttcagatcagccccctacctccagccctag

SEQ ID NO: 22532 - DNA, 904 bp, Homo sapiens
ctggacaacatagcaagactccatctctttaaaaaaaaaaaaaaaagacatcaaacaccagcctccagcacacttagctttgaattgaagatgactgagttagatctgtgtaccaaggcttccatattgtgatgcagaaaagttaaggagctgaattaagtaggttctcaaactgaaccccggacttcgaagctggttccacggttttataagggccacaagaggccatctagcccaaaacagctaactttccaaaccgaaactagttcagaggaaatcactgactcaggtcagctttttattaaggaaattaattttgtaccgtgagctctagaagccaggcatatgatattcagacagcactggattcagaactatgcagactaaggtcagtagatggtaggcaggtctatcttctgcagctgcagggtgcttgactccaattaaacatcaataccacatcaggagctcttatgccataaccgcccaacctctcccagccgagctgatcaccagaacctgcgcgaatctctccacggtcagccccacccagggctcaggctccgcccccgggcctccatagccccgcccaccgcccacccatccagcaccgcccttgttgtcatggtgatctccggctctccagggtgtccaggagtctctctgctgccagccccgcccagactycaggcaggttctcgttgctatggtgatcgccggtgcaagctggatgcttggacgcgccgctgccagtccaacgcagaccccgcccacgacgtcgacgattcgtgtagcccgcaggtcccgcgtggctctcgttgccatggtgatcgccgccgctggctcaggcggaccaggccgcgcggagccccagctttcacagccatcgctggtgagtcagctc

SEQ ID NO: 22533 - DNA, 520 bp, Homo sapiens
taataaattagaatatacaaacactgcttttccattgaaataaaaacctaaggggaaaccccatgtaacagagmccgtcagatttcaacaccccttctccacccaagatattgaagataggatcaaatatattgcaagatgtctgccacactcacaggctgttccgatgcctgcctgacacagccgccagtttttcctatgctccatcaattatttctttgttttgcctggatggtgcttgtaaactcctcaaggtgtgctcctgggcagttacgtgcatttgagatttttcccttctgatccctacttggctgtctgtggaccaaaactgatttgcaggcaagggaagactgctgaaaatttcatgacatttagatttttataaagcatatggtggtggctcaataagtttgcttaccttggattaaaacctattaacgttccagcattttcctctccgtgagattcatttctgactcgcttgtggtgacttgcagagcccttcattacagctcagggg

SEQ ID NO: 22534 - DNA, 520 bp, Homo sapiens
taataaattagaatatacaaacactgcttttccattgaaataaaaacctaaggggaaaccccatgtaacagagaccgtcagatttcaacaccccttctccacccaagatattgaagataggatcaaatatattgcaagatgtctgccacactcacaggctgttccgatgcctgcctgacacagccgccagtttttcctatgctccatcaattatttctttgttttgcctggatggtgcttgtaaactcctcaaggtgtgctcctgggcagttaygtgcatttgagatttttcccttctgatccctacttggctgtctgtggaccaaaactgatttgcaggcaagggaagactgctgaaaatttcatgacatttagatttttataaagcatatggtggtggctcaataagtttgcttaccttggattaaaacctattaacgttccagcattttcctctccgtgagattcatttctgactcgcttgtggtgacttgcagagcccttcattacagctcagggg

SEQ ID NO: 22535 - DNA, 523 bp, Homo sapiens
aggggagaaaggaaagtagctcagaatgagtccgtagaactgcatgggtacatccacctaatagtgaagaatacttccaaactccaggggccagaagagaagaaagagagaaaagtacccaggatagagctggccaaagggaagaggcgacagggaagggaaacrgctttcatgttcaagcagagggcagctgaagaggaaagagcacagggaaatatgatatactgcaaacaaaacagcaagaaaaatggagaaaagatgagagaaggaaggacagaaaagaagcaaaattcacagtgaacatagaggaaagaaatgagggtaaagcctaaaggtgtaaagatatgcctgacttccgagcttatctgggacaagtgttagcccacgggaagttccacaccggcctccccaccccgtaactgccttctttctaccaccggtgtggactcgatgaactggatctgccttctcacaggctgccctgaccattgagtcgtgcagtcaggggccagctggtcaagag

SEQ ID NO: 22536 - DNA, 592 bp, Homo sapiens
gaggtagcagggtcagaaaacgccctcctatacccgcacttcccttggcacttcccttacccccttccgtatcatttaaagggaccatgcttctcccttctcagcatttccgtatcagtttcagagcagtggatctgccatggtggcagggattccccaggattctgcctaagcggggtctgagactaactgggttctaggccccgaaccccctccactcccaggctccagtgacctggggtcagcatgaggcttgggaaggagtggctgtgttccatggcacaggtctgcccttacattggtggtctttgggctgcaccaggcaattggtgacggtgytgcacagggccatgaatctcctcattgtccagtagcccaagtaggttacgacagccctccgtctctggagagctgagtcctgacatctcgacccccgggacagagggagaggacgatggcaataatgttgcccctgtggcccaccaggcccgcaccttggcaacacacaccagaagtcatggcaagtgttcttataagaagaagagattaggcctataatcccagtgctttgggaggccaaaatgggaggatc

SEQ ID NO: 22537 - DNA, 592 bp, Homo sapiens
gaggtagcagggtcagaaaacgccctcctatacccgcacttcccttggcacttcccttacccccttccgtatcatttaaagggaccatgcttctcccttctcagcatttccgtatcagtttcagagcagtggatctgccatggtggcagggattccccaggattctgcctaagcggggtctgagactaactgggttctaggccccgaaccccctccactcccaggctccagtgacctggggtcagcatgaggcttgggaaggagtggctgtgttccatggcacaggtctgcccttacattggtggtctttgggctgcaccaggcaattggtgacggtgctgcacagggccatgaatctcctcattgtccagtagcccaagtaggttacgacagccctccgtctctggagagctgagtcctgacatctcgacccccgggacagagggagaggacgatggcaataatgttgcccctgtggcccaccaggcccgcaccttggcaacacacaccagaagtcatggcaagtgttcttataagaagaagagattaggcctataatcccagtgctttgggaggccaaartgggaggatc

SEQ ID NO: 22538 - DNA, 1459 bp, Homo sapiens
aggaaggtttaatatattttaacaaaaatgtccactatctgagataactaaacattatttcctcaaaagagaaacatttagtatgcaaaacttaatgcaaggaaaagtacaaattttcctgaaaaagattcacgcatatgtggcataaaaatgggccaaagcctagtaaagtaccgggcctagaagcttattttaatcatttctcgataaatgaccatatcaatctagttttatgtagtctaaacaaattttctaagcccgtaggaagttcaccatcttttccacatttactgaggtaaatgcaccacggaaaaattaaagtagcctgaggaagaatgatatagttcaacattatttagtatactcccatttggatactacctgccttgcctcatactagtgactatgagtgaattattaagttcttatattatatgaacttggtataaaggcctttactctttcctgtattaaatgtaaaatgcatgcttgctagactggtcctcatttgtcaactgtccaagtgcttacccaatgacatatctccaagtctacctttcctgttcctctgccattgaactagctctagattgaatcattgaatttttctagattgctcgtatgtttttatctcaacattttattggtctgttactgattttctgtctctcccaggatcctagaatgccccaccccaccttgcatcttgcccagtttctcaactcttttgaatttaaaattgcacgattaaaacstagcaacgacataaaattgtcaaatggcttaaactagggagttttggtttctgagaatgagaaaaaacagaaatgttcttaaagaagtgggttttggttttggagaaagaatgggatggaatacacctttaacagaagtgtaaaaagatatcgtagtttcttccaggtatttctgtggtagtgataagaagatcaggtcagatgaccaaaggtgtgcacagagggagatgcactagggatgggaaccctgctacttgtcagaggatactgaattgaagagagaggaagataggctggagttgttctgtacccagagagatcactgtggggaaccttcataatatggtcctaatttagtttcattggtgagacccatgaaactgtacatagaggctggaagtaacttatggaaagataaatgatttaataaggaatcaagtgtttgtataaatcaaactgaatttctacattttttcagaagtgaatattttttctgtaaggtaggatgttcaactaggaatgaatgttcggataggatgaatctaggaatatccaattctgttaagagttccctgttagaaagtgcatgtgaatgtatttgtgtttcgatgaactttaaatctcattcagaataaccatacatctctgtaatctttatccagaaataatgccattgaaattcacaaacattacagaaactatat

SEQ ID NO: 22539 - DNA, 1459 bp, Homo sapiens
aggaaggtttaatatattttaacaaaaatgtccactatctgagataactaaacattatttcctcaaaagagaaacatttagtatgcaaaacttaatgcaaggaaaagtacaaattttcctgaaaaagattcacgcatatgtggcataaaaatgggccaaagcctagtaaagtaccgggcctagaagcttattttaatcatttctcgataaatgaccatatcaatctagttttatgtagtctaaacaaattttctaagcccgtaggaagttcaccatcttttccacatttactgaggtaaatgcaccacggaaaaattaaagtagcctgaggaagaatgatatagttcaacattatttagtatactcccatttggatactacctgccttgcctcatactagtgactatgagtgaattattaagttcttatattatatgaacttggtataaaggcctttactctttcctgtattaaatgtaaaatgcatgcttgctagactggtcctcatttgtcaactgtccaagtgcttacccaatgacatatctccaagtctacctttcctgttcctctgccattgaactagctctagattgaatcattgaatttttctagattgctcgtatgtttttatctcaacattttattggtctgttactgattttctgtctctcccaggatcctagaatgccccaccccaccttgcatcttgcccagtttctcaactcttttgaatttaaaattgcacgattaaaacctagcaacgacataaaattgtcaaatggcttaaactagggagttttggtttctgagaatgagaaaaaacagaaatgttcttaaagaagtgggttttggttttggagaaagaatgggatggaatacacctttaacagaagtgtaaaaagatatcgyagtttcttccaggtatttctgtggtagtgataagaagatcaggtcagatgaccaaaggtgtgcacagagggagatgcactagggatgggaaccctgctacttgtcagaggatactgaattgaagagagaggaagataggctggagttgttctgtacccagagagatcactgtggggaaccttcataatatggtcctaatttagtttcattggtgagacccatgaaactgtacatagaggctggaagtaacttatggaaagataaatgatttaataaggaatcaagtgtttgtataaatcaaactgaatttctacattttttcagaagtgaatattttttctgtaaggtaggatgttcaactaggaatgaatgttcggataggatgaatctaggaatatccaattctgttaagagttccctgttagaaagtgcatgtgaatgtatttgtgtttcgatgaactttaaatctcattcagaataaccatacatctctgtaatctttatccagaaataatgccattgaaattcacaaacattacagaaactatat

SEQ ID NO: 22540 - DNA, 658 bp, Homo sapiens
tggccctcagatgcttcttctcacctggatgcatgttctggatgagcaacagcagcaattactccagggctgaaagcagggcaggagggcatgacccaaggctctcaactttaaacgcagagttctggccaggcacgatggctcatgcctataatcccagcactttgggaggctaaggtgggaggattccttaagaccaagagttcaaggccaacctggccaacatagcaagactctgtcttacaaataatttaaaacaaaaacaaaaacaaaaacaagccyggtgtgatggcacgcatctgttgtcccagctacttgggaggctgcaccaggaggatcccctgagcccagcagttcaagactgcagcaagctatcatcacatcactgcactccagcctaggtgacagagcaagacctgttaaaacaaacaaacaaacactgagagtttctctacacttgacatctaaacaaactttttccaaatgttcaaatgtaaaaattattcacttttctgtcaaaaaccatgaaagtgtttatacgcttgaactcagcaatcctactcttggatatttaagaattaattcaacagaagaatgaaactatgtacaccgatttggtcattgtagtgttaagtataataaggataaaaagcaaaaa

SEQ ID NO: 22541 - DNA, 814 bp, Homo sapiens
tgtgatttctgtctgcatgggacttgtctgtgctttgattactgctctaggatttctgtgggattcttctgtctcttattgactcacacagccttgtaataaatctccattacttgagacagcctgaataagtcactattgctaacatactcatattgtcattcattaggacctccaatttctgtggaaccttacattactctaaatctgcagtatttctcaaagtgttgtgtgaattccctacctcatacaataatttagagttccagtcatctctgaattattgaatccaggggtggagcacaagaatacacatacttttaaatcaataaactttatttttttaattttaaattaatttttttttaagagacaggttttcactatgttgyccaggctggcctcaaactcttgggctcaagagatcctcccacctcagcctcccaagtagctgggatgataggtgggcaccactatgcctggctagtaaatgttattatttattattattttttgagatggagtctcactctgtcacctaggctgtaatggagtggtgcgatctcacctcactacaacctccacctcctgaattcaagcgatcctcctgccttagccttctgagtagctgggattaaaggtgcctgccccctcgccccactaatttttgtatttttagtaggtacagggtttcaccatgttggccaggctggtctcaaattcctgaccttaggtgatctgcccaacttggcctcccaaagtcctgggattacaggtgtgagctaccgtacccagccaaactttattttttaga

SEQ ID NO: 22542 - DNA, 546 bp, Homo sapiens
caataatgttttaaaaccagtagacaaatttttaaataaaggaaacctttgattttcaaaaacaaaaagcaatcaaacaaaaaaatcaatgtgcctactatatgtaagcatttgtgtgctggctctgaagatatataagtctctcttctcaaagggctaataagctaattgggtagaaacagattatgaatgatacatcatcataacttagcatatggtaaattctaaacagctgacacagaagttcaaagtgataatgcaaacattcaggcgggaggtcaaatgctgagggctgggtaggtaagtgtataagyagcatttaataaacatgtagcacatcatttcattttattcatccaatattccaaggtacgctaagcaggaaaagcaacttgtctaaccataaccaaatctacaggcatctcaggttaaatactctgtgcattcagcagcaactagaggtgggctgaataaatcccaaactctctcattgcctacaaagccctaggagatctagcccttgcctgattgttccacctcaccttg

SEQ ID NO: 22543 - DNA, 580 bp, Homo sapiens
ttgagaactagttattgtttatcttgacmacatgcaggtagtgggttgtatcctgcttggttatataaaaggatgagacttctgtctttgccatctcatagaggattgcctgtgatgtgcattacattctggtttaacgcttattgaataataaatgtgttttctttctctgctttctcaatagagaggatttctgggctgggaggagattttgtttttaactgtatttccctaccatcttattcttccacatgcacagtccttagcagtgtttctcatgtataaaagattttctgttgatttctaccattccttttcctattttcacacatctaagagcaagaaggatttttttttttttttttagtttgtggggaaaaaggtaatactaattcaaaatataaagccatagtcagaaagtttgaaaatctttgcaaactagattttattaataatgttaaacggtgagggtggggaaatatgttcttagtggataccaaggggtaaaaaagaagggaaggaggaagggagctacatgaagtaggaattctggaaggcagaacccaagtagtcatacgga

SEQ ID NO: 22544 - DNA, 580 bp, Homo sapiens
ttgagaactagttattgtttatcttgaccacaygcaggtagtgggttgtatcctgcttggttatataaaaggatgagacttctgtctttgccatctcatagaggattgcctgtgatgtgcattacattctggtttaacgcttattgaataataaatgtgttttctttctctgctttctcaatagagaggatttctgggctgggaggagattttgtttttaactgtatttccctaccatcttattcttccacatgcacagtccttagcagtgtttctcatgtataaaagattttctgttgatttctaccattccttttcctattttcacacatctaagagcaagaaggatttttttttttttttttagtttgtggggaaaaaggtaatactaattcaaaatataaagccatagtcagaaagtttgaaaatctttgcaaactagattttattaataatgttaaacggtgagggtggggaaatatgttcttagtggataccaaggggtaaaaaagaagggaaggaggaagggagctacatgaagtaggaattctggaaggcagaacccaagtagtcatacgga

SEQ ID NO: 22545 - DNA, 580 bp, Homo sapiens
ttgagaactagttattgtttatcttgaccacatgcaggtagtgggttgtatcctgcttggttatataaaaggatgagacttctgtctttgccatctcatagaggattgcctgtgatgtgcattacattctggtttaacgcttattgaataataaatgtgttttctttctctgctttctcaatagagaggatttctgggctgggaggagattttgtttttaactgtatttccctaccatcttattcttccacatgcacagtccttagcagtgtttctcatgtataaaagattttctgttgatttctaccattccttttcctattttcacacatctaagagcaagamggatttttttttttttttttagtttgtggggaaaaaggtaatactaattcaaaatataaagccatagtcagaaagtttgaaaatctttgcaaactagattttattaataatgttaaacggtgagggtggggaaatatgttcttagtggataccaaggggtaaaaaagaagggaaggaggaagggagctacatgaagtaggaattctggaaggcagaacccaagtagtcatacgga

SEQ ID NO: 22546 - DNA, 182 bp, Homo sapiens
ggaaagcagaacctttgtctccctctaattgctcctaagcctcacgctcccttgccccgcstgtcctgttgcttccctgatcttctccgtgacctgtagctaaaccttccaccagcgcttgagaacttaatttgaaccggatcctttcccagacccctttcttcttctcctcctcctcctcc

SEQ ID NO: 22547 - DNA, 528 bp, Homo sapiens
tggcttatggcatattgttccttaagtcctgcatttgaaacacactgagtgaatcagcacatttgatcatcttttaactacagtagatgattatacattaaaaatgcattaaccatccaaatacatcttttttawttatttatttatttatttatttttatttattttgagacggagtcttcttctgtttgttgcccaggctggagtgcagtggcgtgatctcggctcattgcaagctccgccgtgaccttggacatatccctaatattttcaagcctcagtttctcgtctttaaaattagaataaagataccaaactcctggggttttgtgagagtaaaatgagacgatgtttgtaagagactcagcgcagtgtcagtatctaccatgtgctatgtactctgcgttttctttctttcttttttttttttgagacgaagtctcgctctgtcacccaggctggagtgcagtggcgctatctccgctcactgtaagctccgcttcccgggttcaagccattctcctgctt

SEQ ID NO: 22548 - DNA, 528 bp, Homo sapiens
tggcttatggcatattgttccttaagtcctgcatttgaaacacactgagtgaatcagcacatttgatcatcttttaactacagtagatgattatacattaaaaatgcattaaccatccaaatacatcttttttaattatttatttatttatttatttttatttattttgagacggagtcttsttctgtttgttgcccaggctggagtgcagtggcgtgatctcggctcattgcaagctccgccgtgaccttggacatatccctaatattttcaagcctcagtttctcgtctttaaaattagaataaagataccaaactcctggggttttgtgagagtaaaatgagacgatgtttgtaagagactcagcgcagtgtcagtatctaccatgtgctatgtactctgcgttttctttctttcttttttttttttgagacgaagtctcgctctgtcacccaggctggagtgcagtggcgctatctccgctcactgtaagctccgcttcccgggttcaagccattctcctgctt

SEQ ID NO: 22549 - DNA, 528 bp, Homo sapiens
tggcttatggcatattgttccttaagtcctgcatttgaaacacactgagtgaatcagcacatttgatcatcttttaactacagtagatgattatacattaaaaatgcattaaccatccaaatacatcttttttaattatttatttatttatttatttttatttattttgagacggagtcttcttctgtttgttgcccaggctggagtgcagtggcgtgatctyggctcattgcaagctccgccgtgaccttggacatatccctaatattttcaagcctcagtttctcgtctttaaaattagaataaagataccaaactcctggggttttgtgagagtaaaatgagacgatgtttgtaagagactcagcgcagtgtcagtatctaccatgtgctatgtactctgcgttttctttctttcttttttttttttgagacgaagtctcgctctgtcacccaggctggagtgcagtggcgctatctccgctcactgtaagctccgcttcccgggttcaagccattctcctgctt

SEQ ID NO: 22550 - DNA, 528 bp, Homo sapiens
tggcttatggcatattgttccttaagtcctgcatttgaaacacactgagtgaatcagcacatttgatcatcttttaactacagtagatgattatacattaaaaatgcattaaccatccaaatacatcttttttaattatttatttatttatttatttttatttattttgagacggagtcttcttctgtttgttgcccaggctggagtgcagtggcgtgatctcggctcattgcaagctccgccgtgaccttggacatatccctaatattttcaagcctcagtttctcgtctttaaaattagaataaagataccaaactcctggggttttgtgagagtaaaatgagacgatgtttgtaagagactcagcgcagtgtcagtatctaccatgtgctatgtactctgcgttttctttytttcttttttttttttgagacgaagtctcgctctgtcacccaggctggagtgcagtggcgctatctccgctcactgtaagctccgcttcccgggttcaagccattctcctgctt

SEQ ID NO: 22551 - DNA, 594 bp, Homo sapiens
gaacctctgtaataaaaggtccaattcctaacccgcaataatattctttttttttttttttgagacagagtctcgctgtcgcccgggctggagtgcagtggtgcgacctcarctcactgcaagctccgcctcccaggttcacgccattctcctgcctcagcctcccgagtagctgggactacaggcatccgccaccatggccggctacttttttgtatttttagtagagacggggtttcactgcgttagccaggatggtctcgatctactgacctcgtgatctgcccgcctcagcctccaaagtgctgggattacaggcgtgagccaccacgcctggcccacaataatattcttaaagtcccctttcccgcctcctcagttctcccacaattcccagtttccccagaacaaaccccaagagatttctctgcccttccccccacccccaggcagagatgtcttccaactcttccccagcactgtaactctccactctggtcaagtggactccaccttggggaaagaatgtttgtaccgggcaccaaactagactttggagatacactagttcttagtatctgctagtgtgataat

SEQ ID NO: 22552 - DNA, 1341 bp, Homo sapiens
tttcttgcttcttcatgggtcccatgtacaaaaaatggcagtgttagcatgatcccagggtggagttttcagccctctgacattaaaaggtgaagcagaggacatgaaaactygctctgtgcatcctctgtacgctggccagaacctctccatcgtgggtggtctcttatcaggcaagaaaggagaggttgatatcagtggtggaggctttgaaagggctggtttctgttaaatccttagggaagaaagcctcatcatggttagcaaaggagggggtataacgatgtgtatcttaaccccatcatcccatcctagcaaagctgagaactcagttttgaaagttactctggggtcccctcagccaagagtgggtctgttcagtcagttgggagcttagaatttaattttcatttatcaatgctaatgggaaagagtacgctgtcttcatggcagctgaatttgcaagaaactccttggatggggttaatggcagctgtatttttctgggagctgtgctttaattggataaagtaagttctggtaagatttcttcatcttcagtatctcaaatgttttcatttaaataatctttataacaacttttgatgtctgagtggattcccacacagtcatctattgtaagactttctgattccttttttttcctttggtcattatgaatagggcttctgtaaataactgcatggtagcttttgatgggaaataacatcaaagtagttgtcaaaatacctaggaatgttatttttggattgtaaggtgagacttgtttagctttggaaaaaaatgaccaacttgtaataggggaggaaaaataattttctgtttttggaattcttagatggaacgctctgtaaaaactgacagattaaaatgagaaaaagagaaaagtttaaaaacatgtatatcttatggttacatgggagatactcagggaaaaatgagtaaatctccaacaggtggctttcaattcaagcataaatactatcttcaacttaaagaaagaagatttgaggtgcagtagtggggagttaaccagcaaaagcacattagacaagggtaaggttcgttatacagacttaagtccatgcattctccattgataagactcttcagtgatttagttatccttctcttcttggtgtcgagagaggtagcttttaaatggtgatttcctttatagatgtaaattttccttacacaagtaacttctactctattttcacaacttcctttgttagcatttttttttttcaaaataattagcttggaataattcttaagccaaagggacatattttggggttgcatattctggtttcc

SEQ ID NO: 22553 - DNA, 1341 bp, Homo sapiens
tttcttgcttcttcatgggtcccatgtacaaaaaatggcagtgttagcatgatcccagggtggagttttcagccctctgacattaaaaggtgaagcagaggacatgaaaactcgctctgtgcatcctctgtacrctggccagaacctctccatcgtgggtggtctcttatcaggcaagaaaggagaggttgatatcagtggtggaggctttgaaagggctggtttctgttaaatccttagggaagaaagcctcatcatggttagcaaaggagggggtataacgatgtgtatcttaaccccatcatcccatcctagcaaagctgagaactcagttttgaaagttactctggggtcccctcagccaagagtgggtctgttcagtcagttgggagcttagaatttaattttcatttatcaatgctaatgggaaagagtacgctgtcttcatggcagctgaatttgcaagaaactccttggatggggttaatggcagctgtatttttctgggagctgtgctttaattggataaagtaagttctggtaagatttcttcatcttcagtatctcaaatgttttcatttaaataatctttataacaacttttgatgtctgagtggattcccacacagtcatctattgtaagactttctgattccttttttttcctttggtcattatgaatagggcttctgtaaataactgcatggtagcttttgatgggaaataacatcaaagtagttgtcaaaatacctaggaatgttatttttggattgtaaggtgagacttgtttagctttggaaaaaaatgaccaacttgtaataggggaggaaaaataattttctgtttttggaattcttagatggaacgctctgtaaaaactgacagattaaaatgagaaaaagagaaaagtttaaaaacatgtatatcttatggttacatgggagatactcagggaaaaatgagtaaatctccaacaggtggctttcaattcaagcataaatactatcttcaacttaaagaaagaagatttgaggtgcagtagtggggagttaaccagcaaaagcacattagacaagggtaaggttcgttatacagacttaagtccatgcattctccattgataagactcttcagtgatttagttatccttctcttcttggtgtcgagagaggtagcttttaaatggtgatttcctttatagatgtaaattttccttacacaagtaacttctactctattttcacaacttcctttgttagcatttttttttttcaaaataattagcttggaataattcttaagccaaagggacatattttggggttgcatattctggtttcc

SEQ ID NO: 22554 - DNA, 643 bp, Homo sapiens
caggatggcaggaggggacagggtcagggcgctgagggtcagatgtcggtgttgggggccaaggccccgagagatctcaggacaggtggtcaggtgtctaaggtaaaacagctccccgtgcagatcagggcatagtggaaaacaccctgacccctctgcctggcatagaccttcagacacagagcccctgaacaagggcaccccaacacctcatcatatactgaggtcaggggctccccaggtggacaccaggactctgaccccctgcccctcatccaccccgcaggtcagcccaaggctgccccctcggtcactctgttcccgccctcctctgaggagcttcaagccaacaaggccacactggtgtgtctcataagtgacttctacccgggagccgtgacagtggcctggaaggcagatagcagccccgtcaaggcgggagtggagaccaccacaccctccaaacaaagcaacaacaagtacgcggccagcagctacctgagcctgacgcctgagcagtggaagtcccacaraagctacagctgccaggtcacgcatgaagggagcaccgtggagaagacagtggcccctacagaatgttcataggttctcaaccctcacccccaccacgggagactagagc

SEQ ID NO: 22555 - DNA, 580 bp, Homo sapiens
ttttaaaagaacaagtttgattagatatctctaagaaaaagagaatatatgtatttttcaaactttccaaattaaattaaccasgtaggaaatttgaatttgtagcaaattctaaagaatatgtcatatatgctacacatatttttcttttaaaaaaatgttttttctgtctttgctatctgttcccactgttttttttatatatatatatatttttacacacaggaaggggaacatcacactctggggactgttgtggggtggggggaggggggaggaatagcattaggagatatacctaatgctaaatgacgagttaatgggtgcagcacaccagcatggcacatgtatacatatgtaactaacctgcacattgtgcacatgtaccctaaaacttaaagtataataataataataataaaatatttttaacataatacattaaataaaaaaattaacaattaaaatacaactaaaatatctttttatggaaactttaaaagacttatttagaaaactgttggctaaagagtaaataaaaatgaataataaatattataagtgaacaatgagaaaacag

SEQ ID NO: 22556 - DNA, 583 bp, Homo sapiens
ggtactaaagtctccatagctgccctgacactttcccagattctgagaatttatgagtagaccagataatccttacattgaagtgttaataacttgtccagtatacagaatggcttttcacttctgggctgaagattggaaaggagaaaaaccactgttagaaatatgttttggtggaggaggggagacattacaaggaaaagtgtcttcttccccattacaaactgccaggtgctagagcatcatactttactttgcttaccccaatgtrtacccaggcctgccgctgccaaaaaaagagtgaaaataaaacagaagccctagcatttctctagtctaaacaaggagctccttgatattctctgtgaaagtccactaaattccctgtaagtgagcccagcaccaactctccctgcagctgcacagccagacatctgggccagagctgatggcataattaggcctcaaaccaggtgtaagtgcaatcagagtggaaaatatgtgaccacatccttggtgaaccttgtgctcctccctacaccgaaaggaggcacgctgattgtatgtgagtgtttcttgaaaa

SEQ ID NO: 22557 - DNA, 1808 bp, Homo sapiens
tgaattaaatgggataatatatgcaaagttcttgacaaatcttgcctattatcatttcaaatattcctatcaaaagttttaatattttccagagtttccrtaaaaagtatgtagacctcatttctagtctgaaatgagcatttttctaaagataaaaaggaattcaacaaggagaacaaggttagtaattagatgcaatttttttttttttttgagacagagtctcgctttgtcaccctggctcccaggctcaagtgcagtggtgcaaaaatggttcactgcagcccccacctcccgggcccaagcgaccctcctgccccatcctcaggcccccaagtagctgagactacaggcatgcatcaccacacccgactaatctttgtatttcttgctggtctccaaactcctgagctcaggagattctcccacctcggcctctcaaagcgcagggattacaggcgtgagccaccatgcccaactagtaattagatgcattcttatccaccccaaaaggtgattcttgctctaaatcatatatcattccagacctgaaatggtcagctctctagttaacttaagaaaaacgcttttattctgatattttattctagtcttgaagatcattgaggacagagaaactacagcttagcacagctcctgccccaaagttaatgcttggagagttaacacaagttttgctgttgtttttgttttgttccaattccagtggggttttttagcctgcaatggtaagaagtagctctttctctacccaagtagaagctcactctaatataagcccactttttggatctatctcccagccagagagagggcacctgatgctcctgagataaattcttcatgtttttgaaagacatgtggcccatgatcttttcccttgaaaagattccctttactcactattctgtagaaagtatctaccaaaaggaggaaatggcagacagcagcgacaatgtctccatcacttcaaacatcccccccagatttcttgtccacattcatgtttgattatagcaaagtccaaggctcactttcaatgagaaggaaaatgaaggaggctgagggagtggcaaatagaaatctgcaaggccaaagacagagaaagcctgggcctccagccttctcttccaatgatggcaatctctagcccctgccgccatggttaagaagctggttggggtggcagttgactcttatatttaaagagcaaagctgggagagggaattcagatgagggggaagagcttaaagtcaacatgaagaagcgtcacttgagtgtgcaacagggtgcttggtccccagagaagtttccacagcatgtgggaaactttctactgccatccttcaagggtagaaatcagggagggatgttctcctacattcatttattcatttattcactcaaaaatgtttgaatacctgctatatgccaagcactatggcagccctggagataaatgcccgcctttcttgggtatttcttcatagcagcatgagaatgaattaatagagtaaactggtactgagggagtggggcgctgctataaggatacgcaaaaatgtggaagcaactttggaaatggataacaggcagaggttggaacagtttggaggtctcagaagaagacaggaaaatgtgggaaagtttggaacttcctagagacttgctgaatgaccaaaatgctgatagtgatatgaacaatatggtccaggctgaggtggtctcagatggagataaggaactttttgggaactggagtaaaggtcactcttgctatgcaaag

SEQ ID NO: 22558 - DNA, 577 bp, Homo sapiens
tgcttatgctgtgctcccggctgtctggctgcacacacaaccgcagagcatgccctctctggctagggcagaaagaaattgaagcctcttaaattttgccccccccagctttgctcccttgctaggacttccaggccatgactattgaagccatagggcaggattacttcctcaagaggcgttagtggaaacagatgtgttgaggaagcctctttcttttcaactgtgccctgagcacatcagatggagtcctcttcatagcacaaaacaacttggtcagattcttagggtttgaccacagcaccctaacagcctggccgtgcattaaggaccccaaagagaaggatctgctttgccagagagctgactcttctgtattttacagacaattctgaattcaatgtcaacatcttagacatctcagtacagacagtaaagagttaaaatatgtctatragaaacagcgccagaccctgaaattgaaagctctgtgcctccctgcgtgcagtcagttccacactgtcctctctcccagttctatttaataaaaaaaacacatgagtgaaatttagggaaa

SEQ ID NO: 22559 - DNA, 626 bp, Homo sapiens
agaaaacctaggaaatactgccttttactgtgccctggttgttatttttatcctttctcaagcataaaaactatatggaacagtgtcaaccagaatgttgatttcaaaaacatttacttctaacctaacacctaacagctattataatttttatacattcccttctagtctttgtccataggcacagtttaataatggtatacataattttgtattttcttttttccataagagtgaatctcatattttccatgtttctgtgtatattttatattttaagattattttgtatttaaaaatcatacttatatttatcataaaaattttaaattttaaagamaaatttaaaagttgaaacctaaaattacttataacttcattacctagaaaaaaaacaccattaacatgctgtgatgtttcttttcactttctttcaacgcatacatgtttttacatcactgagcttttattatagataattttgtatcatgcttttataaattaacattatttcataagcacttttataaatacttcataaacatgttaatgactgaaataatattttattattcagctaaatataatttgcataattcaccaaatcgctcccactacaggactta

SEQ ID NO: 22560 - DNA, 558 bp, Homo sapiens
gggagggaaagcatttggacaaatagctaatgcatgtagggcttaaaacctagaagacaggttgataggtgcagcaaaccaccatggtacatgtatacctatgtaacaaacctgcacgttcagcacatgtatcccagaacttaaagaaaaatgagaataaaaaaaaaattggtgtatgacactccagctctcacccagccamagtgacaaaaaagtcatgacataaaaattgcatagacaatttacacaaatcataagtgtgccactttctaaattatcaaaaaataaacacaatttgataaccatcactcagatgaaaagtaatagaatattaccagaattttatctaaccaaaaaaccctcatcaccagttcccaatttctattattacttttctcatccttgagttaatgtctcagcttctaacaccatggattctttcagcctactcacctcctgaatggtgagctgtgctcttctatggatgtcttttttcactcagtgtcatattggttagatgcatgtgtattgttttatgcagaagtaattcactcatct

SEQ ID NO: 22561 - DNA, 554 bp, Homo sapiens
gaaggattcttcctttttcttaagaaaaatctatacctagagaagagtgtctcagtttttcagttttctcacacatttttatttattttctggctagtattttgaatataatggacctagatgcagttttgtcacaygtttttatttattttctggctagtattttgaatataatggacctagatggtaaaaagttttatgtaactatttcacatatgactattttccaaagtgaactcaaattgttactttatttttgaaagttgaaatctgtaatatcattcgtactaacactatgctgtatgtatgaaacatggttaaaatgtgatagaatgctcttgcttttaatatcatttttgtcttttccttagtattgccaatcagatagtgatcactaataggatacatttatatagtattccaaaatggtggcttctttaaaccaaatagacgtttaattcaaactaatcactgaaatagattggctgtgaaattatagttaaattatcttaaatgttgtcacaagatgcaaaactacattatagctgcataat

SEQ ID NO: 22562 - DNA, 520 bp, Homo sapiens
acctcatgatctgcccgcctcggcctcccaaagtgctgagattacaggtgtgagccaccgcgcattgctgccttttcctttttttgagacgaggtctgtctctgtcatacaggctggagtgcaatgacgtgatctcaactcactgcaacctccacctcccgggttcaagcagttctcctgcctcgtcctcctgagtagctgggactacaggcatgtgccaccaggccccagytaatgtttatatttttagtagaaacagggttttgccatgttggccagtctggccttaaactcctgacctcaagtgatccacctgcctcggcctcccaaagtgttgggattacaggtgtgagctaccacgcctggctgatttgggcatttctcatgactgaccattttggacacagattgtggcaatgttaatgtgcctttttcctcatccctcactcccttttcatactgtcttgtgctccagatccagctggggaaaatcatgaaacctaatacatttgggaggtgg

SEQ ID NO: 22563 - DNA, 534 bp, Homo sapiens
ggagacacgccccttctgcagccatggggaggcaaggacagcgatgtctgcaaaccacacaaatgcctgctatttgtcaacttcagcaacacccactaaagagccaggactttgacctccctctagctcgtgggtttctgtcctccctagctatcctcattctgagaggttttcctgggttttactgmagcttgtaaaatgttagtccttttgctccattggttttcagataagaatcactccctctttcccccaaagaatgctttttataagtagattttttttttccactggacaaggcaacatttagtccctttagaaagaaaagaaaagatgtattgcctttaaaagtgtttttaagctacagatgaggtaggttgaaattcttgcatgcacgactcttagtctgtggttaatgcgcccatcagtgatgtaaagacaaggtccctgcagctggagaccatgcagtgctggagtcagagttctaaaacaatgcctggcttggtgcaaaggggtcttgctttgacttgccct

SEQ ID NO: 22564 - DNA, 2119 bp, Homo sapiens
ttgtagctttttcttcgcatatcagggatgaaaaaatatggctcaggagctgtcttggctggcatgaggggcagatgttcagattgggtgtctacattttaagaggcgtattctattcgctccttcattctcctctttcccacatactcttgatctttctcagactcggcttctgggaaaaaaaccaggggcccacagatatgcctggagaagggtgaggatggactagaggtgcagagacggggcgcaccacagcagagcaccaaaagattcctgggcacttttacagatactcagaccccatcccagacctggaaagtcagaaattctggggtctatacccagggatctgtgctttttcaaagcttcccaaagtgattctgatcatcatcctggtttggagactcctgccctgggggggttgtctctgcatttcatccatggacttgacagagatgctcaccatagctgaagcttgctctgtgatgtgatccaactgaggaagcaatgctgggactcacagatatttgagtaaagagagaccatgaaagagacacagactgtcttactcaatggcgagcagacagtgcaggcatccattcagtgcctatctaatgtgaacctactatataccaggtgcttttctagtgctgggcccatagcaacaaacaagacagatgacatcccagatgctgcaataatcagcaaaacatgctgtcgctccacgaggcaggggtttttgttttgttcacatttgtatcccaaagccaagacggttcctgtgtagaaggcatttgttaaagaaatgaagaaggtgtttccagtggagacgtgtgtgtgcaatggaggaaagcagaacaaagcaggaggcaagaagtctggggtgagaaggttgggaggagccaggcccacaggaaggtgcaggtcctgagcctggaaacagggcgaggggccatcgctccattctgaccagcagaggcaaattcatccttgatatatagatccaggaacaatttaggaagctgcccgcctatttacttccaaggcatgctccgagcaattagcatccaccaaaggttctgcggattaaaacattcctggaaaccttgctgtccccatggtaaatatgctcaccctctcttctagttaagggctgccatgtggcctctgctattctaggaccccatccgtcaccataaccagcctacagagagcagctggcacagacctcttcaggatgcgggggtctcctcacttctccatgcctcgggaagagtctgtgggagctctctgtgaatgtagtgatgtgtgtgtatttgtgtgtatgtgtgcatatgtgcatgtatgttgtagtccaatatttctattttcctaagcctttgggttcatcttctacagtattccagggaagttctggcatctcagcctcattaaaaacaggtcaccattgagttccaatttcagccagccagccagccaaccagtcacgtgttagagccacttccatctgcataaaataacgtattaaatctggaatctctcagcaatgcaccatgattaaaatgttaagaccaactcagtgttacatttcctgctccttagtcgaacatcattagatcctcatgcatgtttcttggttttttgctgatataaataagcaaaatcttgcaatgattttcaagtataagccttgtcctcccagtcacactttgtgtttgtgtccctggagcaggctgagatctgactttagatatgggaacaaggggtggttttgctatttgctttatggaacggttatcactaaccatcaggaaaaggacactttctaattctactattatctcactatgtttaatatgcagcagataggcagcaaagaatagttcctgtagttattcctcttagcattccattatacatagcagtggctcctgcctggggcgattttcctcctgccccaaggaaattgtcaatatgtgggtacaattttggttgtcataacctggggcrtatggagggatgctgctggcatcttgtgagtagaggccagcgatactgctaaacaccccacaatgcacatgacagccctccaacaaagaattatcctgccccaaatgtc

SEQ ID NO: 22565 - DNA, 1061 bp, Homo sapiens
attatgttgaccagcatctcttatataaagaggaaatgagccctgtctccttggagctcacttcattagaccatatgatatcataagagacacatcacccatcagttttctctttgcttttactgttaggaaactcacatctatgtttgagctcaatcatcagagagcttttctcactatagtatttctttgtatgattctacctccctcttgattccacatgaaattgccaatacttagctgttttgacttacaaaagtagctatttcatacgtcttaacataatataaacttttagaagtttagatgagatagccatctgcttgtaatgtctcatttattttagttactctgacgggttgaatttaaaattacttaactttttgtctggaattttgtgttgacccctgtagcaactccaccccccacatgtcagcttagttttggagagcaggcttggtcacgttcccattctatacccctgtctgcttgttcttgttgctacaaacagagcaccaggatttgtgtctaatttcttagtatgagctcctcttctcagttaataatatactggacttaatgaacagtaggaaaaagacaatgtacatctsttctctactcccaggtctaacaaatttgctgatggcaagttcttcttaaaagacaatttaaattttactgttgcagcataaatcttttcctcataaagataagaaattagagttagaagttgttgatttgagctggctatgtaacctcagacaagtcacttctaaaaaaaactcatgggattcaatttcttccctctgcagaatgggaataaaaatctttgttattacaaatactaaatgatataaagtatatgaaaggactttatttccttgagccaatatacaagtcatgttacaattattcaaaggcaggaggaaaattgaagtcctgtataaaatactttcgtgccctaagtacttagcctctgttatctttgtttcttcttattacccagaagctccttgctatgcctctgcccaagggcttgaatggctacagcttttggaaaa

SEQ ID NO: 22566 - DNA, 536 bp, Homo sapiens
atttgtttatttttttttctttttttttttattggaacattaattaggttttattttcactttttgtttccacagtaacatgtatgggattaggttacagtgtttatttgtccccaatcttttatttatttattttttttattatttttttttaattgattgactttttattttttattttatttttttttaaatttatttatttatttatttattttttattgataattcttgggtgtttctcacagagggggatttggcagggtcataggacaatagtggagggaaggtcagcagctaaacaagtgaacaaaggtctctggttttcctaggcagaggaccctgcggccttccgcagtgtttgtgtccctgggtacttgagattagggagtggtgatgactcttaacgagcatgctgccttcaagcatctgtttaacaaagcacatcttgcacygcccttaatccattcaaccctgagtggacacagcacatgtttcagagagcacagggttgggggtaaggtcatagatcaaca

SEQ ID NO: 22567 - DNA, 572 bp, Homo sapiens
accaagcctacaatgccgcatccactttctttgcctaggcaaagcctcaagtccagatcttggccatctcctcaaggctccttgtcccccgcctgacttcacctagactccagagtcatgcactctgattgcccatgctctacaagctctagtcttgctgaagggctaactcctcattgccctctctggtccccgtgtcaccgcactctccaatgtctgcctctccaaataatgaatctcctttcagaactcactgctgcattcccaagcccagcaccagacctggcacaaaatacatgtttattgagtagatgacatttaatttgcgagaatgtacttttaaaagtgtcctgtaaagcccgagcctgactgtctgatctcccacggcacccaatcagctgggctcctctgagcaggaagcgatgtcagatttaagtgagttttgtaggatccctgggaaaagcagagacaggtggcaggcagtacagcctcagagttcaatagagcatgcccaaatctccatccaactamcctccagttatctggccacttgattccttatctagaaacac

SEQ ID NO: 22568 - DNA, 567 bp, Homo sapiens
ctttacttttcattaataaagctatttcaaaggggattttgccaaaagacttttagatagcttcagggaattgttttaaaactaacacaatttgccaggcacggtggctcacgtctgtaatcccaccactttgggaggctgagacgggcggatcacctgaggttgggagttcgagaccagcctgaacaacatggagaaacctcgtctctactraaaatacaaaattagctgggtgtggtggcacgtgcctggaatcccagctactcggaaggctgaggcaggagaattgtttgaacccgggaggtggaggttgcggtgagcagagattgtgccattgcactccagcctgggtaacaagagtgaaactccatctcgaaaacaataaaaaatttaaaaaacttacaaaaaaataaaaacaacacaattcaagctgggcaaagtggctcacacctgtaatctcagcactttggggaatccgaggcgggataatcatttgaggtcaggagttcaagaccagcctgcccaacatggtgaaacctcgtttcaactaaaaatatgaaaattagc

SEQ ID NO: 22569 - DNA, 996 bp, Homo sapiens
tgatcccttcatggggcatccccagcctccttaaggagacactcttcagagggacagggcttctcacctgcctcagctctgaccatggggctgtccacactcagtgacaggacactgaccagggatctgactggagtgaccaggaacctggctggggcaaccagggaccacccaccctctggagctcacatgctgtgcagagaccatgaccctgggaccccttcagagaccatggggcctgaagttagattttcagtccagtgtggttttctcctgctttttgcaagtttacattaaacattgatgagaaaaacatacataaataacagacgagctgagggtgccaattgctaatctcttgtggcaatgaggggtgatgtagcaggagcagcaccatggctgaaatgagaccagaggccctgttgagtccacaggggtgtgtggttgcttaaatgacccaactattcccactgaataatcagcaagtgtcccaatgacacagcacagcatttagatgaaatgaacaagaggggactgagtctgagggaccagggggaggaagatcatgggtccctgggccacctgctgctgagtcaggtgtcagcaagatctctccgcagagcccagctcagcccatggccaaactcctggaagktccacagctctgctgagcctggcccaggacagaccccaggtcaacgaggtttgggacagtggtcatgagattaattcccagaaaggtgactgtgatcacagggcttgaaggctgcagctgattttctaatctgagaccctgcttcttcctcctgttgcctgtgctgccctcacagctggtttgagtgacatctctccaggaggagtcgcagaggatgtaaatttgcataaacgccaaacactgactgcccccaaaagctggagagggaataagagaggcctggggagcccagctgtgctgtaggctcaggaggcagagctctgaatgtctcaccatggcct

SEQ ID NO: 22570 - DNA, 1230 bp, Homo sapiens
ccacacgctgagcctgcctctttctctccttccttccacctgcatgtgatgggccaaccatgatgacacatgttgattcattcagcaaatacagactgaaaacctgttttgtgccaggcactgggtaggccctaaggagtcagggatgtaatgcacrgagcccctgctctcagagacttccattcacacagccatgcattcactcactcaacagcgagcgcctaccatcaccaaggtcctgagaaaaatacgaaaggattcaaggcatgaatgcaaactcctagaacgtcaaggctggaagagagaaggctggacgctaatccaaccctttacagacggggaaactgacccagagaggtgaacgatttgcctgtgtgttagcctgaggctatatcccacacacaagcctccttctcctgcgtggtaccgttgccacctcccctccagcattccaacgtggctccatagcccctgtacccctgcactgcagttaagtaaatccttgcttctgagtgtccaactcatccaggcaccacagaccccattcaatccaggcctccagcaaggggatgggccccagcaaaccaggggcggccttctcacccacggtgtcgtggaggcggaggtgcattctgcggccacggattctatatacacagcccctgagaacatcagggaaagaatatgggaaagtagggcgggaggcaggtgtgagaaccactcagctccacacacaaaacacagacccagattcaaatcccaactctgtgacttcctccctgaagaccttgaacgggtttcctaaactctctcagtctccactttcttatctgtaaaatgcagagaggattggtgcctgcttcatgaggtgggtgcaaagcctcaggaaaacagtgcaacgaagcctgagcacacagtgaatgcttcataacggtgaggccagacccctgtcgtcagagctgcaggcctcagggacacctggggaggcaccaaggacaccaggtccttggggagggagccaaggcaaccagggagcctgggctgcagcccaggagtatccgctacatggcagggaatgcagtgagctgctgtagaaggagagatgcctcacccagcaaaggcagagggaggaggcatcttggtgactcaggagccccaacagtgggcatttggctgcctcatcaattcaccagaaatgcaagggcttatttctgaactctgaattctact

SEQ ID NO: 22571 - DNA, 1230 bp, Homo sapiens
ccacacgctgagcctgcctctttctctccttccttccacctgcatgtgatgggccaaccatgatgacacatgttgattcattcagcaaatacagactgaaaacctgttttgtgccaggcactgggtaggccctaaggagtcagggatgtaatgcacagagcccctgctctcagagacttccattcacacagccatgcattcactcactcaacagcgagcgcctaccatcaccaaggtcctgagaaaaatacgaaaggattcaaggcatgaatgcaaactcctagaacgtcaaggctggaagagagaaggctggacgctaatccaaccctttacagacggggaaactgacccagagaggtgaacgatttgcctgtgtgttagcctgaggctatatcccacacacaagcctccttctcctgcgtggtaccgttgccacctcccctccagcattccaacgtggctccatagcccctgtacccctgcactgcagttaagtaaatccttgcttctgagtgtccaactcatccaggcaccacagaccccattcaatccaggcctccagcaaggggatgggccccagcaaaccaggggcggccttctcacccacggtgtcgtggaggcggaggtgcattctgcggccacggattctatatacacagcccctgagaacatcagggaaagaatatgggaaagtagggcgggaggcaggtgtgagaaccactcagctccacacacaaaacacagacccagattcaaatcccaactctgtgacttcctccctgaagaccttgaacgrgtttcctaaactctctcagtctccactttcttatctgtaaaatgcagagaggattggtgcctgcttcatgaggtgggtgcaaagcctcaggaaaacagtgcaacgaagcctgagcacacagtgaatgcttcataacggtgaggccagacccctgtcgtcagagctgcaggcctcagggacacctggggaggcaccaaggacaccaggtccttggggagggagccaaggcaaccagggagcctgggctgcagcccaggagtatccgctacatggcagggaatgcagtgagctgctgtagaaggagagatgcctcacccagcaaaggcagagggaggaggcatcttggtgactcaggagccccaacagtgggcatttggctgcctcatcaattcaccagaaatgcaagggcttatttctgaactctgaattctact

SEQ ID NO: 22572 - DNA, 1230 bp, Homo sapiens
ccacacgctgagcctgcctctttctctccttccttccacctgcatgtgatgggccaaccatgatgacacatgttgattcattcagcaaatacagactgaaaacctgttttgtgccaggcactgggtaggccctaaggagtcagggatgtaatgcacagagcccctgctctcagagacttccattcacacagccatgcattcactcactcaacagcgagcgcctaccatcaccaaggtcctgagaaaaatacgaaaggattcaaggcatgaatgcaaactcctagaacgtcaaggctggaagagagaaggctggacgctaatccaaccctttacagacggggaaactgacccagagaggtgaacgatttgcctgtgtgttagcctgaggctatatcccacacacaagcctccttctcctgcgtggtaccgttgccacctcccctccagcattccaacgtggctccatagcccctgtacccctgcactgcagttaagtaaatccttgcttctgagtgtccaactcatccaggcaccacagaccccattcaatccaggcctccagcaaggggatgggccccagcaaaccaggggcggccttctcacccacggtgtcgtggaggcggaggtgcattctgcggccacggattctatatacacagcccctgagaacatcagggaaagaatatgggaaagtagggcgggaggcaggtgtgagaaccactcagctccacacacaaaacacagacccagattcaaatcccaactctgtgacttcctccctgaagaccttgaacgggtttcctaaactctctcagtctccactttcttatctgtaaaatgcagagaggattggtgcctgcttcatgaggtgggtgcaaagcctcaggaaaacagtgcaaygaagcctgagcacacagtgaatgcttcataacggtgaggccagacccctgtcgtcagagctgcaggcctcagggacacctggggaggcaccaaggacaccaggtccttggggagggagccaaggcaaccagggagcctgggctgcagcccaggagtatccgctacatggcagggaatgcagtgagctgctgtagaaggagagatgcctcacccagcaaaggcagagggaggaggcatcttggtgactcaggagccccaacagtgggcatttggctgcctcatcaattcaccagaaatgcaagggcttatttctgaactctgaattctact

SEQ ID NO: 22573 - DNA, 1230 bp, Homo sapiens
ccacacgctgagcctgcctctttctctccttccttccacctgcatgtgatgggccaaccatgatgacacatgttgattcattcagcaaatacagactgaaaacctgttttgtgccaggcactgggtaggccctaaggagtcagggatgtaatgcacagagcccctgctctcagagacttccattcacacagccatgcattcactcactcaacagcgagcgcctaccatcaccaaggtcctgagaaaaatacgaaaggattcaaggcatgaatgcaaactcctagaacgtcaaggctggaagagagaaggctggacgctaatccaaccctttacagacggggaaactgacccagagaggtgaacgatttgcctgtgtgttagcctgaggctatatcccacacacaagcctccttctcctgcgtggtaccgttgccacctcccctccagcattccaacgtggctccatagcccctgtacccctgcactgcagttaagtaaatccttgcttctgagtgtccaactcatccaggcaccacagaccccattcaatccaggcctccagcaaggggatgggccccagcaaaccaggggcggccttctcacccacggtgtcgtggaggcggaggtgcattctgcggccacggattctatatacacagcccctgagaacatcagggaaagaatatgggaaagtagggcgggaggcaggtgtgagaaccactcagctccacacacaaaacacagacccagattcaaatcccaactctgtgacttcctccctgaagaccttgaacgggtttcctaaactctctcagtctccactttcttatctgtaaaatgcagagaggattggtgcctgcttcatgaggtgggtgcaaagcctcaggaaaacagtgcaacgaagcctgagcacacagtgaatgcttcataacggtgaggccagacccctgtcgtcagagctgcaggcctcagggacacctggggaggcaccaaggacaccaggtccttggggagggagccaaggcaaccagggagcctgggctgcagcccaggagtatccgctacatggcagggaatgcagtgagctgctgtagaaggagagatgcctcacccagcaaaggcagaggraggaggcatcttggtgactcaggagccccaacagtgggcatttggctgcctcatcaattcaccagaaatgcaagggcttatttctgaactctgaattctact

SEQ ID NO: 22574 - DNA, 801 bp, Homo sapiens
taacaggaggggagaaaatcaggccactttagaaacacttttatgactggcagttatccagtttgctactaaggtcaggtctaaaagattgttaagactagcctgtttctgtatccatgggtatcagctggggaagccaagttctgtctttgtgcttggcagccctccccaatgccatgtctctgctgatgacattggaatttcctccaaattaaacagcctgacagcagccatctgtaaagaaggcagcaaggttacgagtgatcactggctagtgccatttctgctgccaaccaggcaggcaaagcttctggcatgttcttgaccacctctgagaagagttgatgtttcctttggggtatcakagagtttctgccacccagctctgtttctctgcctcctggtgcctgcccctaattattgcatagttgtcactgatcctggtaacctgactgctggatttttgctccagaaacctacagtaaaggagaccgtaggccaccagaagccaggaggaaacatcaggctgcagtcaagggcactgccttctcccctccaggctgctgggctttgagggcagagaaataaaaagactgaaagggattagaggcctggagtccacaacaaagccctgtagtcatccaccaccttgcacagcctcttcctgccatgcttacaggtgaaaagtctagttcataggacacattgcttttccagaaccttccgctgccttccagagccagcattcttcctgaaaactctctcttgccagttgtttgccttcagagttacagtttaaaa

SEQ ID NO: 22575 - DNA, 801 bp, Homo sapiens
taacaggaggggagaaaatcaggccactttagaaacacttttatgactggcagttatccagtttgctactaaggtcaggtctaaaagattgttaagactagcctgtttctgtatccatgggtatcagctggggaagccaagttctgtctttgtgcttggcagccctccccaatgccatgtctctgctgatgacattggaatttcctccaaattaaacagcctgacagcagccatctgtaaagaaggcagcaaggttacgagtgatcactggctagtgccatttctgctgccaaccaggcaggcaaagcttctggcatgttcttgaccacctctgagaagagttgatgtttcctttggggtatcatagagtttctgccacccagctctgtttctctgcctcctggtgcctgcccctaattattgcatagttgtcactgatcctggtaacctgactgctggatttttgctccagaaacctacagtaaaggagaccrtaggccaccagaagccaggaggaaacatcaggctgcagtcaagggcactgccttctcccctccaggctgctgggctttgagggcagagaaataaaaagactgaaagggattagaggcctggagtccacaacaaagccctgtagtcatccaccaccttgcacagcctcttcctgccatgcttacaggtgaaaagtctagttcataggacacattgcttttccagaaccttccgctgccttccagagccagcattcttcctgaaaactctctcttgccagttgtttgccttcagagttacagtttaaaa

SEQ ID NO: 22576 - DNA, 728 bp, Homo sapiens
cacctcctacctttgtgcctaaggacaaattatttaaacctccctcggcctcagttttaagtataatcggagataatagtccctccccaaaagggtgtatgggaacctaaaaatccatgaagaatgtaaacacttagggtctagccctgcttagtagttcctctggagatcctgtggctctttcaggagagaaggaaaaacagagaagtgagggctttctctttcctatttcaggttctgcaggaagaaggcagaggcgcttctgtgctctgtgcacccgatatgtataggccacatgtgatcgcattattttctttccatcctgatgccaacctgtgagtcatcagctgatcatcaggatattaaatgacttctttaagttcatgtcctttgtagggacatggatgaagctggaaaccatcattctcagcaaactaacacaagaacagaaaatcaaacactgcatgttctcactcataagtgggagttgaacaatgagaatacatggacacagggaggggaacatcacacaccagggcctgtcaggggatrgggtgttaagggagggagagcattaggagaaatatctaatgtaggtgaccggttgatgggtgcagcaaaccaccatggcacatgtatacctatgtaacaaacctgcacgttctgcacatgtaccccagaacttaaagtataataaaaagaaaatcacaaagctactaagagaggga

SEQ ID NO: 22577 - DNA, 728 bp, Homo sapiens
cacctcctacctttgtgcctaaggacaaattatttaaacctccctcggcctcagttttaagtataatcggagataatagtccctccccaaaagggtgtatgggaacctaaaaatccatgaagaatgtaaacacttagggtctagccctgcttagtagttcctctggagatcctgtggctctttcaggagagaaggaaaaacagagaagtgagggctttctctttcctatttcaggttctgcaggaagaaggcagaggcgcttctgtgctctgtgcacccgatatgtataggccacatgtgatcgcattattttctttccatcctgatgccaacctgtgagtcatcagctgatcatcaggatattaaatgacttctttaagttcatgtcctttgtagggacatggatgaagctggaaaccatcattctcagcaaactaacacaagaacagaaaatcaaacactgcatgttctcactcataagtgggagttgaacaatgagaatacatggacacagggaggggaacatcacacaccagggcctgtcaggggatagggtgytaagggagggagagcattaggagaaatatctaatgtaggtgaccggttgatgggtgcagcaaaccaccatggcacatgtatacctatgtaacaaacctgcacgttctgcacatgtaccccagaacttaaagtataataaaaagaaaatcacaaagctactaagagaggga

SEQ ID NO: 22578 - DNA, 1453 bp, Homo sapiens
cgcaatggttcaccccgtaatcccagcaatttgsgaggccgaggcgggcggctcacttgaggtcaggggttcgacacaagcctagccaacatggtgaaaccacctctctactaaaaatacaaaaattagccgggcgtggtggcaggcgcctgtaatcccagctactcgggaggctgaggcaggagaatcacttgaacctgggaggctgaggttgcagtgagctgagatcgcaccaccgcattccagcctaggcaacagagcgagactgtctcgctctcaaaaaacaagaaagaaaagaaaaaaaaagaaaaagaaatccccgtttgacaggaaggtggctcatgtcactagagggaaggaactggtttatgggcctggatgcccccagttgaaccgggggacatcttcctcctctgtccctcccgcctcgcctttcggtggacacacagtcctgtgccagacagcaaacgtcccagcagggctcgcagcgccccctcggggcagagagatgcacgcgggcgactgtcgcagtcacctcgtggccactgcaccaaacgctcctccgaagcttccctcagagaccctccctcaaccgcgaggcagtcctcccctctgccctctgtccacaacaaaactgctccccgcctctcacttgagggcaccggggccagcccccgagacgagaggtcggccgcagccctcctccacggggctcacgacccgggggcctcacgacccgggggccccatgctgccacccttaccccggggcccccaacctcacccgccgccgccaccctcggtcccggccacagcgggcggctctgcagaagagctacgctccgtccagtcggaccccggaccctggccgggcatctccgcggcgccgagaccgcgagccgtgtgcgggagcagctgtcccagcatccctcccccgacagcacgcgtgcgtcaggctgctggtattccggagaggcggctcggatgctggcttctcgcccctccgaagccgttcggacactgcccgaacagcttcgggagagcggggcgggcagatccgcgaccccggagttacggtgggggaggggcaggagcgctgcggtcgctgagcgtttgcacgtttgcacctctctgtggaagcagtgcgtcacaggagggaaatatacatgctccccaaaacaagaggtgccttccacttcagtattccagatcctcagcacatttgcaaatcgcgagggtcaccatacaggtcaaacgtctgcacgcaaaccacggaccgaagcacgtggcgcaaggatgcggagctttatctgttgtccgttattactcaggtatccaagcttagacagcatcccaacggccgatttccatcaactacttttgcgcacgcgcaaatcctctccctcgcccctccccttttttctcaggacgcgtttctcacgggatttggcccg

SEQ ID NO: 22579 - DNA, 546 bp, Homo sapiens
ggggctccacacagggagcaaggccttcaccctccaggagacctccagcagtgtctgcagacatgtttaggtgtcccaactctagggcaggggccagggaggctgcttgacatcctgtkgtgtacaggatggcccccgcagcaaagacttacccggctcagcatggccgcggtgccaaggtccagaaacctcgccctggggcttcttcctgtcttgctcctgaatcttcacgatgcatggacaacaaggggcctacatgagcaggtcgcctgctgactcacaggcatcagcctgctccccactcaccctgctccagccaatcggcccctcgatgttcctcagatgtacaagcacgcctgcactgagcagcccctcgggcctcccaccgggcctcagtcccaccgagccaactcctgacctagcatctgcagctggcagaatgatggtccgtcaaggtgtctgcatcctgatctccacagcctgtgaagatgtggctttccatggcaaaagggacttcgtggatgtaattaaattagggatcctgag

SEQ ID NO: 22580 - DNA, 548 bp, Homo sapiens
gatgtcagggctgggaagctgaggacggggtgagatattgrtgtattagtagacctttcttatcccacatattctagattcagacttctcaaacttctgacataaagagttgagtagaatggacgctggtttagttcaatcagctgaagtgatttcattgtccatctgacttacatctcagctgttttctttaacctttgctttttatttaaatgggtatttacaacaagaaaactaagagaaaatgtaaggagtatcgaacctgtagccgtaattgcaatctgaaggtatgaggctctaagctgaccccgcgtcctggaatgtgccattgggatccctcacgactcatcaccatgggataggaccgtgggctgtccagagttctgcttgctattccagaaagcagcaggattttaggaccatgagaaatgatattgtagactgcagatttttggtataaattcaaataattagggattattcttgatatgcctcagaactttttattattgaaagtgcattgttttcctataaaaatgcaaatcgta

SEQ ID NO: 22581 - DNA, 603 bp, Homo sapiens
cattttatagcaggtgagtgatctgtttaacagtctgtactttatgtacttgctctgtgaaaaaggcaccacatagccccagggttttgggcaacacttgtgggcaaaaatagccacatctttggaacaccaaagtatcaaatccatagatgtatttccccaaatcccaaaaacacattttcatgtgtatctatattttctccttgcagcattccatatggcacaactggcaactgtggatattgacatgctccacatctcataagacaacctgaggcactgggaatttccttgaacaagatttcccaacttcaatgctactgacatttggggttggataattctttatttggggggctttcctgtgcattgtagaatatttaacagcatctctggcctctacccactagatgccaggaacatccgtatcctccaattgtgacaaccaaaaatgcttccaaatattataaaatgtaccctgaagggcacaatcattcctggttgaggcccactagtttatctgattctcatgcatatttttatgwagatataatagatctggaaagagattattgagtcccacagcacaccttggacaggaca

SEQ ID NO: 22582 - DNA, 557 bp, Homo sapiens
tgaattacacacttaaaaatggttggtgtttaattttatgtcttgtagttttacctacatttaaaaaaatggagcaggtcaaggaggacctggattgcagaattggagtgcaattttgaagggtatcactgaacaggtgccatctgagctgcaaacataccaggtagcgggggcagccattcaaagggtcataagaaggggcattgcctggtgtgttcagagaacaggaaggaggcaatgtgcctggatgtgagtaaaggaagggcaatargaacagaggcagccttggtcttcctcattcacctgctgttttagacaccactggctgcaattgcccacagttagttacctgcccaaagttgcagtgatgatggtactggcagtggtgaggaaaagaagggaaaaggcagaaaaatcactccagatacttcccaaggcccagaatttgatcatacattatttcttttgactatgagtttcctttacatgatatttccccttagttttttttttttttaacatagaatgcatctttcagtaacactttatctcatata

SEQ ID NO: 22583 - DNA, 568 bp, Homo sapiens
ttttttagtttgatgactattgatttgatcagcttttattttctgggacattaaattgtatggaatttggtggaagtttaaaagggcacagattctgggcagggtgggtggctggggggagggggccaagggctgaggccatgggtgtttaactacagctcttcctcaggtggcctttgtgttcaagccactgatgctcccagaaggtgaaaaacgcaccatccccaaactccctgcygttattaatcagcaaacgtgtcaggggcaggtgcgcatgagtgaattttggggtcacagagggtaatcaggtctggccgggctgaagcaggtgacccgactgtccgcctgatcctgagctattggataaggagattaatctaattctgtctgaggagaggatggctttttgagaaagcgtgggactcagaaaatgaaagttggatttagacctcaggctaaattcccagctccggggccagcgtgacctgaagcgtgttccctgggtatcttttggcaaggctgtcattgtgcttgagcacccagtatgtgagggaagaaaacacagagc

SEQ ID NO: 22584 - DNA, 1933 bp, Homo sapiens
tgacttcaaggatattatatatacaactttgactcttagctattctgatatttttttctaatataccttaagccttgtaagattagttacgttttttggacaattatagtgctactgctactggtaagtaggattgttccacataatgaatgacatccctagcgctagttatactattcttctgctttagaatcagcaagcctgaaagagaccttgagagttcatttaatccacagcctggcttagtcaatcaagatctgacagataaatctatcctaatatttaaggcagctataaaagcaaatttcacagtgtcccaagggaacttattttgttttaagtctttcactgcctagaaaatatatcttcctcatatctaatcaatgcaggacatagagaaagtaaggaagaaaagaaaatatgtttaataattgcattcagtattcaaggcaaacagaatattgatggctttacatgtacataatsagaaacccttgaaaaagctagtgtctaagacattattgtgcaattttagaaagtaaaaaatgaagaattgaagaatgtattcatcatactcagaattacacagccaataaacaataacagaaattctccagagaaaactgtagtatacaaagaaagggatatggcagagccctcaattatgttacattttcagaaactattgtgggttctcttttgcatctctccttttcagttaagaacttctcagcattatcccctcatattgtccacttttcttgagaaaacccacagcctgaaagaggcatccctacatattcatcaactcatttatacatatacttaacaaatcttaatcaatgctaattacatggctgtaattgtaacaggctttaactgatacactggtgaataaaaaaaatacatatttcctctcttcaagaagttaaagaccactagcagagtcaaacattcaagaaataatcacactaagatatagttactaattgtgtcaggcaacagaaagaacaaaaatatataggataatgtaaccaagtaatgtaacagaaagacattcttaagactgggaggtggagaagacctcctagaaagaattatagttaaaccaaatgaataaaagttaacctggtaagaaatgtagaaaaagggttaaggagaataaaagaaacagtctacatacagaaaattgaatgcatgaagaccctagtatagaaataatctagcataatagaaaaattaaaaagaggttaatattcaaagcagattgatcaaggcagaatggtacaaaacatagcagagaagcatgaagcaagggctatacaggtagaattttgtgctccattccaatggaaaaggaagtcattgatatatttaaatttgtcatgatatgatttataaagattattctaacatatggaagatgtttaatctctgctaaaaacagcaataaaatatgctttaaacatccacaaacctataaggacaaagatcagtagaaaaaaattatggcagcaaaatttgaaaactggaaatcacaaagatatgcagtagctgatgttgaacaataaaaagcttatttcaagtcaggagaggtaaaaactgagaagcgatttgatttgcatttcagaatgccctccaaactctaataccttgggagaagtatgagaatgggtccaatcccaggaatattggttgataaaattttcgttgcagttgcccaccccacgccaccccagatccctgctgcagttccccatttccactttgtacagccaggccactggcccacattatgccctaccctcagcagaaaaaggatgcttactctctggagaaaataaaatagagtctctgaactgagagtggacaggcagaggtaccatactgaaaacagactaaatgaaatgctatatactgaatatcaagacta

SEQ ID NO: 22585 - DNA, 607 bp, Homo sapiens
ggtttctgttgcatgcgcctcttgagtctagctttctttccttccttttcttttttctctctttctttcttttctttctttctttcyttccttccttccttccttccttcattccttccttccttcattccttccttccttccttctcttttctttctttgttcccagtgagtactgctggcccctgctgatgcacattaccgatattctggggtctttacattgccaagtgctcaggattctatgaggtttatagagaaacagaaaatgtgcttccttccctcttttaaggtcataatttttcaaattgataccaaagtgttctacgtaattctcatgtttttagagggtttaaaatgttttgcctattttagttacttataatctcctgtgtttctcaacccctttctaccctattagatagacaggactctgggagtgtgggttgggagagaatctcaatgagagattctgtactacttcagattgtgcctcctcctctgatgactaaatctttcttatgggccaagctcctgtgactctcaccctaaagtggggttctactcaatctcaccgagtgtgtttgttccctcacacagaaagactt

SEQ ID NO: 22586 - DNA, 607 bp, Homo sapiens
ggtttctgttgcatgcgcctcttgagtctagctttctttccttccttttcttttttctctctttctttcttttctttctttctttctttccttccttccttccttccttcmttccttccttccttcattccttccttccttccttctcttttctttctttgttcccagtgagtactgctggcccctgctgatgcacattaccgatattctggggtctttacattgccaagtgctcaggattctatgaggtttatagagaaacagaaaatgtgcttccttccctcttttaaggtcataatttttcaaattgataccaaagtgttctacgtaattctcatgtttttagagggtttaaaatgttttgcctattttagttacttataatctcctgtgtttctcaacccctttctaccctattagatagacaggactctgggagtgtgggttgggagagaatctcaatgagagattctgtactacttcagattgtgcctcctcctctgatgactaaatctttcttatgggccaagctcctgtgactctcaccctaaagtggggttctactcaatctcaccgagtgtgtttgttccctcacacagaaagactt

SEQ ID NO: 22587 - DNA, 607 bp, Homo sapiens
ggtttctgttgcatgcgcctcttgagtctagctttctttccttccttttcttttttctctctttctttcttttctttctttctttctttccttccttccttccttccttcattccttccttccttcattccttccttccttccttctcttttctttctttgttcccagtgagtactgctggcccctgctgatgcacattaccgatattctggggtctttacattgccaagtgctcaggattctatgaggtttatagagaaacagaaaatgtgcttccttccctcttttaaggtcataatttttcaaattgataccaaagtgttctacgtaattctcatgtttttagagggtttaaaatgytttgcctattttagttacttataatctcctgtgtttctcaacccctttctaccctattagatagacaggactctgggagtgtgggttgggagagaatctcaatgagagattctgtactacttcagattgtgcctcctcctctgatgactaaatctttcttatgggccaagctcctgtgactctcaccctaaagtggggttctactcaatctcaccgagtgtgtttgttccctcacacagaaagactt

SEQ ID NO: 22588 - DNA, 607 bp, Homo sapiens
ggtttctgttgcatgcgcctcttgagtctagctttctttccttccttttcttttttctctctttctttcttttctttctttctttctttccttccttccttccttccttcattccttccttccttcattccttccttccttccttctcttttctttctttgttcccagtgagtactgctggcccctgctgatgcacattaccgatattctggggtctttacattgccaagtgctcaggattctatgaggtttatagagaaacagaaaatgtgcttccttccctcttttaaggtcataatttttcaaattgataccaaagtgttctacgtaattctcatgtttttagagggtttaaaatgttttgcctattttagttacttataatctcctgtgtttctcaacccctttctaccctattagatagacaggactctgggagtgtgggttgggagagaatctcaatgagagattctgtrctacttcagattgtgcctcctcctctgatgactaaatctttcttatgggccaagctcctgtgactctcaccctaaagtggggttctactcaatctcaccgagtgtgtttgttccctcacacagaaagactt

SEQ ID NO: 22589 - DNA, 593 bp, Homo sapiens
cttttcttaaaggcaatttccctcatctttcaaaacttcttaaagtatcatgcatgtctattagctcaaattccactactggcaaatcaatggatatagccttaagggtatctgtattgaatgatcatctcagcattataatgacaacatttggaacaacccaaagtcaggggattggctaaacaggttcagctaaatctatgtaatgagatatacgcagctgttaaaatcatgcgtacaggactattggttgaatagtccccatctactgcttagtgaaaaacaggacacaaactgcctygcatttcatgtatagtgtgtacggtggaggtagttatgagctgtgaaatttggagttacccaacctgcaactgagtcctgagtcctggtcccaccacaccttcctgggtgatcttgagcggagctcctgcccctcttaactgcagtgtcttcatttgtaaaaatgctgttaatgaaattatttactcatagggttgtactatatgcaacctgaaattatcccctgcgaagtacttagaatactgcctaactcagcagcgtgcattaggtcccgatatttttttttaatgatg

SEQ ID NO: 22590 - DNA, 577 bp, Homo sapiens
tcagactttgttgtttcagtgcttatgtaatcctgagcaagctgtgaggtgctgtgctgatgaggaatgtgtgggtgggcaaggcctctcctttggctaacttgaccctgtgatcttctagtcatctcctgccagagcaactagaggctacttcataactgaacctggctctagttgtggtatctggatttcatgagtgctgtgtttagctgagacttgtcagaaacaaagtaactaaggggtttgaaactctgcagtgttctgaaatacagtaaagcatctattccccaaaatagcacttgtacaacaccgggaatgtacatttcctttctctttctctcctttkgttggattttctttccccacaataattcatcctgtcaccacatccctttctttgaatgcagtacgtgttgcacttttcttatcagattcagacactttttctctttagcaacctccttcctttagactcagtcctactcttccttttaggtttattggtgtcatggggcattatcatctattattgcctggttgtgtctccttaagtgcaggaagcactaaacccttggta

SEQ ID NO: 22591 - DNA, 1139 bp, Homo sapiens
ataatcattacccttactattttccaaattaaaaaaaaactataaagatatgaaaaaatatataaaaataacaggaaattgacgagataggtaagaaaaattagggtaaatgatataagatgaagccaagtatgaaattagtacacaaatgcccaatataatttctcatatactctattagacattgggtgcaaatttgtctctgagtttcctagaaatcaatcccgaaaacatggttagtttcttaaaacacaatccaaaaaactaaaaataggcataatgcatcattgaagcattgaaattgaatttcataacgcaatgatgcattatgtttcaaaaatattttgcaatatttttcaatttcaattttattgaaattccatatgatggaatttctctcctatgttttcatgtacaaaaagaaccaatctatatagtgaacaatgagctaagatagaaaagtagccaatcaatgtataccatgtgataccaacatccttataataaatgcaaaagcaggttctgagtgactttcttaaaatgtkgtaatgtggcctgctgatttaagccttcatgccaatcataataaattggcttagttttccatgacctagattattccaagcacattatttggattacaaaggactaaaaagactttagtggttcttgaattgtggtttccagaccagtaacatgaacatgacctgggaacttattagacatgcacatttggggtgggtttccacctcaactattctgaatcagaaactctaagggagtgaggcccagcaatctgtaatacttccaggtgattcagacacatgctcaggtttgagaaacatcactttccacaatattctctatgtactttttataggtattgtttttgttttgttttgtttgtttgtttgtttttgagatggagtctcactctgttgcctacactggagtgcagtggcatgatctcagctcactgcaacctccatctcccgggttcatgccattctcctgcctcagcctcccgagtagctgggactacaggcgtccaccaccacgctgggctaatttttttgtgtttttagtacagacggggtttcagcgtgttagccaggatggtctcaatctcctgacctcgt

SEQ ID NO: 22592 - DNA, 507 bp, Homo sapiens
tagatgtaacttctcctttaatgcaaggattacttagaaaaatgattttaaatgtctcaaatgcctttactgtctcttcacatctgtttttcattagacgaattcgactgtgttctttaaataccacaataggtcctaagtaccattcagcatctcattgttcccttagctgagcagctcccagatggtattcatctgcctgctgaaccattcctttattatagacagacactattagaaacctctctgatatccttggtctcaactatcagggcttgttgaattgaagcagctgaattcaatacagtttaaagttgtttctttcaagagttaactcatttttctgggcttcagacattgaacaagtaatggcctggccttatccaaaacttgtgtgtatatatatatatatatatatacacacacacacacacacacacacacacatatgtgtatgtgtatgtgtgtgtgtgtgtgtgtrtatatgaccaattttagatttcaaga

SEQ ID NO: 22593 - DNA, 507 bp, Homo sapiens
tagatgtaacttctcctttaatgcaaggattacttagaaaaatgattttaaatgtctcaaatgcctttactgtctcttcacatctgtttttcattagacgaattcgactgtgttctttaaataccacaataggtcctaagtaccattcagcatctcattgttcccttagctgagcagctcccagatggtattcatctgcctgctgaaccattcctttattatagacagacactattagaaacctctctgatatccttggtctcaactatcagggcttgttgaattgaagcagctgaattcaatacagtttaaagttgtttctttcaagagttaactcatttttctgggcttcagacattgaacaagtaatggcctggccttatccaaaacttgtgtgtatatatatatatatatatatacacacacacacacacacacacacacacatatgtgtatgtgtatgtgtgtgtgtgtgtgtgtatatatgaccaattttrgatttcaaga

SEQ ID NO: 22594 - DNA, 635 bp, Homo sapiens
gtacatgcaaacaggaaaatgtggcccacattcaagaaacaaaaacagtcaataactgactctgaaaaggttcagatgttggatttagcaggaaataatttaaagaagttgttacaagtaattttaaatatgtaaaggaaaatatggtcattttgagtgaacagatagggaatctgagcacataaatggaaaaaaagaaccaaatgaaagtggaaacaataaatgaaatttttaaaaattctgacaggcttaacgacagattagagacgacagaaggcagaatcagtaaacttgaagctagarcaaaaaaaattatacaatctgaaagccaggcaaaactataacattcataacttgggaagatacagtgaaagatatacataaagagaaacaatggcattaaatgtatctctaaaacaacaaacacacactaaaaatgaataagaagccacctgatgacccacatacataaggtcaaactaaacctaaatgaaagagataatatatataagaaaataattttttaaaaaaatagaaaataaatgccccaaaggggatcaacaaagccaaagtctggttctttgaaaaaaattgaaagatgtattacttccagtacttaattttccgcatatgtc

SEQ ID NO: 22595 - DNA, 1113 bp, Homo sapiens
gcctaccttggcctcccaaagtgctgggattacaggcatgagccaccacctggccagcatctcaatttttaataaataactaaaaaataacttgtttgaacaggtatatcttggccagcaatgctggactgggttcctttgaggtgagggaaactcttggacatgggacctagtgggggcctctgcttgcctccctgctgggttaacagtacagctggcccagccagtcttgaaaccttaccctgcaacaaaaacttgacacctccaggctggtaattctggaggtgtcttctctgccaagtcggtgactccccaacccgctattatggctggactctgctcttgcagtcttagtgtacaccctggttcttcaagggcagcaagcaggactattccggtagcaaccagagctggagctcagggccccgcgctggaaagctggggcagcttaggtggtaactagtgtgctgaggatgaggggcgctatggagcccaggcgggtttaggaagcattcttggcttcctggaggaggggaaatactggtaattcaggctgaaggagctggatggggccaggggcagtgactcacgcctgtaatcccagaactttggaaggcctgagacgggagggtcgcttgagcccagaagttcgagaccagcctgggaaacatggcaagacctcgtctcaaaaaagccacgcgtggtatgcgcctgtgctcccagctgctcgggaggctgaggctggaggatcgcttgagccctggaggtcgagactgctgtgagccgtgattgcaccactggactccagccttggtggcagtgagaccctgtccccaaagaactgggtgatctcgaccctccacatcgctggctctccacgggcgctgcacagtggagacccaggatctgattgcataggactgggcactggagtttaagttctccaggggggtttaatatgcaacgaagttgggaaccactaccagtgaaccccttcattctgtgcggctccagctcccggaagccctcggacaargaatgtagcccatgtaccgcgtgacgtgagagcggagcccgggtctgcccgggcgcgggcccgcggccacggcgttt

SEQ ID NO: 22596 - DNA, 820 bp, Homo sapiens
tttgaacccaggaggtgaaggttgcagtgagctgagatctcaccactgcactccagtctggatgacagagcaagactctgtctcaaaaaaaaaaaaaaagtaacatagcatgtcatgggggatctgggctctgccagcccctctcttccaagttcagtgctctcaccccaagcttggagyacacacacacacacacacacacacacacacacacacacacacacggtactatttttcacccctgcctttgttcctctgctgttcttgctgaagtgtccagctccggccacctcacctgggaagctccgctgagccctgcccagatacacctcccctcccagcctttccctcccaggggagctggtgcacactcactcactgcgctgatcacaccacatttcatgatgcttcctttccctcccctctccccagcaggcaagttcttaaaggcaagggtgtgtcttgtgtgtctatatcaatcggaggcctctcccttcctttcttccctgacccagcagcctcaccagagcattctgtctgactatctgatggagacaccttctgagccgaaacagtgtggccatagtggctgtgtcctcagagatgaggagcccctccttccctttcacattgctctctggccttcccggacctggcttctcgcagctttgtgtgcgtgtttctcaggtgtccaggaatcccatgcgaagtgaaggctgctttggtctcctcaagtctgtccaggacaatccagcctctgccctggaactgctggatttctcagtaagagcattttataaacctcgtttctgatcctccc

SEQ ID NO: 22597 - DNA, 1403 bp, Homo sapiens
ttttctggccaatggattgatctgaggtagcaaatagctccagtctctcttcccctgctgtggccacctagaggtccatgtgttccaggtggtgcaatcaaacgatggtgaagacaccatcaacctgggccacagatgactgtctaggcactatcattcacccgtccttgaatatgcagtatattgagaataaactcttatgttaagccattgagatgttggggttattttttagtgcatgaaaccaagcctgttcccattaaaacactcaatcatctcaattaagttccaggtgaatcaagcccagtccttaagccaacaaaaaaggtttgcaggtctttgacctttgagccacctttcagaattaagaggacttctggttcttccagaattgggaaagagagagtaccatgaaccataagattatgaaacataattctataggagctgaatrtacaacagcacttgagactctgccaattaatttaggactggagaaaccaaccatgactaatcaacccagagcatgccagaccacagccacgaatgctcataagaacgatcttcacattcagatcagtgggccatgcaactcaataatttctttcagacaatgacacaaaattgcctccccacttttctgccttaaactgaacactgctctgacctaatttcctacaattttgtttccagtcacttttttaccctcaaacaaccttataattgcgataatgaggcacattagagcccacagaagtttttaaggggaaattagatcagttcagggtattgccctcccaaattaaggtaattatcttgaaattcaaatgccacaaccagaattcagagcatcctactcacacccatgtcactcctcatcatatccactgtgttgtcattaataattgtcattccagaaacaagcatgccatcagccaaggcaggggaaatcacagtgttctctttaattcaactccacacaaacatggcagcccagaaaccttaggatccagcaagcatcttggtctcacttgaccctagggactgcactaaacactttccgtgaaacactctactgccttttcctagcaataggactgactcgtggtcctcctcctaccactgtgaccactccttcttggtctccttaacggagacctccccttacctccccttagttattgacattccccaagggcccattctcagtccattgcttttcctgtgctctcctcgaataatcttacctactctcatctaccaaatacaatgatgcccaaactcccctcctgagatctcaactcatataccttctgcacctctccacccagatattccacagacacttcagaactacatgcttgaaataaactcatcactctctcccaacctctttcctcatt

SEQ ID NO: 22598 - DNA, 1433 bp, Homo sapiens
tgaagactgctagggagtaaagggaaagaataacatggagtgggaaaaccatttcttagtttttataaaaatgaggatgcatgtgtgtaaatattcaaactggaagagacagcacttttataaggttggggttgaagacaaattatggaaactaagaatgaaattaaacagtgggtcaggaaagaggtaacagatctaaaaaactaaaaatcaatttgcttcttgccacaaaattactttctccctcaaaacaatttttatcaccctaataatttgctggggttttagcaggattggttggttgtttttatttctgggacacatgtagtcctatgtatttaaatgacttttttttttttgccaaatgtgaaatgtggccaacattagcattctcacctatgtcctcaacagacgctcctggatttgtctttctttaggagaacaaacattttttgacatttacaacagccctcaggattcactaagaaattatctatccactcttacaaatcatttagaaagacagcaggccaaagaaaaacaaaggacatcaacataaaggggacactatacacgtgatgctcaatatccacgaataacagtaaaagagtgaggactaaaaaatgaataatattcaatgttgatcaaagcgtggagaagcatctattrtttgtgggagtataaaccagtgcaatttctcataagagaaatttgatagacctatcaaaactgtaaatgcacataccctttgtcccagaaatctcacttctggatatttatcttgcagatttaatatggcatagatccatattcagagatattcattaaagcaatatttgaaatagcaaaaaaatctggaaacaatttaagtatccatcaaaaagagagactgattatagcaatcatggtaacttcacatcgtaaagtattatgtagttccttaaaaagatcaggaaaccagtcataaatatattttaattacattgtatttcatagtcatatacgggaacttattttaaaagtcaaatgacattaagattcttaaaatgaaatatcataattccctgttctcctccccagttccctggttccttccccagaaacactcttgtctcactatcttagctgtgatatcttctggcatttactcatcaccttatttctaaaccagtactgttgtttctgggacacatgtgattttatttatttaaatgaattttttggcaaatacaaaatatagaagtataatacaagccacatatgtaattttaaattttctggtagccacatttaaaataattaaaagaaataggtccaggaatggtggctcacgtctgtaatcccagaactttgggaggcagagcctagcagatcagtcgaggccaggaatttgagaccagcctggccatcatggcgaaaccccatctctacag

SEQ ID NO: 22599 - DNA, 1433 bp, Homo sapiens
tgaagactgctagggagtaaagggaaagaataacatggagtgggaaaaccatttcttagtttttataaaaatgaggatgcatgtgtgtaaatattcaaactggaagagacagcacttttataaggttggggttgaagacaaattatggaaactaagaatgaaattaaacagtgggtcaggaaagaggtaacagatctaaaaaactaaaaatcaatttgcttcttgccacaaaattactttctccctcaaaacaatttttatcaccctaataatttgctggggttttagcaggattggttggttgtttttatttctgggacacatgtagtcctatgtatttaaatgacttttttttttttgccaaatgtgaaatgtggccaacattagcattctcacctatgtcctcaacagacgctcctggatttgtctttctttaggagaacaaacattttttgacatttacaacagccctcaggattcactaagaaattatctatccactcttacaaatcatttagaaagacagcaggccaaagaaaaacaaaggacatcaacataaaggggacactatacacgtgatgctcaatatccacgaataacagtaaaagagtgaggactaaaaaatgaataatattcaatgttgatcaaagcgtggagaagcatctattgtttgtgggagtataaaccagtgcaatttctcataagagaaatttgatagacctatcaaaactgtaaatgcacataccctttgtcccagaaatctcacttctggatatttatcttgcagatttaatatggcatagatccatattcagagatattcattaaagcaatatttgaaatagcaaaaaaatctggaaacaatttaagtatccatcaaaaagagagactgattatagcaatcatggtaacttcacatcgtaaagtattatgtagttccttaaaaagatcaggaaaccagtcataaatatattttaattacattgtatttcatagtcatatacgggaacttattttaaaagtcaaatgacattaagattcttaaaatgaaatatcataattccctgttctcctccccagttccctggttccttccccagaaacactcttgtctcactatcttagctgtgatatcttctggcatttactcatcaccttrtttctaaaccagtactgttgtttctgggacacatgtgattttatttatttaaatgaattttttggcaaatacaaaatatagaagtataatacaagccacatatgtaattttaaattttctggtagccacatttaaaataattaaaagaaataggtccaggaatggtggctcacgtctgtaatcccagaactttgggaggcagagcctagcagatcagtcgaggccaggaatttgagaccagcctggccatcatggcgaaaccccatctctacag

SEQ ID NO: 22600 - DNA, 529 bp, Homo sapiens
aacaagagcgaaactccatctcaaagaaaaaaaagaaggagaaggagaagaagaagaagaagaaataatcaagtatgatcaaatctttcagtttagtagctacttaggtttttgggggttttttggtagtagtttttagccatgcatggcactatataacataatgcagaagagaagcagaaaattatasaactagagacagataccctgaattggtggtgagaggaactagcaattaggtgtggaaaaggtgttttcatattgctcttatctgtaggcatctttcgtgtatcgtttgtagcctcctatttcagggtcatgtctttcaaggtgacattattctttaggttaaattccagtgattttcctatgcactgatgtaatgactatgcagtattttttatctggtggatattataaatattagtaatttcctgattttatatgcttttccccaaattccacactggaagtattgttataaatacttattataactgggaaaaataactcattacaacccagactg

SEQ ID NO: 22601 - DNA, 529 bp, Homo sapiens
aacaagagcgaaactccatctcaaagaaaaaaaagaaggagaaggagaagaagaagaagaagaaataatcaagtatgatcaaatctttcagtttagtagctacttaggtttttgggggttttttggtagtagtttttagccatgcatggcactatataacataatgcagaagagaagcagaaaattatacaactagagacagataccctgaattggtggtgagaggaactagcaattaggtgtggaaaaggtgttttcatattgcycttatctgtaggcatctttcgtgtatcgtttgtagcctcctatttcagggtcatgtctttcaaggtgacattattctttaggttaaattccagtgattttcctatgcactgatgtaatgactatgcagtattttttatctggtggatattataaatattagtaatttcctgattttatatgcttttccccaaattccacactggaagtattgttataaatacttattataactgggaaaaataactcattacaacccagactg

SEQ ID NO: 22602 - DNA, 539 bp, Homo sapiens
gtgagccatcacgctcggccagcccttgtktttatgaacatcgtgtatccttaaggaccttcaaatacttctgcatccatttgtatgcatctttagttttgttctgaaaacctcaagatatagcacgctatgtgtatagtttgcaacttgaatttttttcactcaacactgtgtttctgagaccaatcctcgctgatacatagagagctagttaattcctcctgccttctgcatagcatctcactatgttattaattgccttttgttttctcaagctatttctgtgttgatgggcatttgtgttgtgtctactgccttgctattgaaaatagcacttcagtgcgtgcaccgcgtaggcctctgtgtactaccgtgaagtgtttcctgaggccagtagttctcaacttggctgcagacagaatcacctgaacgttttttttttaacaatcacaccaactctctgcctttccccaaattcttaattgaatggttcagggtaggcatcggcagttttagaagctccagggtgcttctaaatg

SEQ ID NO: 22603 - DNA, 539 bp, Homo sapiens
gtgagccatcacgctcggccagcccttgtttttatgaacatcgtgtatccttaaggaccttcaaatacttctgcatccatttgtatgcatctttagttttgttctgaaaacctcaagatatagcacgctatgtgtatagtttgcaacttgaatttttttcactcaacactgtgtttctgagaccaatcctcgctgatacatagagagctagttaattcctcctgccttctgcatagcatctcactatgttattaattgycttttgttttctcaagctatttctgtgttgatgggcatttgtgttgtgtctactgccttgctattgaaaatagcacttcagtgcgtgcaccgcgtaggcctctgtgtactaccgtgaagtgtttcctgaggccagtagttctcaacttggctgcagacagaatcacctgaacgttttttttttaacaatcacaccaactctctgcctttccccaaattcttaattgaatggttcagggtaggcatcggcagttttagaagctccagggtgcttctaaatg

SEQ ID NO: 22604 - DNA, 539 bp, Homo sapiens
gtgagccatcacgctcggccagcccttgtttttatgaacatcgtgtatccttaaggaccttcaaatacttctgcatccatttgtatgcatctttagttttgttctgaaaacctcaagatatagcacgctatgtgtatagtttgcaacttgaatttttttcactcaacactgtgtttctgagaccaatcctcgctgatacatagagagctagttaattcctcctgccttctgcatagcatctcactatgttattaattgccttttgttttctcaagctatttctgtgttgatgggcatttgtgttgtgtctactgccttgctattgaaaatagcacttcagtgygtgcaccgcgtaggcctctgtgtactaccgtgaagtgtttcctgaggccagtagttctcaacttggctgcagacagaatcacctgaacgttttttttttaacaatcacaccaactctctgcctttccccaaattcttaattgaatggttcagggtaggcatcggcagttttagaagctccagggtgcttctaaatg

SEQ ID NO: 22605 - DNA, 539 bp, Homo sapiens
gtgagccatcacgctcggccagcccttgtttttatgaacatcgtgtatccttaaggaccttcaaatacttctgcatccatttgtatgcatctttagttttgttctgaaaacctcaagatatagcacgctatgtgtatagtttgcaacttgaatttttttcactcaacactgtgtttctgagaccaatcctcgctgatacatagagagctagttaattcctcctgccttctgcatagcatctcactatgttattaattgccttttgttttctcaagctatttctgtgttgatgggcatttgtgttgtgtctactgccttgctattgaaaatagcacttcagtgcgtgcaccgcgtaggcctctgtgtactaccgtgaagtgtttcctgaggccagtagttctcaacttggctgcagacagaatcacctgaacgttttttttttaacratcacaccaactctctgcctttccccaaattcttaattgaatggttcagggtaggcatcggcagttttagaagctccagggtgcttctaaatg

SEQ ID NO: 22606 - DNA, 2174 bp, Homo sapiens
gagcccagaagttcaagaccagcctgggcaacatagtgagaccccatctcttaaaaaaagaaaagaaaaaacatctaattttgttgattcctcaaaacttcctggcacagtttgaactaatccaactacctggactataatgaatttcagggtaacattagtgagacgtagtgaagaactgaagtcttttctctcaacccagtgtcttgagaatagcaggggaaactgattcccgtttagcatgctagatgagtcaatgaaggaagggttgactgtgagattacaaaaacacattttctaaagaattgtagaaaaccaggatcacaaactcattctgtaacaaaaatgaagcaccactgatttacagaggaattcacaactggtgatgtctcttaaattaagaaacttaataggaactccctcatcgaggcaggctctgcttcagctgaggaataaattagccagagccagatggaggaaaagagaactgatgtggtaactgtttggacttccaggaaggccaaaagctctcatgtttcttccaccaagaggactacaatgaagaactcaaccatcagtgaaagaagagtcttctccagaaatctgattggaaatgatgacacaaataccaccatcagtcaaagtgggaccctgacttgctcatggtggtaccaggttagaatcatggcaaaaagcaggttgtaggtttcacattacatagtttggcccatggtttccactgccaatactttgggagagaggtaaactggttaggtggaaatgagttaggtgctgaactggttaggtggaaccttggtcttatttcctggagatgtgacattttgggggcctgttcctgctgcgactggcacagcaatcaggacttgcagccaccagagggtcccagggctggggaggagacaggggtcttgcgtatctgaagttcagcgtctcggcagcgtggctacttgcaggagggaggagctcgctctggatccattckagagagacttgtcccttccccctcttctgccccacccctgggccactttcctgtcccctgactcccacttgactttgtttccactaattggagcttagctcagaaaatggagggggctgaagttataggttatgggaggggaaatttaagtttgggaagacggaggctcccttgattggcactaccagccacatctgcagccacatgagggtctcaatgctggggcagggggcagtgagactggccaggaacctgagtcccccggggactcgcagacacctgccccacacatcctgagtgtgctgagggagacccagccgagatcagctgtgctcctgggtaggtgagagcaggccctgcagggggcccagtccacccaggaaggatgcccagagtggctgagtgtgcacctccctcttctgcctctccttttccgctgcaagcaagaccgggggtcaggagttacagctgccagagtccagaacgggcccctcctccccagcaatgtgggtggggtcaggggctcaggtcaaattcaaggaaaatcttcaagccacatggtatagagccaaagctaaagaggccgccctaataatagacagcagcagccccttacagacatgctcagactcatagggtctcagaatgcaattctccacagtagaaaggacatctgccctgacagaagactgcactcctttaagcaaatacaggtatatcccagtagataaactggggtcatctggcccataatttaaaggtagacctgtatgttcaaattatgttagtgaaataaaattcatgacatgaacattttccttggaaagaaacatcctgtaagtggctcctggagcctaaaacatcctctggaacttccttgtgcccatgtaggtcatgactggtaaaattatgatgagaaccaagtcttattttcctacaggaaaatggaacaaatggagacaaagccctgggcagccccattgcatgtttcaggaggaaaagtaacatcagctagggattagactttcagatattctttcctttaaactaattgtcttcaaattctttgtcccatccccctaaagaatctttgtgtatactcccacgcaggttttgtagacacttatttttgcatcatacacttaaatcatagcaaatgattttaattgtg

SEQ ID NO: 22607 - DNA, 2174 bp, Homo sapiens
gagcccagaagttcaagaccagcctgggcaacatagtgagaccccatctcttaaaaaaagaaaagaaaaaacatctaattttgttgattcctcaaaacttcctggcacagtttgaactaatccaactacctggactataatgaatttcagggtaacattagtgagacgtagtgaagaactgaagtcttttctctcaacccagtgtcttgagaatagcaggggaaactgattcccgtttagcatgctagatgagtcaatgaaggaagggttgactgtgagattacaaaaacacattttctaaagaattgtagaaaaccaggatcacaaactcattctgtaacaaaaatgaagcaccactgatttacagaggaattcacaactggtgatgtctcttaaattaagaaacttaataggaactccctcatcgaggcaggctctgcttcagctgaggaataaattagccagagccagatggaggaaaagagaactgatgtggtaactgtttggacttccaggaaggccaaaagctctcatgtttcttccaccaagaggactacaatgaagaactcaaccatcagtgaaagaagagtcttctccagaaatctgattggaaatgatgacacaaataccaccatcagtcaaagtgggaccctgacttgctcatggtggtaccaggttagaatcatggcaaaaagcaggttgtaggtttcacattacatagtttggcccatggtttccactgccaatactttgggagagaggtaaactggttaggtggaaatgagttaggtgctgaactggttaggtggaaccttggtcttatttcctggagatgtgacattttgggggcctgttcctgctgcgactggcacagcaatcaggacttgcagccaccagagggtcccagggctggggaggagacaggggtcttgcgtatctgaagttcagcgtctcggcagcgtggctacttgcaggagggaggagctcgctctggatccattctagagagacttgtcccttccccctcttctgccccacccctgggccactttcctgtcccctgactcccacttgactttgtttycactaattggagcttagctcagaaaatggagggggctgaagttataggttatgggaggggaaatttaagtttgggaagacggaggctcccttgattggcactaccagccacatctgcagccacatgagggtctcaatgctggggcagggggcagtgagactggccaggaacctgagtcccccggggactcgcagacacctgccccacacatcctgagtgtgctgagggagacccagccgagatcagctgtgctcctgggtaggtgagagcaggccctgcagggggcccagtccacccaggaaggatgcccagagtggctgagtgtgcacctccctcttctgcctctccttttccgctgcaagcaagaccgggggtcaggagttacagctgccagagtccagaacgggcccctcctccccagcaatgtgggtggggtcaggggctcaggtcaaattcaaggaaaatcttcaagccacatggtatagagccaaagctaaagaggccgccctaataatagacagcagcagccccttacagacatgctcagactcatagggtctcagaatgcaattctccacagtagaaaggacatctgccctgacagaagactgcactcctttaagcaaatacaggtatatcccagtagataaactggggtcatctggcccataatttaaaggtagacctgtatgttcaaattatgttagtgaaataaaattcatgacatgaacattttccttggaaagaaacatcctgtaagtggctcctggagcctaaaacatcctctggaacttccttgtgcccatgtaggtcatgactggtaaaattatgatgagaaccaagtcttattttcctacaggaaaatggaacaaatggagacaaagccctgggcagccccattgcatgtttcaggaggaaaagtaacatcagctagggattagactttcagatattctttcctttaaactaattgtcttcaaattctttgtcccatccccctaaagaatctttgtgtatactcccacgcaggttttgtagacacttatttttgcatcatacacttaaatcatagcaaatgattttaattgtg

SEQ ID NO: 22608 - DNA, 2174 bp, Homo sapiens
gagcccagaagttcaagaccagcctgggcaacatagtgagaccccatctcttaaaaaaagaaaagaaaaaacatctaattttgttgattcctcaaaacttcctggcacagtttgaactaatccaactacctggactataatgaatttcagggtaacattagtgagacgtagtgaagaactgaagtcttttctctcaacccagtgtcttgagaatagcaggggaaactgattcccgtttagcatgctagatgagtcaatgaaggaagggttgactgtgagattacaaaaacacattttctaaagaattgtagaaaaccaggatcacaaactcattctgtaacaaaaatgaagcaccactgatttacagaggaattcacaactggtgatgtctcttaaattaagaaacttaataggaactccctcatcgaggcaggctctgcttcagctgaggaataaattagccagagccagatggaggaaaagagaactgatgtggtaactgtttggacttccaggaaggccaaaagctctcatgtttcttccaccaagaggactacaatgaagaactcaaccatcagtgaaagaagagtcttctccagaaatctgattggaaatgatgacacaaataccaccatcagtcaaagtgggaccctgacttgctcatggtggtaccaggttagaatcatggcaaaaagcaggttgtaggtttcacattacatagtttggcccatggtttccactgccaatactttgggagagaggtaaactggttaggtggaaatgagttaggtgctgaactggttaggtggaaccttggtcttatttcctggagatgtgacattttgggggcctgttcctgctgcgactggcacagcaatcaggacttgcagccaccagagggtcccagggctggggaggagacaggggtcttgcgtatctgaagttcagcgtctcggcagcgtggctacttgcaggagggaggagctcgctctggatccattctagagagacttgtcccttccccctcttctgccccacccctgggccactttcctgtcccctgactcccacttgactttgtttccactaattggagcttagctcagaaaatggagggggctgaagttataggttatgggaggggaaatttaagtttgggaagacrgaggctcccttgattggcactaccagccacatctgcagccacatgagggtctcaatgctggggcagggggcagtgagactggccaggaacctgagtcccccggggactcgcagacacctgccccacacatcctgagtgtgctgagggagacccagccgagatcagctgtgctcctgggtaggtgagagcaggccctgcagggggcccagtccacccaggaaggatgcccagagtggctgagtgtgcacctccctcttctgcctctccttttccgctgcaagcaagaccgggggtcaggagttacagctgccagagtccagaacgggcccctcctccccagcaatgtgggtggggtcaggggctcaggtcaaattcaaggaaaatcttcaagccacatggtatagagccaaagctaaagaggccgccctaataatagacagcagcagccccttacagacatgctcagactcatagggtctcagaatgcaattctccacagtagaaaggacatctgccctgacagaagactgcactcctttaagcaaatacaggtatatcccagtagataaactggggtcatctggcccataatttaaaggtagacctgtatgttcaaattatgttagtgaaataaaattcatgacatgaacattttccttggaaagaaacatcctgtaagtggctcctggagcctaaaacatcctctggaacttccttgtgcccatgtaggtcatgactggtaaaattatgatgagaaccaagtcttattttcctacaggaaaatggaacaaatggagacaaagccctgggcagccccattgcatgtttcaggaggaaaagtaacatcagctagggattagactttcagatattctttcctttaaactaattgtcttcaaattctttgtcccatccccctaaagaatctttgtgtatactcccacgcaggttttgtagacacttatttttgcatcatacacttaaatcatagcaaatgattttaattgtg

SEQ ID NO: 22609 - DNA, 2174 bp, Homo sapiens
gagcccagaagttcaagaccagcctgggcaacatagtgagaccccatctcttaaaaaaagaaaagaaaaaacatctaattttgttgattcctcaaaacttcctggcacagtttgaactaatccaactacctggactataatgaatttcagggtaacattagtgagacgtagtgaagaactgaagtcttttctctcaacccagtgtcttgagaatagcaggggaaactgattcccgtttagcatgctagatgagtcaatgaaggaagggttgactgtgagattacaaaaacacattttctaaagaattgtagaaaaccaggatcacaaactcattctgtaacaaaaatgaagcaccactgatttacagaggaattcacaactggtgatgtctcttaaattaagaaacttaataggaactccctcatcgaggcaggctctgcttcagctgaggaataaattagccagagccagatggaggaaaagagaactgatgtggtaactgtttggacttccaggaaggccaaaagctctcatgtttcttccaccaagaggactacaatgaagaactcaaccatcagtgaaagaagagtcttctccagaaatctgattggaaatgatgacacaaataccaccatcagtcaaagtgggaccctgacttgctcatggtggtaccaggttagaatcatggcaaaaagcaggttgtaggtttcacattacatagtttggcccatggtttccactgccaatactttgggagagaggtaaactggttaggtggaaatgagttaggtgctgaactggttaggtggaaccttggtcttatttcctggagatgtgacattttgggggcctgttcctgctgcgactggcacagcaatcaggacttgcagccaccagagggtcccagggctggggaggagacaggggtcttgcgtatctgaagttcagcgtctcggcagcgtggctacttgcaggagggaggagctcgctctggatccattctagagagacttgtcccttccccctcttctgccccacccctgggccactttcctgtcccctgactcccacttgactttgtttccactaattggagcttagctcagaaaatggagggggctgaagttataggttatgggaggggaaatttaagtttgggaagacggaggctcccttgattggcactaycagccacatctgcagccacatgagggtctcaatgctggggcagggggcagtgagactggccaggaacctgagtcccccggggactcgcagacacctgccccacacatcctgagtgtgctgagggagacccagccgagatcagctgtgctcctgggtaggtgagagcaggccctgcagggggcccagtccacccaggaaggatgcccagagtggctgagtgtgcacctccctcttctgcctctccttttccgctgcaagcaagaccgggggtcaggagttacagctgccagagtccagaacgggcccctcctccccagcaatgtgggtggggtcaggggctcaggtcaaattcaaggaaaatcttcaagccacatggtatagagccaaagctaaagaggccgccctaataatagacagcagcagccccttacagacatgctcagactcatagggtctcagaatgcaattctccacagtagaaaggacatctgccctgacagaagactgcactcctttaagcaaatacaggtatatcccagtagataaactggggtcatctggcccataatttaaaggtagacctgtatgttcaaattatgttagtgaaataaaattcatgacatgaacattttccttggaaagaaacatcctgtaagtggctcctggagcctaaaacatcctctggaacttccttgtgcccatgtaggtcatgactggtaaaattatgatgagaaccaagtcttattttcctacaggaaaatggaacaaatggagacaaagccctgggcagccccattgcatgtttcaggaggaaaagtaacatcagctagggattagactttcagatattctttcctttaaactaattgtcttcaaattctttgtcccatccccctaaagaatctttgtgtatactcccacgcaggttttgtagacacttatttttgcatcatacacttaaatcatagcaaatgattttaattgtg

SEQ ID NO: 22610 - DNA, 2174 bp, Homo sapiens
gagcccagaagttcaagaccagcctgggcaacatagtgagaccccatctcttaaaaaaagaaaagaaaaaacatctaattttgttgattcctcaaaacttcctggcacagtttgaactaatccaactacctggactataatgaatttcagggtaacattagtgagacgtagtgaagaactgaagtcttttctctcaacccagtgtcttgagaatagcaggggaaactgattcccgtttagcatgctagatgagtcaatgaaggaagggttgactgtgagattacaaaaacacattttctaaagaattgtagaaaaccaggatcacaaactcattctgtaacaaaaatgaagcaccactgatttacagaggaattcacaactggtgatgtctcttaaattaagaaacttaataggaactccctcatcgaggcaggctctgcttcagctgaggaataaattagccagagccagatggaggaaaagagaactgatgtggtaactgtttggacttccaggaaggccaaaagctctcatgtttcttccaccaagaggactacaatgaagaactcaaccatcagtgaaagaagagtcttctccagaaatctgattggaaatgatgacacaaataccaccatcagtcaaagtgggaccctgacttgctcatggtggtaccaggttagaatcatggcaaaaagcaggttgtaggtttcacattacatagtttggcccatggtttccactgccaatactttgggagagaggtaaactggttaggtggaaatgagttaggtgctgaactggttaggtggaaccttggtcttatttcctggagatgtgacattttgggggcctgttcctgctgcgactggcacagcaatcaggacttgcagccaccagagggtcccagggctggggaggagacaggggtcttgcgtatctgaagttcagcgtctcggcagcgtggctacttgcaggagggaggagctcgctctggatccattctagagagacttgtcccttccccctcttctgccccacccctgggccactttcctgtcccctgactcccacttgactttgtttccactaattggagcttagctcagaaaatggagggggctgaagttataggttatgggaggggaaatttaagtttgggaagacggaggctcccttgattggcactaccagccacatctgcagccacatgagggtctcaatgctggggcagggggcagtgagactggccaggaacctgagtcccccggggactcgcagacacctgccccacacatcctgagtgtgctgagggagacccagccgagatcagctgtgctcctgggtaggtgagagcaggccctgcagggggcccagtccacccaggaaggatgcccagagtggctgagtgtgcacctccctcttctgcctctccttttccgctgcaagcaagaccgggggtcaggagttacagstgccagagtccagaacgggcccctcctccccagcaatgtgggtggggtcaggggctcaggtcaaattcaaggaaaatcttcaagccacatggtatagagccaaagctaaagaggccgccctaataatagacagcagcagccccttacagacatgctcagactcatagggtctcagaatgcaattctccacagtagaaaggacatctgccctgacagaagactgcactcctttaagcaaatacaggtatatcccagtagataaactggggtcatctggcccataatttaaaggtagacctgtatgttcaaattatgttagtgaaataaaattcatgacatgaacattttccttggaaagaaacatcctgtaagtggctcctggagcctaaaacatcctctggaacttccttgtgcccatgtaggtcatgactggtaaaattatgatgagaaccaagtcttattttcctacaggaaaatggaacaaatggagacaaagccctgggcagccccattgcatgtttcaggaggaaaagtaacatcagctagggattagactttcagatattctttcctttaaactaattgtcttcaaattctttgtcccatccccctaaagaatctttgtgtatactcccacgcaggttttgtagacacttatttttgcatcatacacttaaatcatagcaaatgattttaattgtg

SEQ ID NO: 22611 - DNA, 523 bp, Homo sapiens
ttctctagaatgagtatgtgtgcattacttttatccttccatttaattgcaaagatctgtacattatcagcatgctattttgagagaacattagaggaactgatgtattttttaaaaacaactaatcactttcttgctttctgtattagcacaacttattctgcacaggctccagcttggggaaggggggagtggtcctgaaaccaaagggttttrggatgcatttaaagaatcatatacttttacacccttttttattaccctaattactttcctatttgcattccaaatgctgctttattgaaatccaattcaaattcagattatagtctctgaataagaggaagccactaaactgtgcttattgttagaaatggcccttggagaaatctgaagcctctgttgtgctacctaaaaaatgcgaatattctttttgatccagacagaggacaagttggactaaaatgcctgtggcagtagggaggcaacattctaaagaagaacatgatttatttaaaactca

SEQ ID NO: 22612 - DNA, 795 bp, Homo sapiens
ttgtcacaagcatccttctcacgaccctgcctcactccaaaaggggtatcaggtaggtgagcagaaacgccccttcctgaatgcctgtccttgtcccaccacaaggatgaggatgcctgctcagagggcacagggagaagccaatggcatagggtgcacagcagcgagggccaagggacaagsagtggggggcccccacctgcccagcgtgacctgctgaccacagctcctcagcggcgggacaaagcctgcccatggggccctcagtggccaccctggatgcaaacacggttaatggtcaggcccagcctgtcccctcctgcgcacaaactcagggcagagcagagagcttacatccaccaagacccagacaaaagaaagccccaagaacacccttaaaggcagccaaaccctggagctgcctcgggcccatcgatgggagcacaagaggtgaatcctgctacgggcaccgtggccgtctacgcgaccgcagcaaagaggaacatggacgactcacagacgcagagacggggggtccatgctgtgtggtgatgttcacctgcagctcagggacaaaccctacctacggtgacagatgtcaggaggggtgaagggtgagggagggagggcctgttagctggagcgggtctcagggatgcctgctgctgctgctggaaacattctgcacaggggttcgggtggaggttctgggagtgtcacccgtgcacacttgtcagcatgctctccaggtcctgcatttgaggtgcctgtaccccagtggaaagatgacggaca

SEQ ID NO: 22613 - DNA, 474 bp, Homo sapiens
ggctcatttcatccatcaggcctcagctcaactggcactcctcaaaaagactttctgtggctactctcagggtcccctctagttacctgtttatttctcctacagtacttttagagcaaacccttcttaaaaataaactctaaaatataactgagggctctttttttcagatgcttgactagcaattcatgttactcatcatcttgcttccaatgttccaccacatctgttcctgcctcttggatttgggtacagacacctttcccagggcttggaagtggctttytaagatttacattgatcaacctagggttaaaaccctttcaggctgctggcacttctgcttgcgctagtgtgagggcttatctcaccactgaaatgctggttctcctgcagttgcacttggtgggtccagtttcccttttctgtaagccacagagggtggggaaaagagctctgccttttcctgtttct

SEQ ID NO: 22614 - DNA, 474 bp, Homo sapiens
ggctcatttcatccatcaggcctcagctcaactggcactcctcaaaaagactttctgtggctactctcagggtcccctctagttacctgtttatttctcctacagtacttttagagcaaacccttcttaaaaataaactctaaaatataactgagggctctttttttcagatgcttgactagcaattcatgttactcatcatcttgcttccaatgttccaccacatctgttcctgcctcttggatttgggtacagacacctttcccagggcttggaagtggctttctaagatttacattgatcaacctagggttaaaaccctttcaggctgctggcacttytgcttgcgctagtgtgagggcttatctcaccactgaaatgctggttctcctgcagttgcacttggtgggtccagtttcccttttctgtaagccacagagggtggggaaaagagctctgccttttcctgtttct

SEQ ID NO: 22615 - DNA, 536 bp, Homo sapiens
taattgcaaatcagtatttgtttttatgtatttgctttatgtacctctttagatatgaaggactttattcattattcttaaagccattttaataccaacatacctaccagataggccacataaatcagcgtttacttgcttcaagaaacccaagttctaatctcatcagttgtctggactatgatatatatagtgatagccatttttgtggggttttctttgwttgtttaattaggcagccttccaatccaaagtaggaccagagagactccctcttttgttgttattatcattatcattattatatcaggcagccccctgagccacagtagactcagaaaaactcccagttatagccatttttgggtatgagcttggggcttcgctgaattatgaggcctaatttgctgcatggattagatatagaaatgtgactgtatgaaaagggcataaggaaaagttaaaaggtacatgttctcaggatctcctggggctgtgtcattccctggtcacttgaaaaaaagaaagaaaagtta

SEQ ID NO: 22616 - DNA, 811 bp, Homo sapiens
atagataaagagcagtgacacgtgctctattttatgccctcttccttccaaacagggccaggataagatacacagtcacccctccttcccaattccaacagagcagcaagataaatgtgtccttctcggctgctctgaaataaacggatttgaggaattacagaccaatcccctggggagaaaaagctaaaracacagcattgggcccatagcaagggcttattaaatatggattaaattgctgatgtctctttttctttcagaggttgggtataggtacaggaggaaaatattaatatacattgcgttaaatataatagtggttgaaatttaggtgcctccctttaaaagctaagaaatgttatctgtctctctccacccacccaactcccaactccagcaagtctataagccttcttggcatgaactcttatatatcaacttcattcctagctccattttttcttctacagacttattttctctttgccttttgtttcttattttgttctgttttactgtgttgcatctttccaagtggttttcagtccactgtgaaacaagacagtatacacaaagacatactgtggttattttttgccaaagcaaattttgggggcatgatgtggcatcatttaatgagtgttctcatagagactatggaacctaaatgtgcagtcaatatctgaacttggtgtaagtcctagaaaatctaggatgcacaaacatactggaagccactaaaccttggactggtcctatacagaccctggcactgtcagatcacattcccagtttggttcagatactg

SEQ ID NO: 22617 - DNA, 556 bp, Homo sapiens
cagtgtacrtcttaaaagagccagttaagtggtgattgatactgttgaacatacctaaagtagagaacatttgttgttgcaaaaagaaagtttatatatatataaaaaatatatttataatctatatattatatataatttatatacacatgtgtgtatataaagttgaaatatatgtttcaaatatgtatatatttatatagatttctaataggaagcatggaagtacatgtagccaggtaaggatagaggacaaagtgtttatgaaacagagccttgaacagaaaatcagcagacatttgactgcgtgtttctttcactttttaaatttgattacctagaatgtgaatatataagaaacacacaattaaattgaataattatgaatgttaggagcctctttaattttcaatgaaccttttacatatgtgtaggaaatactattattaagccccatcagaaaatggaatattctagttttatcacatagtacagtttaacaaaaattagcctctccatctcatatgtatcatctgttttcaaatataaatatatg

SEQ ID NO: 22618 - DNA, 556 bp, Homo sapiens
cagtgtacatcttaaaagagccagttaagtggtgattgatactgttgaacatacctaaagtagagaacatttgttgttgcaaaaagaaagtttatatatatataaaaaatatatttataatctatatattatatataatttatatacacatgtgtgtatataaagttgaaatatatgtttcaaatatgtatatatttatayagatttctaataggaagcatggaagtacatgtagccaggtaaggatagaggacaaagtgtttatgaaacagagccttgaacagaaaatcagcagacatttgactgcgtgtttctttcactttttaaatttgattacctagaatgtgaatatataagaaacacacaattaaattgaataattatgaatgttaggagcctctttaattttcaatgaaccttttacatatgtgtaggaaatactattattaagccccatcagaaaatggaatattctagttttatcacatagtacagtttaacaaaaattagcctctccatctcatatgtatcatctgttttcaaatataaatatatg

SEQ ID NO: 22619 - DNA, 556 bp, Homo sapiens
cagtgtacatcttaaaagagccagttaagtggtgattgatactgttgaacatacctaaagtagagaacatttgttgttgcaaaaagaaagtttatatatatataaaaaatatatttataatctatatattatatataatttatatacacatgtgtgtatataaagttgaaatatatgtttcaaatatgtatatatttatatagatttctaataggaagcatggaagtacatgtagccaggtaaggatagaggacaaagtgtttatgaaacagagccttgaacagaaaatcagcagacatttgactgygtgtttctttcactttttaaatttgattacctagaatgtgaatatataagaaacacacaattaaattgaataattatgaatgttaggagcctctttaattttcaatgaaccttttacatatgtgtaggaaatactattattaagccccatcagaaaatggaatattctagttttatcacatagtacagtttaacaaaaattagcctctccatctcatatgtatcatctgttttcaaatataaatatatg

SEQ ID NO: 22620 - DNA, 545 bp, Homo sapiens
ggtggtctctgggcagcataccaaggtagtggagacagaagtggcttagtctcttaagacctagctttggaaggtatataatgtcattccagccacattctattgaccgagcaattcagatgaccagcccaggtctcggggtggggaaatggacttaccctcttartgggaggagaaacaaaatcaccttgcaaagggtcttcatacacagaatgggaagaatccacagccatattttataatctatcatagttggatagatgcatctgaatcacaagagagtaatttggatgatagagatttgaaagttatcaacgtatagattaaaggcttgtaaatcttggctgcatatcaggacatggaaaatgggaggttttccatatgttctacatataaaaatgacaagtatgcaagaaatatatgccccaaaatgttgggtgggagaactgggcttcatggcaagctgaggcttgacaccaacgcgtgcagaatgcaatctcacgttttgaagtgaagtcaaagaaactaggttaacaaatcagctt

SEQ ID NO: 22621 - DNA, 1140 bp, Homo sapiens
aatgtcattgttgctatctatctatctatatatatatatgtcagcacaactgaaacaatagaaagtgcttgcctccctagttccaccacacctgccgagattcacagggtgctttttctgggtcattcaaccaagacactagaatagaaaatgggatgggtatgtcttgacttcctcttaatataaacaagttatcaatgcataatatgcttggctaagcagccattggcatacgtttatattggttgacttccaccccaaatctgtccttcacaagcacggcttatcctccacaaatccacaaagcatacatttacattcattgaacatgcaagatggtagtctttttgcctcctttttcctatgtcaaataacggtcctcactagaaaaaagaagttttgaagcttttggaaaaatagctatttcaaggaaggaagaatctttattttctgatcttttacccagagattgaagtctgatctaataattamaccaaagaatttccctaccccacaaacatggattttgtcagtttacagatttgtgcttagctttggttacttttgaagattttatatatagcgagcgtaatggcttgatctcccttgctgtcttctgtggagacagctttaacatgtcttcccactgatagacactcacaatccatggctttttaagacatacacaccagtctcgtgttctttagaatatataaatagaagcattgaacatacacttggagctttctaaattgacttccctgaaccaacttagcaattaaagttgagctgaggtgcctgtcttttgcttgttaagtcttgcagtgttttctctgaaatggcaggtctcctgtgacaaatcaaagacatgttctctttaaattccctgaaaatcagaagggcacatttttccaatgatttttaattattctttactggaactgcatattgaaagtggagcatatcacctgggtagataaaggaaacagatgaaagaaaaaaccatatttatgattgtattcaccagtagtctgcaacactgattttttttaaagtcccaagttaatttcccatcattactaacagaaatacactgatttaaaatttcctactgctttagagaatagaaataaaaaatcc

SEQ ID NO: 22622 - DNA, 575 bp, Homo sapiens
attgacatagggacatgcatttctgcttcaccaaagtccccaccaacccctattgtcttccatctatttcacttactcctatttctggcatggtccttgtaggcatttgagtttgccactcatggatagggcctggcatggcaaactgcctggaccttccgcactgctccctaccatcaccctccaatcccagttcctgggagggaatcccgggtctcattccacccatttctcctccccagcaccttccccagttcctgcccaccatcatcttctcgcttctggctcactgcacccatctcttctctgttctccgtgtatacagctgtaatcattatctagttaattgctccgactctgagagagtaataaaatttctcttatctcaacacaaagtctttggttacagcctggacaagtttcctggattaagctccaaggtgccaggaagtctggaacaatatctccatrtcaaaaacaatgaagcagctggcacaggggctcacgcctgtaatcccagcctgggcgacagagcgagtccttgtctctaaacaaaacaaaacaaaaactgctgc

SEQ ID NO: 22623 - DNA, 575 bp, Homo sapiens
attgacatagggacatgcatttctgcttcaccaaagtccccaccaacccctattgtcttccatctatttcacttactcctatttctggcatggtccttgtaggcatttgagtttgccactcatggatagggcctggcatggcaaactgcctggaccttccgcactgctccctaccatcaccctccaatcccagttcctgggagggaatcccgggtctcattccacccatttctcctccccagcaccttccccagttcctgcccaccatcatcttctcgcttctggctcactgcacccatctcttctctgttctccgtgtatacagctgtaatcattatctagttaattgctccgactctgagagagtaataaaatttctcttatctcaacacaaagtctttggttacagcctggacaagtttcctggattaagctccaaggtgccaggaagtctggaacaatatctccatatcaaaarcaatgaagcagctggcacaggggctcacgcctgtaatcccagcctgggcgacagagcgagtccttgtctctaaacaaaacaaaacaaaaactgctgc

SEQ ID NO: 22624 - DNA, 1093 bp, Homo sapiens
agcagcttatgtgatggtccccatcctttctccctgtgcccctctttctcctctgttttcctctgctggctccttcttggccttcttggtaacagtgaccacccctagcaagtcagtttccagccttccagccctgcagtcccagggccaactcttgtcagttccagctccagggagggatcagcagagaggacatcaggcaggcaagccgtctgtcaaccctcatcctgcctcttttttttttttttttttttgagagtctcacgctgtcccccaggctggagtgcaatggcgcaatctcggctcactgcaacctctgtctcctgggttcaaacaattctcctgcctcagcctcctgagtagctgaggctacagtcatacaccatcatgcccggctaatttttgtgtttttagtacagatggggttttgccatgttgggcaggctggtcttgaactcctggcctcaagtgatccacccgcctcagtctcccaaagtgctgggattacaggcatgagccaccgtgcctggcctgctgcctctcctttctaagctgcatgaggccactgtgctaggtgtctcaggggcgggtgggggcaggaacaccttcccagaacctgagagctggaggggttgacaggcacatccttcccgccaggacctgccagattctgtgcatgatgctgcgcaaattcagcttccccaccgtggctctgcactccatgatgaagcaggtgaggccaccctggggcccgccagcctcaccctgggataccttccccgcctcagacattggccccgatccttccttctgccgggcgccttcttcctgccacctggtctcttctggtcccagaatatcgcagctcaagaggccctccctgaccgcatctcttttagccgtcattcatttgtcccggtctgacttctcatggccaccttcctcaatggacggctggggactgtcccggcctccaccctgtcccsaggcctcacacagaaaaccctgccttcatgcattcccaattttcttcccaaccctgtgcagaaagaacgctttgccgccctagccaagttcaagtccagcatctacc

SEQ ID NO: 22625 - DNA, 520 bp, Homo sapiens
atttaatgataatatctttacttgttttattgttaccactatgtgcaataattcttcatagagttgccttctgattggctaacatacatccacaaacacacattaacaaatttatgcaattggcagcatttttaaaggaaattaatataattgttggtgtgatatgccttttttttcacttttttaaaaattatactttaagtactgggatacatgtgcacagcgtacagctttgttacataggtatgcacatgccatggtggtttgctgcacycatcaacatatgatctacattaggtatttctcccctagtccctcaccccaacaggccccagtgtgtgatattcccctccctgtgttcacgtattctcattgttcaactcccacttatgagcgagaacatgcggtgtttggttttctgttcctgtgttagtttgctgagaatgatggtttccagcttcatccatgtccctgcaaaggacatgaactcatccttttttatggctgcagagtattccat

SEQ ID NO: 22626 - DNA, 935 bp, Homo sapiens
tgctctctcagcatttcatctcccacagcatggggaccccaagcgccacgttaaggcatcaaggtttgtataatagcaaacactagygattgtacaccaaagctggtttctcttcttccatggcattgcagacacccaggcctcccagacaggaggcatggccatgcaaagctcttgccaatggcttgtgaatggacagtccgtgtcagggtgaagacatcaggcatctcctggcttcctatgtggctcacttcagccacactgacaacgaccagggtgccctagggcatacagagcaatgacttggaaggagcctggctcctggaatgactggcaggggcagagctgccccaccaaccaggactacgacctaagagagaaacagctgccctgttcttcaagcctccatattgcaggatctctttgttacagcagcatagccttaccctgactcatctagagcctgagaaagggacagggacctaggagtttggaggaggaagtggccattttgtgctgcaagaatcaaggaagacttcgtggaggaagatgacatttgcactaagctgaaaggaagtatgtattctgaataaataaaggtgtatccatgggaggacatactaataaacagttattgaagagcacgaggcagatccacacgtgcagacacgggaacatgcctcagttatgttgtcatggggagaaagcagagagtagaactgtacctctctgcttccatctctttacataggtatgcggttgataatagagaaaacaactggaaaaatacagactaaactgaagagtggggataagcacacggaaaggggagtcattttcttaattttcatttttttaagagacagggtctcgctctgtcacccacgctggagtgcagtagggcaatcaaagctctctgtaacctccaactcctg

SEQ ID NO: 22627 - DNA, 935 bp, Homo sapiens
tgctctctcagcatttcatctcccacagcatggggaccccaagcgccacgttaaggcatcaaggtttgtataatagcaaacactagcgattgtacaccaaagctggtttctcttcttccatggcattgcagacacccaggcctcccagacaggaggcatggccatgcaaagctcttgccaatggcttgtgaatggacagtccgtgtcagggtgaagacatcaggcatctcctggcttcctatgtggctcacttcagccacactgacaacgaccagggtgccctagggcatacagagcaatgacttggaaggagcctggctcctggaatgactggcaggggcagagctgccccaccaaccaggactacgacctaagagagaaacagctgccctgttcttcaagcctccatattgcaggatctctttgttacagcagcatagccttaccctgactcatctagagcctgagaaagggacagggacctaggagtttggaggaggaagtggccattttgtgctgcaagaatcaaggaagacttcstggaggaagatgacatttgcactaagctgaaaggaagtatgtattctgaataaataaaggtgtatccatgggaggacatactaataaacagttattgaagagcacgaggcagatccacacgtgcagacacgggaacatgcctcagttatgttgtcatggggagaaagcagagagtagaactgtacctctctgcttccatctctttacataggtatgcggttgataatagagaaaacaactggaaaaatacagactaaactgaagagtggggataagcacacggaaaggggagtcattttcttaattttcatttttttaagagacagggtctcgctctgtcacccacgctggagtgcagtagggcaatcaaagctctctgtaacctccaactcctg

SEQ ID NO: 22628 - DNA, 583 bp, Homo sapiens
ttccccttcccgtgcctgttaccctctcatagtttcagtggaaccctgctgattcattcaaatactgacagcaacaagtgagtgggagagagtggggtgctttggaccagttggggcttgtttccacaagtaagctgtagagataaatgtgggcatayggaggaaggtagggaaggcaggagtacctgtgagggacagacccttttctggaacaggaggagtcatgcttcaaacaagagcctttggggcactcagtggctgcctttcaaggctgcttcttttcactgcctctgaaaagccatcatgttagcctggacttctcttcccctccataatttgcaaaatttctagtaagctgttagaccagccacctcccaatggcaaggccccttacctagcaccatgcatacacagaattttttcagcagcctgttctccaagtagcaccctgagacactgcccaagaattggacattattccactcctctgcaaaacccacccagctcaggtgaagtctcagcttgggctctgggagatcagctttcccctcagtggtctgctgttaccttcccctctccctaa

SEQ ID NO: 22629 - DNA, 522 bp, Homo sapiens
ctgctctcccaacccatggagacctatgaaggggatgtgctgggggtccagaccccatattcctcagactcaacaattcttgttctttagaactgtgttctcaccttcccaacactgcactgccgaagtgtagcggcccccaaaccttgctctcatcaccagytagagcttcttcccgaagggcctttaggataggagaaagggttcatgcacacacgtgtgagaatggaagagccccctccagaccactctacagctgctctagccttagttgccactaggaagttttctgaggctggctgtaaagtaagtgtaaggtccacatccttggggaagtagttaaataaaatagttatgactgagctctcagcctgacttggattctgtcttaacacttctagcaaaagaaaataaatacatgtacagttatgcattgcttaatgatggggatgagttctgagaaatatatcgctaggtggtatcactgttgtgtgaataccatagagcacagttacacaaacc

SEQ ID NO: 22630 - DNA, 522 bp, Homo sapiens
ctgctctcccaacccatggagacctatgaaggggatgtgctgggggtccagaccccatattcctcagactcaacaattcttgttctttagaactgtgttctcaccttcccaacactgcactgccgaagtgtagcggcccccaaaccttgctctcatcaccagctagagcttcttcccgaagggcctttaggataggagaaagggttcatgcacacacgtgtgagaatggaagagccccctccagaccactctacagctgctctagccttagttgccactaggaagttttctgaggctggctgtaaagtaagtgtaaggtccacatccttggggaagtagttaaataaaatagttatgactgagctctcagcctgacttggattctgtcttaacacttctagcaaaagaaaataaatayatgtacagttatgcattgcttaatgatggggatgagttctgagaaatatatcgctaggtggtatcactgttgtgtgaataccatagagcacagttacacaaacc

SEQ ID NO: 22631 - DNA, 522 bp, Homo sapiens
ctgctctcccaacccatggagacctatgaaggggatgtgctgggggtccagaccccatattcctcagactcaacaattcttgttctttagaactgtgttctcaccttcccaacactgcactgccgaagtgtagcggcccccaaaccttgctctcatcaccagctagagcttcttcccgaagggcctttaggataggagaaagggttcatgcacacacgtgtgagaatggaagagccccctccagaccactctacagctgctctagccttagttgccactaggaagttttctgaggctggctgtaaagtaagtgtaaggtccacatccttggggaagtagttaaataaaatagttatgactgagctctcagcctgacttggattctgtcttaacacttctagcaaaagaaaataaatacatgtacagttatgcattgcttaatgatggggatgagttctgagaaatatatcgytaggtggtatcactgttgtgtgaataccatagagcacagttacacaaacc

SEQ ID NO: 22632 - DNA, 522 bp, Homo sapiens
ctgctctcccaacccatggagacctatgaaggggatgtgctgggggtccagaccccatattcctcagactcaacaattcttgttctttagaactgtgttctcaccttcccaacactgcactgccgaagtgtagcggcccccaaaccttgctctcatcaccagctagagcttcttcccgaagggcctttaggataggagaaagggttcatgcacacacgtgtgagaatggaagagccccctccagaccactctacagctgctctagccttagttgccactaggaagttttctgaggctggctgtaaagtaagtgtaaggtccacatccttggggaagtagttaaataaaatagttatgactgagctctcagcctgacttggattctgtcttaacacttctagcaaaagaaaataaatacatgtacagttatgcattgcttaatgatggggatgagttctgagaaatatatcgctaggkggtatcactgttgtgtgaataccatagagcacagttacacaaacc

SEQ ID NO: 22633 - DNA, 904 bp, Homo sapiens
ctccttgtctctgggtctcagtttccctgtctgcacagttggagrgttcaacagatgtcccccagttctcttccagctcagctgctccatgactgatacaaggggcggtgctctagccatagtccagggatgtgggggagaagaaagaagggtcactggggttgatttcagttctggagcagccaagagtcgagctgggttcggtgtgggcagtgccatggttgcagatggagaggtcagggaaaattcttaaaggaggcagttgatggcattctgggctggggtgaggagaaaggtgtgtgtgtttgacctctgtgaccctcattaggttaagggagtgggcttaagtcaggcaggcagggctttgactccttgccagctgtgtggccttaggcaggttgtttacctctctgagcctgtttcctcatctgtaaaattggggtaatacctataaaaaggaccgatagaggccgggggttgtggctcacgcctgtaatcccagcactttgggagactgaggcaggtgggtcaccctgtccaacatggtgaaaccacgtctctactaaaattacaaaatcagctgggcgtggtgtcgcacgcctataatcccagctacttgggaggctgaggcaggagaattgcttgaacccaggaggcggaggttgaagtgagctgagattgcaccactgcactccagcctgggcaacagagtgagactccgcctcaaaaaaaaaaaaaaaaaaaaaaaaaagacccataggaatagctccaggccaggcgtgggatctcaacactttgggaggccaaggcaggagaatcacttgagcccaggagttcaagactagcctgggcaacatagtgagaccttgtctctactaaaaattaaaaaaaaaaaaaatgatcc

SEQ ID NO: 22634 - DNA, 772 bp, Homo sapiens
tgtgtatgtgcgcaccctgagagtcttgggtttcatcctataaagactgtgccaggtctgccatcccaaggatacagcaagtaacaactccactaagtggcctgaagggtgttagaatggcagcctttctcagatcttcactggggaattaaggaactatgagtctaaagaagaggtagaaagaagaaaaactcagcaggcaagagtcagcacacatgagctagatcatctctgttgcagaaaagggaaccggggagtggctgctgggaggcaggggtggaagcattggagggcagagtgccaggagcctgcaatatcacatgtaaaatgaaatgccagtatcaaggctctgaagggctctgacaggcaatcagtaycccagctgagatgggagcaggtgtctcctccccaggaagggccacagggatggatgtcaagaggagataggaagcaggaggaagaaagagtgtcacatgctggctggaaagttgagaattcttgccccatgtctggggagtgcagcgagaaccctgtagttttgcctgctcaaccttcatcccttcacctcttctggaaataccattttgattttcctttgggggctccctccctcactctcagtccatgtagttctaaggagattgacccattgccaggctctacatgtgggcatgtgactcaagccagccccagcaaagccaaaccaggaacttttgtgagagccataagaagatactgtttttactaaggttgctaagttggtaggatataa

SEQ ID NO: 22635 - DNA, 1735 bp, Homo sapiens
ctaagtcaccttgtggtgcaatagagctctttaacctaatcctatttaactgaaatttatcctttaaccagtatctcccactgttttgtttaaaagtatgttttaacaaaaggtaattgcaactataggctaattctttgttgttgttgtcgttattgagagagggtcagtctcgctctgttgcccaggctggagtgcagtggcacgatcttggctcactacaacctccgcctcctgggttcaagagattctcgtgcctcagcttcctgagtagcagggattataggcatgcaccagtacacccagctaatttttgtagttttagtagaggtggggttttgccatgttggcttggctggtctcaaacttctgaccttaagtgatccacctgccttgacctcccaaagtgctgggattacaggcgtgagccaccactcccgaccaggctaattcttaaaaataatattttaggtgtatttccctccccaaattatatgattgcacaataggacattatttcatgtttgattttctartgtaatcaatcacaggatcattttaggaaaagttagtcaagggcttcctcaatttccctcttaaatcctttagtctttgatattcacatcatccccctaggaaacacctaattggttagacatgtcaccttccccttcatttgttaatggacctactctctgcgatccttatttccaatggctacactcatctgagcagtttgccaacacattcaccaactatgtgaaattctgcatattttacaaaacttaaattgtactttggtgcctgttttgttgtattttcaacatctcacaatccgtaacagggaagttgggctatggtggatggagagtatgttaaggaggaagagatgtttaagtggagagtgatttttctaagtggttgagttgtgtagagaatactcttcatgtctgatgactttagctttctccacaactagtggctacaggaacttggatactgactagttggagttatagctcagaggaagaagagagtacatgtacatctgagcagggagcctgccccttgggggatagcagtgacatcaacacatggcaatatgatgacgtcaaggtgagccaaggcaagtgggcgggtttcaggatctgagccagagggcatgggttagcgaacaggaaaggcaggaaatatttgttaaaagcttaggccaaaaaagtctcctatgtcaggccaaacactggtcccaattctataggtatttgaggtttctgaacagagaatggaacaagatgataatagttaatatttgttatgggctaggcactgtccaaatactttccatgagtaacacatttaattctcctattaacctggtgaggtactgtgacagcctcatttgaaactaagatgactgagccagtagagctgttaagccccttgcccaaggtcacccagaaagttgaagcagctgagccatggtttgaatctggcccctctgcctcctgaaatcacgctctcaaccgctgcgctacccagtctctcctgggcccaggatgaatggaagtgggtgctgggaggcgaggcaagatgaggtggaaagagcagtaagaggccacctgcatgaaaaaggcctaaaccagggcagagaagggttcaagagcaactccaaagaacactgaatgttaaagtactagtgctgtttcattggctttacacaggactgtttctttcc

SEQ ID NO: 22636 - DNA, 533 bp, Homo sapiens
ttttcctwtacctacccaaatcctataaaatggccccacccctatctccccttgctgactctcttttcggactcagcccgcctgcacccaggtgaaataaacagccatgttgctgacaaaaagcctgtttggtggtctcttcacacggacgcgagtgaaagtaagaattctttattaaaatacagtcatcacaggacatccatatgtctctgtctcagtctgcctgtctgtctgtctgtctaatctatttatcttatttgtctatctttctatgaatctaatctatctattctatcatctatcatctctctatcatctatcatctatccacgtgtttatcctatctatctctatctatctatctatctatctatctatctatctatctatctattatctctctctctctctctcctatatctgctttcagaggtattgtgggtatatttatagggactaaaatagaaaagacccatatagtatactgtgatgcaaatcaagttattctcagcatatagtgttcggtttgccct

SEQ ID NO: 22637 - DNA, 533 bp, Homo sapiens
ttttcctatacctacccaaatcctataaaatggccccacccctatctccccttgctgactctcttttcggactcagcccgcctgcacccaggtgaaataaacagccatgttgctgacaaaaagcctgtttggtggtctcttcacacggacgygagtgaaagtaagaattctttattaaaatacagtcatcacaggacatccatatgtctctgtctcagtctgcctgtctgtctgtctgtctaatctatttatcttatttgtctatctttctatgaatctaatctatctattctatcatctatcatctctctatcatctatcatctatccacgtgtttatcctatctatctctatctatctatctatctatctatctatctatctatctatctattatctctctctctctctctcctatatctgctttcagaggtattgtgggtatatttatagggactaaaatagaaaagacccatatagtatactgtgatgcaaatcaagttattctcagcatatagtgttcggtttgccct

SEQ ID NO: 22638 - DNA, 1065 bp, Homo sapiens
taaaaggactctgattaaccttgctgactagggaatttcataccaaagagataagtatgaaattctgcctgtatcatttatgagcaaaagctcatacatctgaaggragatcaagttggtaaagcctttggaaacagttttatggacagtccttcgtctttccagtatggaagtaaccagtgaaaaccaatagaagggacatttgtgttttctttaaagatttcttctgtgcttgacttcactctaaatactcagtggttggctcataattaatgttatatcactgacatcccttgactttcaatgacttattgcatttggcagttagaaagtcattctttatgttttctttatatcgtttttattttaaagtgatcatctggtaaacgcaattttggcttacttgtttttgcttttaagacccattatctccgccattcccagggaggtctctcaaatgccaaccagcacattttaaatgtttgctttacaaaatgtgagaaaagtttctttaaattaataaaacatgatttcatctgcagattttattatgaagcttaaaataacttagaaaagtaaagtgagagctctctaactttaagaatcatgattaggtgctggagaaagacaggatccacagtttgaacatgaactctggaggctggcttctaaatctgttctctgccaaattggtaagagaagctattcaatgagatgggcccagtgctacagaggaaagcagaaatgagcttccagacttatttgtaatccaatagctttattctgtcttcctcacaaaatacacatttcatatttgcttatgagctaaacttttgattactggtgtgcccagtagattgtaaatttgggaagcactatttagattttaggtgatttatttgccagcagagttctgagttcccttttcaaaaattatacactgactttcatataggcttagatggactatatttagggataaaatttagttacttcttaaatcctataaaaatgctgtatgttctaaataaataagaatggtttagaattgattgtactactttt

SEQ ID NO: 22639 - DNA, 1065 bp, Homo sapiens
taaaaggactctgattaaccttgctgactagggaatttcataccaaagagataagtatgaaattctgcctgtatcatttatgagcaaaagctcatacatctgaaggaagatcaagttggtaaagcctttggaaacagttttatggacagtccttcgtstttccagtatggaagtaaccagtgaaaaccaatagaagggacatttgtgttttctttaaagatttcttctgtgcttgacttcactctaaatactcagtggttggctcataattaatgttatatcactgacatcccttgactttcaatgacttattgcatttggcagttagaaagtcattctttatgttttctttatatcgtttttattttaaagtgatcatctggtaaacgcaattttggcttacttgtttttgcttttaagacccattatctccgccattcccagggaggtctctcaaatgccaaccagcacattttaaatgtttgctttacaaaatgtgagaaaagtttctttaaattaataaaacatgatttcatctgcagattttattatgaagcttaaaataacttagaaaagtaaagtgagagctctctaactttaagaatcatgattaggtgctggagaaagacaggatccacagtttgaacatgaactctggaggctggcttctaaatctgttctctgccaaattggtaagagaagctattcaatgagatgggcccagtgctacagaggaaagcagaaatgagcttccagacttatttgtaatccaatagctttattctgtcttcctcacaaaatacacatttcatatttgcttatgagctaaacttttgattactggtgtgcccagtagattgtaaatttgggaagcactatttagattttaggtgatttatttgccagcagagttctgagttcccttttcaaaaattatacactgactttcatataggcttagatggactatatttagggataaaatttagttacttcttaaatcctataaaaatgctgtatgttctaaataaataagaatggtttagaattgattgtactactttt

SEQ ID NO: 22640 - DNA, 631 bp, Homo sapiens
ctattttttagcaagaaaatagctcagcattaactccagccatctgttaaacaaatcatcaagtaccaagcaatggtgacaaacgcaaagtgaatgtaaaacccacagctctagcagatctgacctcgcgaagtccggcagaccctgttcctgacctctcgctatcacgccctaaactatgtctctgctacccrctacacttcctccttccccaacaacctctctgcatcaaatctacccttttgtcattgccaaagctgtcttctccaaaaccatttagactcttctattcatggccttcagcaaataggaagaataaaatctgggggagaaagggaaaaatgagttgctgatttttaatgctttaaataagtccacctggatcccagattatttagacattaaataccaatctatttagattccaaaagttatctgtgtcctttaggtttggtcagatgttctagaatttgaccttgggggtgtgactaagggggtgattcagtcctcctgcctgctctgtccagctgtgaggctgcccagagacccttaatgcaacctggcttgaatcttcccatgacaacatttcagacaacatttcattcccttctttggtgctgacattcacata

SEQ ID NO: 22641 - DNA, 581 bp, Homo sapiens
tcactctattaactttctctttttaaatttcctccagaaaaagaagtgcaccagtgtcctgaaggagtgactcccagaatttatacaaagaattagatctgaactgtacaggggtacattggagtagatgttgtgatgtgccctccacctcccccttcaggaatgatgcagacttattcccttacctgctgggattattatcagaaaacagycttggatgtcacctttgttcggcatttgcccttgtcaatgtcatgctcccttctaaggagagcctacatccaatgactggttgatgaaggagtaaaaagtatccagcctctgtgccccaacctggcatcattctggaggaccgtcaaagctgcaaagatccctgtgggtgtggctgatgtgtcacttgagagtgtatcacaacccagctaatttctctgcttacactgcttctttccttagaggttgaaggtcttacagtgaaagtaagaggattatgaactcggctcaggacaactctttcataaaaggaattattaatgtgttttaatgccagataccttcaaaagggtttttgtcacatttaaaat

SEQ ID NO: 22642 - DNA, 558 bp, Homo sapiens
ccgtcaacccagaagagcacccaaagtaccaatgtgaagagatcggagacctcaagctaaaaatctcaaaagataagtgttaataataaaccttccatggatatcctctttatagtcttgcctacacttgctgttcctacctttgttctgttctataccrcgaggcacaatattgttttcagaatgattagtatgttttgcttcttatttctgtaatctttggcactcaattcttcccctgcataatacacatatttgacccacgcacacgtcaccttgtaaaacttgtttatttctcttgcctggaggccatcaaactccaaagaggcaggcagctggagcctcagatgatggctttcttttgctggggatccttgggtagacctctgggaggaatgtggctgtcattttccccaaacaacaccccctttcagcaggaagtagctaagacttgtcattgtccatattctaagggcagttagatgtgcctcttcagagaagggaaatgatacagaacgtctgggctcctagctaaaccccactcttaagcctggaacc

SEQ ID NO: 22643 - DNA, 551 bp, Homo sapiens
ctagtcagccaggaaagattaaagagtatggccaggtccaaatgaatgaaggatctagaactcaagttgcccgacacagacaagcacagtcatgtctcagccaaaagtcagactctggattaacattttcacaatgctccaatttgggagawgatgaaaatggcctcaggaggcatcatgctcaaatagctcatggcctaaaaactcactgcacttcacagttgttacatagatcacggactctcgcacagagccttaaaagttatattagcagccgggcctggtggctcatgcctgtaatcccagcactttgggaggccgaggtggggcggatcacctaggtcaggagtttgaaaccagcctggcccaacatggtgaaacccggtctgtactaaaaatacaaaaattagccagacatggtggcaggcagtaatcccagctactcgggaggctgaggcaggagaatcacttgaacctgggaggcagaggttgcagtgagccaagatcctgccattgcactccagcctgggcaacaagagcgaaactttgtc

SEQ ID NO: 22644 - DNA, 1063 bp, Homo sapiens
cttgagcccaggaattcaaggctgcagtgagctaggatagtgccactgcactccagccttggtgacagagcgagaccctctctcaacaataacaaagaacctagccaagggaccgtggctagggggttgggccctttctctctcagatctacctaatggtctgggctcaacttctcctttagaaaaagagcttggtggtggtagattgtgaagacaattaatttcactcttcagctgcttctccaaccccacagcactcctttcattccacttggacttgccccacctgcctgcgtctcgaggacagcgaccgcaagccatccatccctttcaytatcccattcactattctggacagagtagactctggaggagtgggtggtcggtgtgttcagtccacaaccagcgcttttctaagaggtgccctctagtctttcccctcggggtgcagacggcaagcggctctggaaagggtcagaggtcctcaaatggagaccaaaggaagccacgcgggcagctcttgagagccattccagcgcatgccaggcacaccgagtggggcttggcctcctccccaagctaggagctctctagataccggagcaaagtggagggggacttttttccgtccagagagactgaactccgtatctgttccgcggtccgcctccctgcacacacgcccccgagccgggagagcctccgcagcacccagagaagagaccggaacacaaaggatgaacgaatggggagggggggtttggggggttgggagaacgaaaataccagctgcgcttccaacatccaaggaaggaagtggcagcggggacggggagaggatgggaaggggatgctgactgcgagttggggcgggacgcggtgatgggaggggaccgggccgggaatgcgggaggcgaggggagcgacgggacctgccgttccggcggccgggcagccaatcgattcgtctcccctaggaaggagcgaggggagggtggcccagagagaaagcgccgcgcggcctcggctgcccccggcccgggacacccaaacagaccaaaga

SEQ ID NO: 22645 - DNA, 1063 bp, Homo sapiens
cttgagcccaggaattcaaggctgcagtgagctaggatagtgccactgcactccagccttggtgacagagcgagaccctctctcaacaataacaaagaacctagccaagggaccgtggctagggggttgggccctttctctctcagatctacctaatggtctgggctcaacttctcctttagaaaaagagcttggtggtggtagattgtgaagacaattaatttcactcttcagctgcttctccaaccccacagcactcctttcattccacttggacttgccccacctgcctgcgtctcgaggacagcgaccgcaagccatccatccctttcattatcccattcactattctggacagagtagactctggaggagtgggtggtcggtgtgttcagtccacaaccagcgcttttctaagaggtgccctctagtctttcccctcggggtgcagacggcaagcggctctggaaagggtcagaggtcctcaaatggagaccaaaggaagccacgcgggcagctcttgagagccattccagcgcatgccaggcacaccgagtggggcttggcctcctccccaagctaggagctctctagataccggagcaargtggagggggacttttttccgtccagagagactgaactccgtatctgttccgcggtccgcctccctgcacacacgcccccgagccgggagagcctccgcagcacccagagaagagaccggaacacaaaggatgaacgaatggggagggggggtttggggggttgggagaacgaaaataccagctgcgcttccaacatccaaggaaggaagtggcagcggggacggggagaggatgggaaggggatgctgactgcgagttggggcgggacgcggtgatgggaggggaccgggccgggaatgcgggaggcgaggggagcgacgggacctgccgttccggcggccgggcagccaatcgattcgtctcccctaggaaggagcgaggggagggtggcccagagagaaagcgccgcgcggcctcggctgcccccggcccgggacacccaaacagaccaaaga

SEQ ID NO: 22646 - DNA, 1063 bp, Homo sapiens
cttgagcccaggaattcaaggctgcagtgagctaggatagtgccactgcactccagccttggtgacagagcgagaccctctctcaacaataacaaagaacctagccaagggaccgtggctagggggttgggccctttctctctcagatctacctaatggtctgggctcaacttctcctttagaaaaagagcttggtggtggtagattgtgaagacaattaatttcactcttcagctgcttctccaaccccacagcactcctttcattccacttggacttgccccacctgcctgcgtctcgaggacagcgaccgcaagccatccatccctttcattatcccattcactattctggacagagtagactctggaggagtgggtggtcggtgtgttcagtccacaaccagcgcttttctaagaggtgccctctagtctttcccctcggggtgcagacggcaagcggctctggaaagggtcagaggtcctcaaatggagaccaaaggaagccacgcgggcagctcttgagagccattccagcgcatgccaggcacaccgagtggggcttggcctcctccccaagctaggagctctctagataccggagcaaagtggagggggacttttttccgtccagagagactgaactccgtatctgttccgcggtccgcctccctgcacacacgcccccgagccgggagagcctccgcagcacccagagaagagaccggaacacaaaggatgaacgaatggggagggggggtttggggggttgggagaacgaaaataccagctgcgcttscaacatccaaggaaggaagtggcagcggggacggggagaggatgggaaggggatgctgactgcgagttggggcgggacgcggtgatgggaggggaccgggccgggaatgcgggaggcgaggggagcgacgggacctgccgttccggcggccgggcagccaatcgattcgtctcccctaggaaggagcgaggggagggtggcccagagagaaagcgccgcgcggcctcggctgcccccggcccgggacacccaaacagaccaaaga

SEQ ID NO: 22647 - DNA, 1835 bp, Homo sapiens
caagataggcatgcatcttccctctgagatagctcttttgtcagtgccaatcagatcactaaaggctatttttgactgaggcaggaacatggtttcggagcctaaaactcattttctgccctctcctagactcaaatctctcatttgttatcctagattttccatttcttcattaaaaatatccgtttctggtggctattgattacttccatggcagagtgacagacctgaaatctatttcatttggaatttgcacacaatgaaggactctggaaatgtcttcagctcaaattgcatcaggagggatttccaaagggagagggcaagagctgacgtcccacaaacctggtctaacttggcttcaagaggattagtaagtgtgcatcccaaggaggatacagtgtgaggttagctgaatagaaggggaggtgacagctgatttttgagaaggcattttgatgaagtttctaagcaaggaaaaaatacttgctgacagacagcagtcaatactgtgatagcagacaattttctggggctttgactaggaaagcattttgtcttaagcaaagcatccatattgcaaatgccagacagttagcataggcagcacacagtcacgacatttgaaactttggatgttggagttcactgctcttctaattctttctaaacatactgcttctaatatttgtctttgaagattatatcataaaagacaagacaaattcattggtcactgttcccaaaacattagtttgccaaaactgaactatgtatcacaagaataaatagaatcggatccctggtgcttgcattttgcaggactgtgtactccagtaagatggttgggggtgtggaggagtagaggagctaaacttcaagatgcaaagggcaaaaacattcgtttcagctccctgatcctggatatctctttggtccgcatgttaatttgcaaagagaagcttggcagtgcccatttttctaagccttgacgtattaatcggtaaattaaaaaaaaaaaaaacctatggactagcttagcacagaggtgtcaaatggttcttactgctttcaacatcatttcaactcatttgcaacatttgcaaatgagttatacacagtttctcaagctgaaaaggactaattgagtatctgccatacaatcaaaccagaggctggcaaattatggcccgtgggccaaatccatcccaccacctgggtttgtgtggcccacagaccttgctggagcaagctgccactgttagtggggagaccagccagagcatcaccctctgccccctatttccccctctgttcccacaacctgcctcccaggccagtggcactgatcagggcccacactggacaccrcctacacagtgaggtctctgctgtgggcgactgctgggcttcaagcagtccaggacccttcagtcaactgcccaagttcagatggcccagttctccaaaaggagagaagggtgcaccagaatgtcaccagggcagagagcgaaacagatcatggtagcgatccttccccagatccaggccctcccccttcctcccagagcctatggttcagattcaaagggcggtcacttttcccctagagaaagtctgcagtagatggcacctgggcagaaagctgcctgccatccaggaccagccaccctaatcaaatggggcagggagccacaggacttctctctcgttatctcagaattcacatggtattctcagttttgccttttggcctgcaaaacccgaaatatttactatctggctctttgcaggaaaagttcaggacccctggtataaattcccataaaacactg

SEQ ID NO: 22648 - DNA, 1835 bp, Homo sapiens
caagataggcatgcatcttccctctgagatagctcttttgtcagtgccaatcagatcactaaaggctatttttgactgaggcaggaacatggtttcggagcctaaaactcattttctgccctctcctagactcaaatctctcatttgttatcctagattttccatttcttcattaaaaatatccgtttctggtggctattgattacttccatggcagagtgacagacctgaaatctatttcatttggaatttgcacacaatgaaggactctggaaatgtcttcagctcaaattgcatcaggagggatttccaaagggagagggcaagagctgacgtcccacaaacctggtctaacttggcttcaagaggattagtaagtgtgcatcccaaggaggatacagtgtgaggttagctgaatagaaggggaggtgacagctgatttttgagaaggcattttgatgaagtttctaagcaaggaaaaaatacttgctgacagacagcagtcaatactgtgatagcagacaattttctggggctttgactaggaaagcattttgtcttaagcaaagcatccatattgcaaatgccagacagttagcataggcagcacacagtcacgacatttgaaactttggatgttggagttcactgctcttctaattctttctaaacatactgcttctaatatttgtctttgaagattatatcataaaagacaagacaaattcattggtcactgttcccaaaacattagtttgccaaaactgaactatgtatcacaagaataaatagaatcggatccctggtgcttgcattttgcaggactgtgtactccagtaagatggttgggggtgtggaggagtagaggagctaaacttcaagatgcaaagggcaaaaacattcgtttcagctccctgatcctggatatctctttggtccgcatgttaatttgcaaagagaagcttggcagtgcccatttttctaagccttgacgtattaatcggtaaattaaaaaaaaaaaaaacctatggactagcttagcacagaggtgtcaaatggttcttactgctttcaacatcatttcaactcatttgcaacatttgcaaatgagttatacacagtttctcaagctgaaaaggactaattgagtatctgccatacaatcaaaccagaggctggcaaattatggcccgtgggccaaatccatcccaccacctgggtttgtgtggcccacagaccttgctggagcaagctgccactgttagtggggagaccagccagagcatcaccctctgccccctatttccccctctgttcccacaacctgcctcccaggccagtggcactgatcagggcccacactggacaccgcctacacagtgaggtctctgctgtgggcractgctgggcttcaagcagtccaggacccttcagtcaactgcccaagttcagatggcccagttctccaaaaggagagaagggtgcaccagaatgtcaccagggcagagagcgaaacagatcatggtagcgatccttccccagatccaggccctcccccttcctcccagagcctatggttcagattcaaagggcggtcacttttcccctagagaaagtctgcagtagatggcacctgggcagaaagctgcctgccatccaggaccagccaccctaatcaaatggggcagggagccacaggacttctctctcgttatctcagaattcacatggtattctcagttttgccttttggcctgcaaaacccgaaatatttactatctggctctttgcaggaaaagttcaggacccctggtataaattcccataaaacactg

SEQ ID NO: 22649 - DNA, 583 bp, Homo sapiens
gaaatccttaattacaatctgcaaagtctcttttaccacgtaaggtattcacaggttctgggaattaggacatgaacatattcgggagaccatttttcagccttcaacaaccacaacatgtttattattttatcctcttgatgggcatgtaggcagtttctagtttttatctaattaaaataattctgctatgaacattcttttacaggtcttttggtttccctgttgtgtatatatacgtaaaatttatgagtcatagggtatgaccagatgcacatccagatttactagattctgcaaacaaatttccaatgttgttgtaccacttcatactccaaccagcaaaatatgagttccagttgctccatatccttgctcayacctttcttctttccttgcctctttccttcctcccttcctccctcccttcctccctcccttctctccttcctttctctctctttcaagagctgatatacttaattgtcagttcccggtacctgaatctgtgcctcactgtgatgtattaaaatttcttcccctccaaagctgaagatacctcgggcagttcctgttctcaaaa

SEQ ID NO: 22650 - DNA, 972 bp, Homo sapiens
caagacacaaaccaccagtcacagacaggcaggctgaagaaagagaactcagcagaaaagtcccaactatctggctccacctcatccatcaccagacaccagcagtatctacgagataaagataggctgcaagaagaaaaacactttaaaaaaggaaatgacagcggccgggcgcagtggctcatgcctgtaatcccagcactttgggaggccaaggcgagcggatcatgaggtcaagagattgagaccatcctggccaacatggtgaaactctgtctctactaaaaatacaaaggatgagttcatgtcctttgcagggacatggatgaagctggaaaccatcattctcagcaaactatcacaagaacagaaaaccaaacaccacatgttctcactcataagtgggagttgtacaaggagaacacatggacatagggaggggaacatcacacaccgaggcctgtygtggggcggggggctaggggagggataacattaggagaaatacctaatgtaggtgatgggttgatgggtgccgcaaaccaccatggcacgtgtatacctatgcagcaaaactgcacattctgcacatgtaccacagaacttaaagttaaaaaaaaaaaaaattagcatgcacctgtagtcccagctactcgggaggctgaggcaggagaatcactttaacccaggaggcagaggttgcagtgagccgaaatggcaccactgcctccagcctgggcaacagagcgagactccgtctcaaaaaaaaaaaaaaaaaacaaaaaaaaaactgaaagagcactttggaaaataagggattttttaaaagaatgataataatttttccctgaaatacatgtttctgaaaacttttccagagggacccaagatgaacattattttctggacctattctaaaacattttcactttcttcttcccaattcagatgatgtgccttatgcatcacctt

SEQ ID NO: 22651 - DNA, 972 bp, Homo sapiens
caagacacaaaccaccagtcacagacaggcaggctgaagaaagagaactcagcagaaaagtcccaactatctggctccacctcatccatcaccagacaccagcagtatctacgagataaagataggctgcaagaagaaaaacactttaaaaaaggaaatgacagcggccgggcgcagtggctcatgcctgtaatcccagcactttgggaggccaaggcgagcggatcatgaggtcaagagattgagaccatcctggccaacatggtgaaactctgtctctactaaaaatacaaaggatgagttcatgtcctttgcagggacatggatgaagctggaaaccatcattctcagcaaactatcacaagaacagaaaaccaaacaccacatgttctcactcataagtgggagttgtacaaggagaacacatggacatagggaggggaacatcacacaccgaggcctgtcgtggggcggggggctaggggagggataacattaggagaaatacctaatgtaggtgatgggttgatgggtgccgcaaaccaccatggcacgtgtatacctatgyagcaaaactgcacattctgcacatgtaccacagaacttaaagttaaaaaaaaaaaaaattagcatgcacctgtagtcccagctactcgggaggctgaggcaggagaatcactttaacccaggaggcagaggttgcagtgagccgaaatggcaccactgcctccagcctgggcaacagagcgagactccgtctcaaaaaaaaaaaaaaaaaacaaaaaaaaaactgaaagagcactttggaaaataagggattttttaaaagaatgataataatttttccctgaaatacatgtttctgaaaacttttccagagggacccaagatgaacattattttctggacctattctaaaacattttcactttcttcttcccaattcagatgatgtgccttatgcatcacctt

SEQ ID NO: 22652 - DNA, 620 bp, Homo sapiens
tgacatcttaacaaaaaacatcctaacacatggctattataccagaggaaaatagtattgtgaagtagctatacttgcaattcacacagaaaatgaatcataatgcattaacgcctttgaataatttgcaagtaaatgaaccaaaaaactacatggcatgacataggtacttacgttatttktgggtggggaggagtaaaggtaagggaaagaaaaattagaataaaatattgtgttagtaagtgcttacatgtgtgctaaaccatcttataacagttaaccagcagatgtctgaaatgcaattactttctatttattattttgctgatttgtttgctaataaaatgttattgcccaaatgacaatgttgaattaactacaaaatgatgctcttgaagattagctagattaaatcgtagaatccaataactgaagaattacttcagagatcatctagtcactcctaagtctcccagtagcaaaatccctttacatcattacttaaagatgactgcacattctgtctatagcaaaccctctatccaatatctggataccttcctcactaagaaagtcttgagctttatcaaggttgcaaatatgcctaattaaatcttcac

SEQ ID NO: 22653 - DNA, 620 bp, Homo sapiens
tgacatcttaacaaaaaacatcctaacacatggctattataccagaggaaaatagtattgtgaagtagctatacttgcaattcacacagaaaatgaatcataatgcattaacgcctttgaataatttgcaagtaaatgaaccaaaaaactacatggcatgacataggtacttacgttattttwgggtggggaggagtaaaggtaagggaaagaaaaattagaataaaatattgtgttagtaagtgcttacatgtgtgctaaaccatcttataacagttaaccagcagatgtctgaaatgcaattactttctatttattattttgctgatttgtttgctaataaaatgttattgcccaaatgacaatgttgaattaactacaaaatgatgctcttgaagattagctagattaaatcgtagaatccaataactgaagaattacttcagagatcatctagtcactcctaagtctcccagtagcaaaatccctttacatcattacttaaagatgactgcacattctgtctatagcaaaccctctatccaatatctggataccttcctcactaagaaagtcttgagctttatcaaggttgcaaatatgcctaattaaatcttcac

SEQ ID NO: 22654 - DNA, 620 bp, Homo sapiens
tgacatcttaacaaaaaacatcctaacacatggctattataccagaggaaaatagtattgtgaagtagctatacttgcaattcacacagaaaatgaatcataatgcattaacgcctttgaataatttgcaagtaaatgaaccaaaaaactacatggcatgacataggtacttacgttatttttgggtggggaggagtaaaggtaagggaaagaaaaattagaataaaatattgtgttagtaagtgcttacatgtgtgctaaaccatcttataacagttaaccagcagatgtctgaaatgcaattactttctatttattattttgctgatttgtttgctaataaaatgttattgcccaaatgacaatgttgaattaactacaaaatgatgctcttgaagattagctagattaaatcgtagaatccaataactgaagaattacttcagagatcatctagtcactcctaagtctcccagtagcaaaatccctttacatcattacwtaaagatgactgcacattctgtctatagcaaaccctctatccaatatctggataccttcctcactaagaaagtcttgagctttatcaaggttgcaaatatgcctaattaaatcttcac

SEQ ID NO: 22655 - DNA, 620 bp, Homo sapiens
tgacatcttaacaaaaaacatcctaacacatggctattataccagaggaaaatagtattgtgaagtagctatacttgcaattcacacagaaaatgaatcataatgcattaacgcctttgaataatttgcaagtaaatgaaccaaaaaactacatggcatgacataggtacttacgttatttttgggtggggaggagtaaaggtaagggaaagaaaaattagaataaaatattgtgttagtaagtgcttacatgtgtgctaaaccatcttataacagttaaccagcagatgtctgaaatgcaattactttctatttattattttgctgatttgtttgctaataaaatgttattgcccaaatgacaatgttgaattaactacaaaatgatgctcttgaagattagctagattaaatcgtagaatccaataactgaagaattacttcagagatcatctagtcactcctaagtctcccagtagcaaaatccctttacatcattacttaaagatgactgcacattctgtctatagcaaaccctctatccaatatctggataccttcctcactaagaaartcttgagctttatcaaggttgcaaatatgcctaattaaatcttcac

SEQ ID NO: 22656 - DNA, 1178 bp, Homo sapiens
cccccgggttagcgggcgcgaccctccacgcaacccacgcctctcccttaaagagcgcacgggcccgagcctgatccccgaccccgggccaggctgggtcgaggtcacatcgcatcaggatgtggttctcccacaccagctcgacccccgacgctattcaccttcacctccaggatatggcgctgcctccagcagaattcggccccctccgtgtcacgtgacccgggagcgtggccgtgcccgggtggcccacttggctcagcggcgccccgtagtccggcccgatgcgcatgcgcacagtcggagccccgctccggggccacccgaaagagccttgcctctactggccgcctccctcatagaccccgcctccccttgcctttcattggctcgcactgcagacctcacacccattttatgttttaaaaccaggaggccacgcccctcagcggcttcaggagcccagacctttgggggcccaccttccgcagctttccattggccccacggtggaagcccgtaggttcaggccctccgaacacagctcgctttccacaccagcggggccgtaccagagcaagaccatgtctcacaaaataataataatacttaaaaaatggtaaattttatgttatgtrtattttccacactataaataaatatttgtgcatgtatatatatatatgtgtatattttttgtataataggtatagtagtaagcaaaggaaattcacactgagtcacattctacaaaatgcctaaccagacctctacaaaactgtcaaggtcatgaaaaacaaagactgaggcactgccacagactagaggagggaaaggagctgtgacaactaaattcaatatagtaccctggactggatccaggaatcaaaaaaaggacaaatttgtggataaagttggtgaaatccaaataaagtttggagttgagttagtagtaatgaaccagtgttaatctttttgtttcagtaaatgtattatggttatataagatgttagcattcagggaagctggataaagagtagacaaaaattatcttgctatctttgcagcttttctgtaaagctaaaaaagaaaaaaaaagtcttaataacaaggatacaattttccagagagagagaaagatgttgtaatagatgtaaattctttcttgggagacaaa

SEQ ID NO: 22657 - DNA, 1178 bp, Homo sapiens
cccccgggttagcgggcgcgaccctccacgcaacccacgcctctcccttaaagagcgcacgggcccgagcctgatccccgaccccgggccaggctgggtcgaggtcacatcgcatcaggatgtggttctcccacaccagctcgacccccgacgctattcaccttcacctccaggatatggcgctgcctccagcagaattcggccccctccgtgtcacgtgacccgggagcgtggccgtgcccgggtggcccacttggctcagcggcgccccgtagtccggcccgatgcgcatgcgcacagtcggagccccgctccggggccacccgaaagagccttgcctctactggccgcctccctcatagaccccgcctccccttgcctttcattggctcgcactgcagacctcacacccattttatgttttaaaaccaggaggccacgcccctcagcggcttcaggagcccagacctttgggggcccaccttccgcagctttccattggccccacggtggaagcccgtaggttcaggccctccgaacacagctcgctttccacaccagcggggccgtaccagagcaagaccatgtctcacaaaataataataatacttaaaaaatggtaaattttatgttatgtatattttccacactataaataaatatttgtgcatgtatatatatatatgtgtatattttttgtataataggtatagtagtaagcaaaggaaattcamactgagtcacattctacaaaatgcctaaccagacctctacaaaactgtcaaggtcatgaaaaacaaagactgaggcactgccacagactagaggagggaaaggagctgtgacaactaaattcaatatagtaccctggactggatccaggaatcaaaaaaaggacaaatttgtggataaagttggtgaaatccaaataaagtttggagttgagttagtagtaatgaaccagtgttaatctttttgtttcagtaaatgtattatggttatataagatgttagcattcagggaagctggataaagagtagacaaaaattatcttgctatctttgcagcttttctgtaaagctaaaaaagaaaaaaaaagtcttaataacaaggatacaattttccagagagagagaaagatgttgtaatagatgtaaattctttcttgggagacaaa

SEQ ID NO: 22658 - DNA, 1178 bp, Homo sapiens
cccccgggttagcgggcgcgaccctccacgcaacccacgcctctcccttaaagagcgcacgggcccgagcctgatccccgaccccgggccaggctgggtcgaggtcacatcgcatcaggatgtggttctcccacaccagctcgacccccgacgctattcaccttcacctccaggatatggcgctgcctccagcagaattcggccccctccgtgtcacgtgacccgggagcgtggccgtgcccgggtggcccacttggctcagcggcgccccgtagtccggcccgatgcgcatgcgcacagtcggagccccgctccggggccacccgaaagagccttgcctctactggccgcctccctcatagaccccgcctccccttgcctttcattggctcgcactgcagacctcacacccattttatgttttaaaaccaggaggccacgcccctcagcggcttcaggagcccagacctttgggggcccaccttccgcagctttccattggccccacggtggaagcccgtaggttcaggccctccgaacacagctcgctttccacaccagcggggccgtaccagagcaagaccatgtctcacaaaataataataatacttaaaaaatggtaaattttatgttatgtatattttccacactataaataaatatttgtgcatgtatatatatatatgtgtatattttttgtataataggtatagtagtaagcaaaggaaattcacaytgagtcacattctacaaaatgcctaaccagacctctacaaaactgtcaaggtcatgaaaaacaaagactgaggcactgccacagactagaggagggaaaggagctgtgacaactaaattcaatatagtaccctggactggatccaggaatcaaaaaaaggacaaatttgtggataaagttggtgaaatccaaataaagtttggagttgagttagtagtaatgaaccagtgttaatctttttgtttcagtaaatgtattatggttatataagatgttagcattcagggaagctggataaagagtagacaaaaattatcttgctatctttgcagcttttctgtaaagctaaaaaagaaaaaaaaagtcttaataacaaggatacaattttccagagagagagaaagatgttgtaatagatgtaaattctttcttgggagacaaa

SEQ ID NO: 22659 - DNA, 1178 bp, Homo sapiens
cccccgggttagcgggcgcgaccctccacgcaacccacgcctctcccttaaagagcgcacgggcccgagcctgatccccgaccccgggccaggctgggtcgaggtcacatcgcatcaggatgtggttctcccacaccagctcgacccccgacgctattcaccttcacctccaggatatggcgctgcctccagcagaattcggccccctccgtgtcacgtgacccgggagcgtggccgtgcccgggtggcccacttggctcagcggcgccccgtagtccggcccgatgcgcatgcgcacagtcggagccccgctccggggccacccgaaagagccttgcctctactggccgcctccctcatagaccccgcctccccttgcctttcattggctcgcactgcagacctcacacccattttatgttttaaaaccaggaggccacgcccctcagcggcttcaggagcccagacctttgggggcccaccttccgcagctttccattggccccacggtggaagcccgtaggttcaggccctccgaacacagctcgctttccacaccagcggggccgtaccagagcaagaccatgtctcacaaaataataataatacttaaaaaatggtaaattttatgttatgtatattttccacactataaataaatatttgtgcatgtatatatatatatgtgtatattttttgtataataggtatagtagtaagcaaaggaaattcacactgagtcacattctacaaaatgcctaaccagacctctmcaaaactgtcaaggtcatgaaaaacaaagactgaggcactgccacagactagaggagggaaaggagctgtgacaactaaattcaatatagtaccctggactggatccaggaatcaaaaaaaggacaaatttgtggataaagttggtgaaatccaaataaagtttggagttgagttagtagtaatgaaccagtgttaatctttttgtttcagtaaatgtattatggttatataagatgttagcattcagggaagctggataaagagtagacaaaaattatcttgctatctttgcagcttttctgtaaagctaaaaaagaaaaaaaaagtcttaataacaaggatacaattttccagagagagagaaagatgttgtaatagatgtaaattctttcttgggagacaaa

SEQ ID NO: 22660 - DNA, 1704 bp, Homo sapiens
acagctgttactgcagattgaggagcctcagagggaacagaagataaagatcattatggaatttaggattgcaggacattctttgacatttcataacagccaggggagatcaactgtggtcaggggacaggggcaggaagaaaccatggccaaggcctgtctggcaggacttgaaggggcagagggacccttgcaaatgaccctgcctggaacccacccccagttggcccctgtatagcactgatccagctggggcttttatcccaggataccctcttcagggatgcctgtatttgttgattatctgccatatgcctggtcactgcagaatacaaggaagaaaatagccttcagcagaagctgagacaggagcctagaggatggacagtaaggagtcgaaggctcaggatgaggctttcctgactttctcccctaggggactgatgttctctactggtacagaccttgttttattcatccttatgtccctaacctggaatgggcccagggtgacagttataataagtgtttgtcaagtgagcaagtgtgtggagtgtgcattgtagagagtaaggtctctacaggatcctgctggagaggcagcccactgggctcaccacttctccagaggagggactggtcccttgccagacaaccctgccagctggagcaggcttcctcaggggtgcctggagctgttgaccatggctgttgccctctggcccctcttgggaagagcaacctgtcaggtgttaaagacggtcttcatttctcttctccaagtaaacatgactagtttccatctcaccatcttctggccctcagcagactggttatccagtctggagaggcaacagtagtatccagatgtgatccgaacagacagaacgatggatgcagacggaaaattcaggtttgtgtgcttcggcagtcagtatatgcaagtcgtaatggggacagtggctggcatggcctttagcactgtgggaaggatcagggtgtctgcccatcatttttctctctttgatagacactgtttacgtagacactgttttggtgtaaaaccctacgttgtagctcttgtcaacagtgttatgtttctcctcaactgtcctggaaactccctgaggtggctggcttgtaggcactccatacctgttagctagtattatttatttattgktttattatttgaatggacaatcaattcatgtcatttaatgaacatgggctatgtgccagaaaccaccaggtgccagaatacaacactgaactacagtaggcctgtccctgggccccagagctcccagacacactaggaagacttgttgatttaatgataaaccttgattgagctcatgattaacatcttcaccaccagacatcattgagtgctctctgtgtgttcaactcagaacatacccttcctgccctcagaggctggaatgtgagagtcattaagggagacaccattgtgggagtgagaaaatcctggacttggagggaactgactagggatcacctcccagctctgccatggacccactgtgtgaccatgggcaagttacttgacctctctgagcctcagttatcttatcagtgaaactgggttaataatatatctctcagtggcacaggaggatcacatagggtcaccacactccacaactccaggagatgctgttaacattttagtctatggat

SEQ ID NO: 22661 - DNA, 716 bp, Homo sapiens
atgatgccccctgtggcgtcttttctatttgctgttggctctccttgtgcaaaggatttgaaggttgaattgaaaataccattgtaatacttctcttttaaagcttataaaatgccctgtatcagggcctgggggcaaaagtactgatgaaatttatgaagatagcaaatgatgctcgagtctttgttataaaaagaatggtaaataggttcaagaagcctgcagccaggctttgtaaagtgaatggcaaatttgcatttgtcatagaatttctccttggaatgggcctggctatgtcaggcctgggtgggctgaggaacacaggcccaccacaagtccagcttggagtctttcttccctgttgtcattttaaagttgctttttccagaacataggctggctgtagttcatgcttcctaattaaggtgcttcctcccaggccagtccctgaatttctcactaacctttgacttgtgacagcttctgcatctcggtcccaatttttaaagcttagatcatttgggagtaggaagagtgtcatggttaagagtatgggctttgacataaaagtctcttgtgcaaatcctgccgctgccacttcactgctgygtggccttgggcaaattacttggcctactgaggcccagtttcttcctccttgtaaacggataacattagtgccttgctcacagagttgtgaggattcaagaaaaaaa

SEQ ID NO: 22662 - DNA, 716 bp, Homo sapiens
atgatgccccctgtggcgtcttttctatttgctgttggctctccttgtgcaaaggatttgaaggttgaattgaaaataccattgtaatacttctcttttaaagcttataaaatgccctgtatcagggcctgggggcaaaagtactgatgaaatttatgaagatagcaaatgatgctcgagtctttgttataaaaagaatggtaaataggttcaagaagcctgcagccaggctttgtaaagtgaatggcaaatttgcatttgtcatagaatttctccttggaatgggcctggctatgtcaggcctgggtgggctgaggaacacaggcccaccacaagtccagcttggagtctttcttccctgttgtcattttaaagttgctttttccagaacataggctggctgtagttcatgcttcctaattaaggtgcttcctcccaggccagtccctgaatttctcactaacctttgacttgtgacagcttctgcatctcggtcccaatttttaaagcttagatcatttgggagtaggaagagtgtcatggttaagagtatgggctttgacataaaagtctcttgtgcaaatcctgccgctgccacttcactgctgtrtggccttgggcaaattacttggcctactgaggcccagtttcttcctccttgtaaacggataacattagtgccttgctcacagagttgtgaggattcaagaaaaaaa

SEQ ID NO: 22663 - DNA, 545 bp, Homo sapiens
ggcttcatgatgtaggcgcgattgattattagctccgtattcagctcctctctcctccatggagaatggggctggggctgaaagttccaagcttcaaagcatgtcttggtctttctttccatgaaacccaacaagagtacacttgggcatttatcctagaggaataaaagcttatattcacacaaaaatctgtacatcaatgttcataacagccatatttacaatagccaaaagtggaaatataccagatgtccttytatggatcagtattgaaacaaaccccatctctactaaaaatacaaaatttagctaggcgtggtggcacacgtctgtagtcccagctgcctgggaggctgaggagggagaatcacttgaactcagggggcagaagttgctgtgagctaagatcatgccactgcactccagcctgggcaacagagcgagaccctgcctcaaaaaataaaataaaaccctaaaagcacaaaccaacattaagacagaaaatgtactaaatagattatgtcaatattaaggatttctgttca

SEQ ID NO: 22664 - DNA, 645 bp, Homo sapiens
acgaaaagccgacgactcttttggggaggctctgcagtgccttcatctcactaggctccccaggaagcttgcgaacttggcttgagccctaagcagccgagtatgtgccgggcctctgcttctctctttcagtaagagggagaaccaagaaagaggctgaagcatggtctgcagagaaggcacttgtgcaaacaccaggagaatgaggggcctgagttgtcttcatttctcctaaaaacacgcatttcctcccaggccaccctagtgagggcatgaagcacagcgtgtgtgtgtgtgtgtgtgtgtttgcaggaatatgcatgtgtgtgtgcatgtgtgtgtgtgcaggtatatacatgtgaatgtatttatgtatgtgcatctgtgtgcatgtgtgtgcgtgtgtgtgcaagtatatgcatgtgtatgtatgtgcatgtgtgcgygtgtgtgtgtgtgtgtgtgcgtgtatgtgtgtgttgcagggctttacagtggacaggatgtgggagggcagctgcagctccaagctgcaagtctttctgatagaatggttaagattccctggaccacagaaagagtgttttcatttgcacctatttttattagcatttaaagctgtattcttcgtagcatgtgaagctt

SEQ ID NO: 22665 - DNA, 533 bp, Homo sapiens
ctgggagctgtagactggagctattcctatttggccatcttggctccaccaccccatgttaactcttttgtgagttgagatacaaccctatttctctaaacgtgggtggcaagttatccacaaactgtttgttaccctttgtttaaagacagttctctatagacctcttgtgtttctgcacatcttctgacagcttttgatgcacactatatttttaaggttatattataatcccataattgggctgtataaattactcatatctacggtagaaatactaaaagatgaacccatcaaaaataaatacagtaatttttaaatacataaacagtataataagatataaacagaaacaacaaaatgtaataaagtgkggggacaaagttaaaatgcagttttattagttttctctttccttgtttgttagtcagttagtcaatatgtttatgcaatcagtgttatcatcagtttaaatactgggttataagatactatttgcaagcctcagggtacctcaaatcaaaaacaacaac

SEQ ID NO: 22666 - DNA, 493 bp, Homo sapiens
aaaggattgaatgcaaatacagataaataaaacctaatagaaaacaccgcctaaatttaatgtaacaaccattcgacctcattagctgaacatgttcttgtcatatttcttcagtaaatgctttcatgcaagacaggcacaatgaatatgctaccacttgtacctatagtgaatggaacttaagaatgcactgtagatacacaacactgcatagtaaatagatttaaatccttttttataaattaaaaaatccatttctatgaaaaaartgttaatagaaacgagagtatacccaattcatgagacaaattacataaatgcttattaccattttgttgtggatcttttacatgagtattgaagtaaatatcttatgtgtgcttaacctagaaacacctagtattttggtagatgcttgtcaattgagattaagcgagtataagtttatgtgagaaaattaaatattggcatcagagaaacattctttctaggt

SEQ ID NO: 22667 - DNA, 534 bp, Homo sapiens
ttgttactactatagttttatatatgaggcgtaaagagtttaaggccagagagccagtgaggttgggttttagacccaggtctgtgttgctctgatgcccatgagttgtccatggcactgtgctgcctctctgtggctggaaagaagagattggaatgagagactctgaagactttgaagagtagcccagccttattctgagccagtcaggacttagagctggagtgagaagaatcctcactrgtgatcacctcaagactagaaatactggtggccttctcagagtcatgtcatcaggtcagactctcatatgctttacaaggattggggcagtggtttccccgagtggcctgggtaacccacctgtggctaggctagaaatgaactgagacccgaaggagggagcaccttttcaaatgggcaccttttcactctgaagggctctctggccatgtccttcagtcactctgggccaaagcaccacttgcctctttttctcttagttttctataccaagaatgactctgtgacaaa

SEQ ID NO: 22668 - DNA, 534 bp, Homo sapiens
ttgttactactatagttttatatatgaggcgtaaagagtttaaggccagagagccagtgaggttgggttttagacccaggtctgtgttgctctgatgcccatgagttgtccatggcactgtgctgcctctctgtggctggaaagaagagattggaatgagagactctgaagactttgaagagtagcccagccttattctgagccagtcaggacttagagctggagtgagaagaatcctcactagtgatcacctcaagactagaaatactggtggccttctcagagtcatgtcatcaggtcagactctcatatgctttacaaggattggggcagtggtttccccgagtggcctgggtaacccacctgtggctaggctagaaatgaactgagacccgaaggagggagcaccttttcaaatgggcaccttttcactctgaagggctctctggccatgtccttcagtcactctgggccaaagcacmacttgcctctttttctcttagttttctataccaagaatgactctgtgacaaa

SEQ ID NO: 22669 - DNA, 534 bp, Homo sapiens
ttgttactactatagttttatatatgaggcgtaaagagtttaaggccagagagccagtgaggttgggttttagacccaggtctgtgttgctctgatgcccatgagttgtccatggcactgtgctgcctctctgtggctggaaagaagagattggaatgagagactctgaagactttgaagagtagcccagccttattctgagccagtcaggacttagagctggagtgagaagaatcctcactagtgatcacctcaagactagaaatactggtggccttctcagagtcatgtcatcaggtcagactctcatatgctttacaaggattggggcagtggtttccccgagtggcctgggtaacccacctgtggctaggctagaaatgaactgagacccgaaggagggagcaccttttcaaatgggcaccttttcactctgaagggctctctggccatgtccttcagtcactctgggccaaagcaccacttgcctctttttctcttagttttctataccaagaatgactctgtgrcaaa

SEQ ID NO: 22670 - DNA, 536 bp, Homo sapiens
aaaaaaaaaaaaaaaaaaagagagagaatgtaggagggtaattgacagcattttatagtcagtgtggaggccaaaaattatccaacctagtcatgtcatatgctaatgttgattaaatttaatgctgagatttttcagcaagtgaaaaaaawttcaatctatttgtttcaacctaagagagaccatttatggaattcttgctgtttgtaattgaccactattagagaaggaactgtgtaatgcagctgccctctgtgattattttctgctttccttaataaattacaatttacagtagcactcactaggagcactgtttgccgccccagtctgcatgggcagacggcagaatcaccaaatgagcaccagcaaggttgagatgaggccaccgcgtgcccaccatcataaccagttcacccaagtgacaaacaagccgaagctaccaccttggctaaaaaaagaaattgactgctgctcaattaagcagaaatgagactgtcactcaggggggtggacactgagaattgccttattta

SEQ ID NO: 22671 - DNA, 599 bp, Homo sapiens
tttaaagtagtctcaaagagtagaagttagagcccatgtatttattttggtcaaatcagtagcttatcagtaaacctaggaagagtacattagccaaacagaaggaacttagagatgagagctatggaaagtcataggccatctgctggggttggcttacccctccacaggaagaaggcattcagtaatgttgggctggagttttctctctgcaagctatcttgcttaaaatttatttctgtttgtaagtctaatttttcagtctgtgaagaagttgtcataattctggctcttgggttttggtttccagggattactgagagctgtccataatgaaggcatgcaggtgctttctctcactgagtctccctatagtgatggagaggaccattctattcagcaggtttcagaaycttggctagaagagagaaaagcttacatcaatacaatctcatctctaaaggatttaattacaaagatgcaactgcaaagagaagccgaggtaaccaaagaatactatgcatttaaatcattttatgtattatttgaacaataataatacattataaattaaattatcttttatacatatttttgca

SEQ ID NO: 22672 - DNA, 1604 bp, Homo sapiens
cagagagtactgtgagcactcctattccacaaacataaaactgaggtaccaagaggctgcaaaaccagcagagtcctgatgctgggcagtggcagaggagggattaaacccaggcagcagagggagcagagggcctggggcagccaggcaccggaagtgctgcaagcaccaagacccagggtggtaacttgcagggggaggccagagcatgaaggcagagggaggttttgggtgcagcctccaagtagggaatggacagtttcagtgttgaggcagagtggcaaagacaagagacccacagcacccaggaaatccctcagctataaatacagtccctcagcacttttcactccccttcccaaggatactatcatcaccctctcctcaccttggaaagaaatcagggctccaactagagctgccttgctggaagctcgcactgtcctgtcccgatgtatcatccagcagccccaaggcagctcccctcattatcctctgtcataaagatatgatgtttgcttttcctctaggtaaagccagtaaggtaatagagcatcacctgttaggatgaactatgtgtgacaaatggtgctgtcaaattcgtatttgaggacttgttgttgtttatcttgaaaacgtgtgtaatgggctacatctgctaggccatatgaaggagtgaggcttttttcttaccttgcaatttcttagtggattgtctgtgatgtgcatcacattctggtttaatgcttaataaaagcgttttctgtctctaccttcgtggagaggatttctgggttgggagaaggttttgtatttatttcactgttgccatcacacacctgtctgctgggacaaaatctcaatcaccgatttcatcaacatctagtgtacaagttaaacaatgttagagattcaataagccacatctagaatacagcaaattctaattaaaaaatgactcagcaacttcaagaaataagaaaacaaaggtaaatggaacctgtaggttacagacttatgagatacaactactgaaagctattaaatatacatttggatcctgaataaaaatgatcttccttaagaaacacattgttttagacaactgagaaaacagaagcgataaaatatttacattttaaaatatatttgtgtgattttttggggggttataaaagagcctttacattttaaaattgcattctgaagaggctatgcattaaataatatgatatccgggagtataagtaaaataacscactagtacacatgaggaccgatgaaacataaatgactatgaaatgataaatggtgaaggaaaaaaaaatagtgaaggaagactggagaaaggttcatctggcttcataacagtcttttccatctttttttgtaattgaacacagctgtaacaggagacaaaatatgtcattgtaccagtaattttacacaatgaaaattaattttatatgttgagaatgaactaaaaagacagaaggaaactgcgttccagggtgtaagcatgtatgaaaatatcaaaatatgcattttaaatataagcactttaagttccattatacctcaaactactttaaaaaactactcaa

SEQ ID NO: 22673 - DNA, 552 bp, Homo sapiens
aggttgccacagcttaaagttgaggcacccaatctgggggctcagatgtataattggtcacaaaggtagtattggagagattttaaaaagcctaacagaagtcttacgtagagctaaataaacaaaatgtatgtttcttttttcctgaaatcataccaatctaatgttggattttatgcagactagaagttctagtgtgcattaaagatggatttaatcgattttaaatgggaaagtacattattccttattcttaacatcttcagccctatggaagcattcatttcagtgttcctgggaacgcactttggcaaatgtgtgagataaagatgtaaggttgcctagcaccaagctctgtgataggcagaatcaggcttttagtcgcrtgatgtccaaataactgcaacactcatgggttacagagtgttttcgtgtacattgcctcagctggtcttctcagcgctcattgtaacatctcccagctacctctcattcaggaaataattaggcagtctccttttaactttgcatagtcctagccattaagagttg

SEQ ID NO: 22674 - DNA, 597 bp, Homo sapiens
atgaagtgaggtcaagttgactgctagattctctgggggcaaaaaagacaaaagaacagcaaaagcaaaaacatcaacaaaagccccataaaatattaccaaagcagtattagactttttgcagtgttgtttagcctttatttttcttttgtgacattaatagataagtattgtggtgaaaaaacttaaaacaaatatgaaatttaaaaaaatctgtttataaaaaatggatttgcaaatatgcatctcactattttttatattttattttattttattttattcatttattttgagacggagccttgctctgtcacccaggctggagtgcaacggcacgatctccgctcatcgcaacctctgccttctgggttcaagtgagtgtcctgcctcagcctcccaagtagctgggattataggtgcgcaccaccacacccagctaattttttgtatttttagtagagatgggttttcaccatgttggccaggctggtcccgaactcctgacctcgtgatcctcccgccttggcctctcaaartgctgggattacaagcgtaagccacggcacccagcccacattccactattttttaatg

SEQ ID NO: 22675 - DNA, 1526 bp, Homo sapiens
cggtgaccccacacaaagttgtaggagctgagctttcattagaaatagtgtttgtcccagaatattctatgcgccattttatttagtttcttctacagtcctcagaaatagacattattttctcattattcaaatgaggtaattagagcacagaggtttgcaaatcacccaaggtcacccaggtacatggtagaattgggacttaaagccagttcttttttcctccastgttctttctattcctgccaatgcagataaacctttgaaaaaatgtaaaagtctgacttgggaaaaggaatttagtttattttactttccaatttctcagtctgattttcacaaagagagttttttgttgttgcttgtgaataggtttctatatatttttattggccctagctatgtgactcttctcaaagcctaaaaacctgaatgtattttcaaactgataatggtcacttctacccaacattatgagctttgtcaatacgttttcctcatcttctgtcatacatatgcatgcttattttattttttacatatttatttcttattttctccccccaaattcacctccctcattgtccaaattcaatacagctatggtattggcaatatctactttgccttcttatgatgtggtcatttgtatcaaatgagaaaacaaatgttgtttcaaagtatgatgagctatacaaatgaaagagatctagaaactgtatttcagtctgaagtttaatgttactctctcttatgccaggataggattaccagtgatgtcagtgaacagaaaaagagatacattttcccacagttttgttctttgaaaaactatgttttgttctctgtaaataaaggggaaagaatgattttatagataatgctttcatttgcatgtaagacagcaaaattcaacggaccaattacaatcatgcatttttattttggcaaacttttttcttgccatttaaaattcgtaaattttattgtatataacccagtaaagttgattttagaaatctctaaaagttaaaaaaaaacccaaagaatgtcactatttgcaaccacttaagatctaagtattaagcatctgtggctgctaacatcacaaaaagagagacaactagacactatgtgccttttgctgaaagatcgtaccactacctagggtcatacccaaaacagatacttgcctctgatcaatcatctggatccaacaacgaatttacaagttacatagcagccagaagatacatggaactactctatgggaattcaatcagccaaacccatatcgtgagaacatttatagaaaaacaaccttcatcaagtaaattttaaggataaaatagaagagatagagggcaagatagaagagatagagggaaaacttgcacattcaaagagatttaggtatctatcacattgaagagattataattcctcatcttgttgatgttcatgccttttgctgtctaatgttacagtacccctccaccataggaggggttacctgttctacccct

SEQ ID NO: 22676 - DNA, 1526 bp, Homo sapiens
cggtgaccccacacaaagttgtaggagctgagctttcattagaaatagtgtttgtcccagaatattctatgcgccattttatttagtttcttctacagtcctcagaaatagacattattttctcattattcaaatgaggtaattagagcacagaggtttgcaaatcacccaaggtcacccaggtacatggtagaattgggacttaaagccagttcttttttcctccagtgttctttctattcctgccaatgcagataaacctytgaaaaaatgtaaaagtctgacttgggaaaaggaatttagtttattttactttccaatttctcagtctgattttcacaaagagagttttttgttgttgcttgtgaataggtttctatatatttttattggccctagctatgtgactcttctcaaagcctaaaaacctgaatgtattttcaaactgataatggtcacttctacccaacattatgagctttgtcaatacgttttcctcatcttctgtcatacatatgcatgcttattttattttttacatatttatttcttattttctccccccaaattcacctccctcattgtccaaattcaatacagctatggtattggcaatatctactttgccttcttatgatgtggtcatttgtatcaaatgagaaaacaaatgttgtttcaaagtatgatgagctatacaaatgaaagagatctagaaactgtatttcagtctgaagtttaatgttactctctcttatgccaggataggattaccagtgatgtcagtgaacagaaaaagagatacattttcccacagttttgttctttgaaaaactatgttttgttctctgtaaataaaggggaaagaatgattttatagataatgctttcatttgcatgtaagacagcaaaattcaacggaccaattacaatcatgcatttttattttggcaaacttttttcttgccatttaaaattcgtaaattttattgtatataacccagtaaagttgattttagaaatctctaaaagttaaaaaaaaacccaaagaatgtcactatttgcaaccacttaagatctaagtattaagcatctgtggctgctaacatcacaaaaagagagacaactagacactatgtgccttttgctgaaagatcgtaccactacctagggtcatacccaaaacagatacttgcctctgatcaatcatctggatccaacaacgaatttacaagttacatagcagccagaagatacatggaactactctatgggaattcaatcagccaaacccatatcgtgagaacatttatagaaaaacaaccttcatcaagtaaattttaaggataaaatagaagagatagagggcaagatagaagagatagagggaaaacttgcacattcaaagagatttaggtatctatcacattgaagagattataattcctcatcttgttgatgttcatgccttttgctgtctaatgttacagtacccctccaccataggaggggttacctgttctacccct

SEQ ID NO: 22677 - DNA, 1526 bp, Homo sapiens
cggtgaccccacacaaagttgtaggagctgagctttcattagaaatagtgtttgtcccagaatattctatgcgccattttatttagtttcttctacagtcctcagaaatagacattattttctcattattcaaatgaggtaattagagcacagaggtttgcaaatcacccaaggtcacccaggtacatggtagaattgggacttaaagccagttcttttttcctccagtgttctttctattcctgccaatgcagataaacctttgaaaaaatgtaaaagtctgacttgggaaaaggaatttagtttattttactttccaatttctcagtctgattttcacaaakagagttttttgttgttgcttgtgaataggtttctatatatttttattggccctagctatgtgactcttctcaaagcctaaaaacctgaatgtattttcaaactgataatggtcacttctacccaacattatgagctttgtcaatacgttttcctcatcttctgtcatacatatgcatgcttattttattttttacatatttatttcttattttctccccccaaattcacctccctcattgtccaaattcaatacagctatggtattggcaatatctactttgccttcttatgatgtggtcatttgtatcaaatgagaaaacaaatgttgtttcaaagtatgatgagctatacaaatgaaagagatctagaaactgtatttcagtctgaagtttaatgttactctctcttatgccaggataggattaccagtgatgtcagtgaacagaaaaagagatacattttcccacagttttgttctttgaaaaactatgttttgttctctgtaaataaaggggaaagaatgattttatagataatgctttcatttgcatgtaagacagcaaaattcaacggaccaattacaatcatgcatttttattttggcaaacttttttcttgccatttaaaattcgtaaattttattgtatataacccagtaaagttgattttagaaatctctaaaagttaaaaaaaaacccaaagaatgtcactatttgcaaccacttaagatctaagtattaagcatctgtggctgctaacatcacaaaaagagagacaactagacactatgtgccttttgctgaaagatcgtaccactacctagggtcatacccaaaacagatacttgcctctgatcaatcatctggatccaacaacgaatttacaagttacatagcagccagaagatacatggaactactctatgggaattcaatcagccaaacccatatcgtgagaacatttatagaaaaacaaccttcatcaagtaaattttaaggataaaatagaagagatagagggcaagatagaagagatagagggaaaacttgcacattcaaagagatttaggtatctatcacattgaagagattataattcctcatcttgttgatgttcatgccttttgctgtctaatgttacagtacccctccaccataggaggggttacctgttctacccct

SEQ ID NO: 22678 - DNA, 534 bp, Homo sapiens
aacaacattattttttcatgactatttcatatataatccaacaggagaaatacagcttttcttgatataaatgttagtcatctttgtatattaaatcatttcatatttcaacctgcaacctttatcagaaacaataaaaaatagaacttgcaaagacttaggaattatatataacatttaaagattatccagcatctgaaagtcagaaatggattaggggcatctgtttaacttacctttactccatctggtttcttcaacaaactcttggctgctgtaaaatgagagtaaaatcagtttagtgagttatccatagaaacccacagccagacaacaaagcagtcaggttattgtctccttctaccacctttgctgagttctggccaacatatggcaagttatcaaagtcacactgatgaacgcgagcttacaggacattgaaatacagtatcacttttcttggtttgccacagcaaatttagaactaaagagtagttcgttgcatayaattgaatactttgccagttgtgttta

SEQ ID NO: 22679 - DNA, 1048 bp, Homo sapiens
ttgtatgtataaatgttacagacaaaatcagtgaaatttaacgtatgtgtgacctttaagtggtaattgtgtatattttttcacatatttwaaaagttgctaaataagtatgataagcttaatttctttctctttctttcaaactctacctagcccaagcctcactattattttgcatcctttcctgaccagtctagtccatagacgtctcctttttgtaaaaagctcaaagaacagtcgtttctaaacattttgctatgaagcaagttaatttttaccttttgtagaccctacctatgcttccagattttatttagcaaagatgcatttacttcgtcatttgtttcttcagtttctattttatgggtactattaaccagcagtagacaatagtggcattgatctgccaaatttgatgagaagagccaggtctgggatttggactgagtgaatgtgggcagatgtggtacaggtgtttggaggacacagaggctgaagtcctcggactccgtagcagagcagagcagtgtggattagggcttggacagagagagagcgagctgatgactggaagtgtgtgattgccagagatgagtgggaatgctgcatgaagccaggaatgggccaggagctggatcacgcattgtcagcataggatctgattccaagtgagaggcaaatagcacaagaagtaaatagagaaaaattaagagcaatcatatgtcacctgtatattattatataattcaaccatggatccattcatcaagaaagtgcccttccttatgcctgcagtgtcattcctatttgggtctttaggggatcctaaacaatttctgaaataattttagctaagtgtctgtctctggtaaatgcacattagcttttaaaaactattaaaaatagtagacatttatgaagaatcactgtgctgcctcttcctatgagaagactattcttcccagtcccaatttcccttgtccaaggaaaaggagtgaaaagaacatgtgctatttctgaacaatagctttaagagctctcttgtggc

SEQ ID NO: 22680 - DNA, 546 bp, Homo sapiens
gttggtgggtatattttaatgctccattgattatattgacacagtaggtgactcggttgttcacaactttacacacagttttctttcttggtcataccccaagccactttctataatttgtagaaagcatgtgttcagaaaagctgcttaacaaaatagttgtgtaccataggtgaaggaagcataatgagatcatctttgatacttgcagctaatataaatttaaaagagatgtaagcatttataactctctttaaatgtgcggcaatagttagcatagaagttatttgtgaacaaagaacccacaattaactgaacactaaactcgactttgtaatacttgaaaataaaaataattgtattttagtaaagcattttatactatcttaacattcagttyctgttccctttttaaatgttcagtctttccactgggagacattacaaaatgaatttagtaacagtaactaacacttaccgtagttcttactgtgtaggatcttatttaatacaacaaccctaggaggaggctaatattattatccc

SEQ ID NO: 22681 - DNA, 647 bp, Homo sapiens
gtggcagcttggatctggccattttctctgcccctctcctattatatcttttaatttaatgattctataagcatctcacatctggggaagcttttctctaagacgaatatgatgaaatatattgagagatagtgttcatttcctggtggatgttccctttctaacctgcttgtttgatcttagatctgctgttccctactgttttgtgaagactatgacattagtatagttgtaaagttatgtgagatgtacataaaaagataacagtcacgcgtcwtttaacggcagggatacattctgagaagtgcatccttaggcgatttcatcattatgcgaacatcagagtgtacttatgcaaacctagatggcatagcctgttacaaacctaggctatattgtatagcctattgttcctacactacaaacctatacagtatcttactatattgaatactgtaggaagttgcaacactatgggaagtttttctgtatctgaaacatatataatgtacagtaaaaatatagtaactgcagaaagatgagtatcttctcccgtacccagatccataggcctgtgatgagaatcaatggaaattttgtatgtgggtggcaggtttcaccccatagaaaagtgatagagaataatg

SEQ ID NO: 22682 - DNA, 640 bp, Homo sapiens
gaatttggtttttctgtttagatctctaggaatccattaaaggtctttaaacatggctgtagataatttattctcaaacattttgatctcaggaattctttacactcaaaaaaaattgacagtcttcaaagaacctttgtttatgtggataactaccaatattagaaatataaaatttctaatttttaattaaaattgaaaagtagatatttaaaaatatttattaatcaaatcaaatgacaactgctttaatgaaaatgttttaaagaacataatcatattttccaaaccaaaaaaaatagaggtactgttttatattttttcaaatttcattagtgcatggcttaatagaggacaactgcattctctttctttcgctctctttcatttctttctttcttcttccttctgtagagatggagtcttgctatgttgcctaggctgktctcaaactcatggccttaagcaatcctcctgccttggccttacaaagtgctgggattacagacatgagccatactgtacctcacttcttttttccttttagagatagggtctcactctgtcgctcaggctgaagtgtagtggcccgatcatggctcactgcagcctcagacttcttaagtcaaccattgtattt

SEQ ID NO: 22683 - DNA, 520 bp, Homo sapiens
acataacatacacaatgattataaaataaaatgcagagttgagattaagcatatctattatatcactaaacatgagtaagttttagctagtctattttaaaaattgtttcagattggctcacaaagcaaagcctagttctatactatgtacaagaaatacaactaaaatctggttttattccaaatagtaaaaaatacagatattggcaagtatgtcaggcatatggartcaataagagtgcagaggttgagatcttattatcagataaaacagaattcaggccaaaatgcagcaaataagacaaagaaagacactgtatgaaactagaaatccataaatcataatgaagacacaacagttatcaatatccgtgtaccacttatgtaaagttgaaactacaaagtaagatgcaagaatatagaggatttgaggagtaaagatgataataatgcaatattaacagtgtaagacaaggcaagtgaactaaaaaactagataaaatattgagacactataatc

SEQ ID NO: 22684 - DNA, 520 bp, Homo sapiens
acataacatacacaatgattataaaataaaatgcagagttgagattaagcatatctattatatcactaaacatgagtaagttttagctagtctattttaaaaattgtttcagattggctcacaaagcaaagcctagttctatactatgtacaagaaatacaactaaaatctggttttattccaaatagtaaaaaatacagatattggcaagtatgtcaggcatatggaatcaataagagtgcagaggttgagatcttattatcagataaaacagaattcaggccaaaatgcagcaaayaagacaaagaaagacactgtatgaaactagaaatccataaatcataatgaagacacaacagttatcaatatccgtgtaccacttatgtaaagttgaaactacaaagtaagatgcaagaatatagaggatttgaggagtaaagatgataataatgcaatattaacagtgtaagacaaggcaagtgaactaaaaaactagataaaatattgagacactataatc

SEQ ID NO: 22685 - DNA, 543 bp, Homo sapiens
ccatctagtgtaggactatgacactttacttttggagtaattgaactcacatcaaagaacattaataaggagatataaggcttggtattataatgaaggtggaggcagcaaaggtgataagtggtttgagaaaactcataaaatgcgtagacttctgaaacttagactacaaagtgctaaggaggagaattgcctggcagactgctgtttatatatctttgtctctctaatggtgtttartacagtgccttacacatagtaatgacataaatgcccaaagaaaggttcaactgataatgactgcaatgaaattactgagctggtatgaaaaagatcaagagtgagtcctgttgtaattgttttagtcagatgatgaacattttgtagggtatcaagactggaatagatggagatgagatggacccatcttgttgaggacattaactttgaaaaagaagaccagtatggtggctcatgcctataatctcagcactttgggaaagccaaggcaggaggattacttgagcccaggaatttgagact

SEQ ID NO: 22686 - DNA, 622 bp, Homo sapiens
tgaaaatcccagccatgygaggctggcttctccaggttctctgaggcctgtgagtccagggctggctggagggaaagcccctggccccttaaagccactgatcatgttcccatagagggatcctgagaatcccctgggagagaaaatgtcggagccccagtcctggcacccccctgaccagcttgggcctcagcctcctcatccatgaaaagaatggacaagaggggtctgggtgcggtggctcacgcctgtaatcccagcactttgggaggccgaggcaggtggatcacgaggtcaggagttcaagaccagcctggtcaacatggcaaaaccctgtctctactaaaaatacaaaaattagccggttgtggtggtgcacgcctgtagttgcagctatttaggaggctgaggcaggaggatcactggaacccgagaggcagaagttgcagtgagctgagattgtgccacggcactccagcttgggcaacagagccagactccatcttaaaaaaaaaaaaaaaaaggagggacaagaggcaccagaagctcctgtccaggtctgggcctccctcgggtcactcagttctcccccattcattcattcattcactcactcactcac

SEQ ID NO: 22687 - DNA, 437 bp, Homo sapiens
aaactaccttttctctggacttcagaaggcttaagctttatatgaaaatatcagagtaggctgggcacggtggctcatgcctgtaatcccagcactttgggagactgaggtgggctgatcacctgaggtcaagagatcgagaccatccttgccaacatggtgaaaccctgtctctattaaaaatacaaaaattagccaggcatggtggctcacacctgtaatcccarcactttgggaggccaaggcgggcagatcacgaggtcaggagatcaaggccatcctggctaacacagtgaaaccccgtctctactaaaaatacaaaaaaataggtgggtgtggtggcgggcgcctgtagtcccagctacttgggaggctgaggcaggagaatggcatgaactcgggaggcggagcttgcagtgaggtgagatggcgccact

SEQ ID NO: 22688 - DNA, 610 bp, Homo sapiens
ctctttccaaaatgaataattccaaataacctgttataaaagaaaatgtctttagtaattacagatttttctcctaaatgtgagaatttcaaccatcattttcagttgcctcttattaaatacatacagattttaagcgttgttgaagtgatttcttaagtaatgataatgtttacagtaatacaaaagaatttgttagctgcctgaacagctcaaagtttaagatgtaatgacaacacaaattaaatattatgaataaaagataatcaagcattatgattttagaaaatatctcattttcatttctcctcaaataacgttttatttttgaatcccctatttttaaaaagatgcttaaagtattcattttctatgtattttcataaaatattcactaaatgytagctatctttctggagtaatttcatgttttaaacccatttttgagttgtgttatttcttatactgcatttgctccaaaagatggcacagattttttttcactctaaactgcatgactgatagcgttttatttgatatattctatttctttcattatacaactcacatataaataaacaaactaaaaaaattttacatagcttgccag

SEQ ID NO: 22689 - DNA, 610 bp, Homo sapiens
ctctttccaaaatgaataattccaaataacctgttataaaagaaaatgtctttagtaattacagatttttctcctaaatgtgagaatttcaaccatcattttcagttgcctcttattaaatacatacagattttaagcgttgttgaagtgatttcttaagtaatgataatgtttacagtaatacaaaagaatttgttagctgcctgaacagctcaaagtttaagatgtaatgacaacacaaattaaatattatgaataaaagataatcaagcattatgattttagaaaatatctcattttcatttctcctcaaataacgttttatttttgaatcccctatttttaaaaagatgcttaaagtattcattttctatgtattttcataaaatattcactaaatgctagctatctktctggagtaatttcatgttttaaacccatttttgagttgtgttatttcttatactgcatttgctccaaaagatggcacagattttttttcactctaaactgcatgactgatagcgttttatttgatatattctatttctttcattatacaactcacatataaataaacaaactaaaaaaattttacatagcttgccag

SEQ ID NO: 22690 - DNA, 252 bp, Homo sapiens
gagtctcctggatcctactccattatatagcaactaaaggggcagtgcrtggtattggaggtggcccctgggccctgctcctgcagctgtgtccagagccattctggcaagtccatgtctatgcagtgcttgtgtcaacctgtggactcagcttggcttcagtgtcagatgagaactccctgtgggggcagccattatctttcccatttcagcaaacatttatccatgcttaccctgtgctgggccctgggg

SEQ ID NO: 22691 - DNA, 910 bp, Homo sapiens
tacgaaaaatgtttcatttgtcctgatactctgaggtggttttcgactttctgatgggcttaccccctctcaccgcaacttattctcccctcttctggctaggcttataatccaagattcaaagagatagaattctttatgaacctgcttggcacagaacagcaagaaagaaaaacacattggaaaggaaacagcagttttgctaaattcaataaaaggcattgagaaaagagattcatgggtagtgtttagaccaaaggaaagaaagcacattcatagcccttattttcttagatttcattctttttatcgttgaatgatatatgaatattatcttagctggaaaggatctraaagtactgtcccccagtgcttgtcaattttattcaaaatcatgaagaactgaaaagcaatcttgacattcctctgtttatgttcagtatatcagatacaactcagctagaaacatgaactctgatctgacacaaagacagggtccaaaagatatcagagacacagccagggatacaaaggttcacctaattgtactatgttcagagagcaaagggaaaggacaatttcaatactatacatgttttctaactagcaagactacagcttatgcggactattcagcaacttccctcttaactgaaaaatattctaatggagattatcctactctctgaaaccatggcaaggtgacagcatgatgatgggtgtgagtgactaatagggagatgtcagcaggaatggaagcgaattacccagtgagtggcctctcctatctacaagtgataaacaggaggaaggagatactcatcaagaaaaaagaaagctagaaagtgaacaactacacaagaaagttgttgtatatcagcctgaactagacagtagctatttcagttca

SEQ ID NO: 22692 - DNA, 702 bp, Homo sapiens
ttggctgaagaaggggaactgtatctacttttatcacttttggtgttttaagatctgaattcctgaatagggaatctagggcccatcctgcagctgtgtagctgaccataggattaaaagcagctccaattctcaaaacactacagccagagcaagtaaggctttagggagtatcattgggaatcaggagacctgggtgtggctctgacacctgagacataaggtcacctttctgggccactctaatatattatagccttttcattaaaaggttagactagaggttaaattcacaagaacactgaaaatggtctctgtgggtgattcactgttattctataatgagcattaaactgtcattttctgtttccttctgtatcctagctctactgtgattccttctctttcctggtttctctcaataccatagttaattttctttctgaattccaagagcacttgttcttttcacttttttactttgcctaaaaggttactgggttttatgaatattcatatttcttgatttaagtctccataacttaattagaaattccaaagtcccacaaccgtagtttattattttgattatgcttcagataataaagctagtrtgaagtgatggctttttaaatggtgagttaagcaagctgttcttgtatccgcaaataaaccaaccttatagttcttttatttatttta

SEQ ID NO: 22693 - DNA, 576 bp, Homo sapiens
ttgcttcactcttggagttttctaggcctgtgcagcctaagcatgatcctggctctgactcrggacatggcgaaggaaaaggagactcttgacctttttcttcggcttctaccggttgctatttcatagtacagcagccctaagtttattgccaccaggctaatggcacagctattcaacactgacccagtttaaacctggaatgttagggaagcccatgttggggtagcatgacaggtgtggagtagaacattatgaagttttctcagctaatgctaacctttcttttcatggttattaaacatgagtaaactttatccgaaataagtgttattgtggcatatgaaacattgtatacagaaaagggcaaagtcattaagtgtatagttaatgaataagtatagctcaaaatatattaaatatattttggggaatgttaagtaattatgtagacctcctctgtaaagcctcactttcatcagtctcttcagttaggctcttttctgctctgacatcaccttctctcaacttctgttatagtactgtcataatactttgtctctttgtctgttcaag

SEQ ID NO: 22694 - DNA, 576 bp, Homo sapiens
ttgcttcactcttggagttttctaggcctgtgcagcctaagcatgatcctggctctgactcgggacatggcgaaggaaaaggagactcttgacctttttcttcggcttctaccggttgctatttcatagtacagcagccctaagtttattgccaccaggctaatggcacagctattcaacactgacccagtttaaacctggaatgttagggaagcccatgttggggtagcatgacaggtgtggagtagaacattatgaagttttctcagctaatgctaacctttcttttcatggttattaaacatgagtaaactttatccgaaataartgttattgtggcatatgaaacattgtatacagaaaagggcaaagtcattaagtgtatagttaatgaataagtatagctcaaaatatattaaatatattttggggaatgttaagtaattatgtagacctcctctgtaaagcctcactttcatcagtctcttcagttaggctcttttctgctctgacatcaccttctctcaacttctgttatagtactgtcataatactttgtctctttgtctgttcaag

SEQ ID NO: 22695 - DNA, 576 bp, Homo sapiens
ttgcttcactcttggagttttctaggcctgtgcagcctaagcatgatcctggctctgactcgggacatggcgaaggaaaaggagactcttgacctttttcttcggcttctaccggttgctatttcatagtacagcagccctaagtttattgccaccaggctaatggcacagctattcaacactgacccagtttaaacctggaatgttagggaagcccatgttggggtagcatgacaggtgtggagtagaacattatgaagttttctcagctaatgctaacctttcttttcatggttattaaacatgagtaaactttatccgaaataagtgttattgtggcatatgaaacattgtatacagaaaagggcaaagtcattaagtgtatagttaatgaataartatagctcaaaatatattaaatatattttggggaatgttaagtaattatgtagacctcctctgtaaagcctcactttcatcagtctcttcagttaggctcttttctgctctgacatcaccttctctcaacttctgttatagtactgtcataatactttgtctctttgtctgttcaag

SEQ ID NO: 22696 - DNA, 576 bp, Homo sapiens
ttgcttcactcttggagttttctaggcctgtgcagcctaagcatgatcctggctctgactcgggacatggcgaaggaaaaggagactcttgacctttttcttcggcttctaccggttgctatttcatagtacagcagccctaagtttattgccaccaggctaatggcacagctattcaacactgacccagtttaaacctggaatgttagggaagcccatgttggggtagcatgacaggtgtggagtagaacattatgaagttttctcagctaatgctaacctttcttttcatggttattaaacatgagtaaactttatccgaaataagtgttattgtggcatatgaaacattgtatacagaaaagggcaaagtcattaagtgtatagttaatgaataagtatagctcaaaatatattaaatatatttyggggaatgttaagtaattatgtagacctcctctgtaaagcctcactttcatcagtctcttcagttaggctcttttctgctctgacatcaccttctctcaacttctgttatagtactgtcataatactttgtctctttgtctgttcaag

SEQ ID NO: 22697 - DNA, 576 bp, Homo sapiens
ttgcttcactcttggagttttctaggcctgtgcagcctaagcatgatcctggctctgactcgggacatggcgaaggaaaaggagactcttgacctttttcttcggcttctaccggttgctatttcatagtacagcagccctaagtttattgccaccaggctaatggcacagctattcaacactgacccagtttaaacctggaatgttagggaagcccatgttggggtagcatgacaggtgtggagtagaacattatgaagttttctcagctaatgctaacctttcttttcatggttattaaacatgagtaaactttatccgaaataagtgttattgtggcatatgaaacattgtatacagaaaagggcaaagtcattaagtgtatagttaatgaataagtatagctcaaaatatattaaatatattttggggaatgttaagtaattaygtagacctcctctgtaaagcctcactttcatcagtctcttcagttaggctcttttctgctctgacatcaccttctctcaacttctgttatagtactgtcataatactttgtctctttgtctgttcaag

SEQ ID NO: 22698 - DNA, 1895 bp, Homo sapiens
tgcatatgtatagacaaaacagcttatgaatgtatttcatcagcaatatagatgtgctattacaaatcatttttatatctacatatcttttgtgaaaccggattaacgtgggtgcttttaaaatctaatataggaagttaaataaccaaataccaccatgaacaacaaacaaaaggagacaataaaagaagagaaccactggatctgatagaaatgtagaaatactggtgtgccagtgtagtctgtgacatttcttcatgaatgaattttgttatgtgttgaattgtgtctccccaaaacatgaagtcctaattgtcagtacctgtgaatgtgacattattggaaaggtctttgcagatgaccaaatgaagatgaggtcattaaggttggctctaatttagtatgactgtgttcttataaagcagggtactctggacacagagagagagtcacagggcaaatgctatgggaagattggagttacgatactgcaagccaaggaacaccaaagattgtcattgtcaggaaaccaccagcaagagagaggcgtgggacatgttctccctcagaacgctgaatgtaaccaaacctagtttcagaagaaaccaaccctgaatgtaacccaaactcaagtttggttgttcactgctcaaaaaccaaatgtgagagatgagatttggtgggaagagaagcaggtttttcagaatcagccaactgagaaaattttggattaacgtcctgaagtaccatcttaagtcagtacaaatttcaggctatttttaagtgaagggaaggagaaagagttgggaattgggatcaagaggtaactaatgactgcactgcaggcatctgggctccagggagggtccaaggaggttgggaatgtctttttctttggtcaggtcacaatgctcctataaatctttaacaaaatatatagttgtatacatacttctcctttaatctcagcgttacttttaaaaactacatgattgctgtttttgcaaattacctcactgttctaaaattatccttgcctatgtgtaggaatcgggtaagggccccttaacaaaaatggagttagttataatattcataactcttttgctgtttcactattacatgaagacaccttgtttttgggcctccagactgagacaaaaatttttgttgtttaaggcacccggtttgtagtactttcttatggtactccttgcaaactgataccaatttaatttggtaacagatgatctaatatgcatttcaaaagccatagcatctttccatttagtgtcagttttaaaggccagattatttactcatgacaaattatttcctacagaaagaatgtagggaagggatagagtatattatacagctttgcttgaaaagtatacaagtagagctttaagattatctttagatctgtttttcaaattagggaagtccttgttaagtaaaatctatatagcaatatggaaggtgcttcaaaggcaggggtaaaaaagcaaaatcaatttagcataggtcaataaatgtgtatatttgcccccaaaaaatataaactggyttagcagcaagacacctttcttcattaatgatgtgctggtttaaaatgcactgacctactctcaacttataagactggctcacatccaaacctcctgtttatagatgctgctagatggtttgcttagcaacgtacataatgggaccacggggaatttggttttccagctaaatgagtttagaatgctcaaataaaagcaaaggttcaggtctgtagaaaaaaaaaacagaacttaaagcccacaagtaaaaaacaatcacaaataattggattatttttgcaaatcattttttcaaattgttaaattcatatttataagtgattt

SEQ ID NO: 22699 - DNA, 398 bp, Homo sapiens
tgtctaagcacagkccctgcacttggagcccactgagcctggaagacggggatccctgcttctcagcctgcgggcaacagggcagggatgggtggggcccgctttctccatttcaggtggcgtctgctgtgactcatggtgttggctcctcttgtccctcccctccttccctgtcaggatgcgcaggtcccacagaagatgagctgtccctgcccgagggacccagcgtccccagcagctccctaccccagactccggagcaggagaagttcctccgccaccactttgagacactgactgagtccccctgcagaggtagggccctgcctcacccacacctgccgaggccgtctgtgcagcctgggcacagcattggcgtccctggagttggctcccca

SEQ ID NO: 22700 - DNA, 589 bp, Homo sapiens
ctgcaacctccgcctcacaggtttaaacgattctcctgcctcagcctccccagtagctgggattacaagcgcctgccaccatgcccagctaattttttgcatttatagtatagatggggtttcaccatgtttgccaggctggtcttgagctcctgacctcamgtgagccaccatgcccagccaaagatggcacttttggtcacttacattcttctgtggttgggtaaacctgggctacaaaactggtttcccagagacattcataattctctccttaactttatccaagcttaatttttaatttttattttttgagacacagtttcattctgtcccctaggctggagtgcagtggtgtgatcttggctcactgcaacctccgcctcctgggttcaagtgattctcctgcctcagcctcccgagtagctgggattacaggcgtgcgccagcacgctgggctaatttgtttctgtatttttattttttttattattttttattttatttttattttttgagatggagtcttgctctgtcacccaggctggagtgcagtggcgcaacctaggcttactgcaacctctgtctc

SEQ ID NO: 22701 - DNA, 573 bp, Homo sapiens
cactagcaataagcaacttcaaaatttctaccttgaacaaagtgacagctttgtcacccacagaacactaggaccagacgatacctttaagcagatgtccctcagctgtgctctgacttctgctaccagcgtcatattcttgctgttgacaaaattctctttgcaccaatcctgaataggagaaagagtgatatcacaatccactcattcaccatttatatgttcacagagacggggtcttgctctgttccctaggctggagtgcagtgatacaatcatagctcactgcaaaccaatcctcccacctcagcctcccagatagcttgaactatctgcacatgccaccatgcccagctaacaatcctctcatctctatagagaaaatataacaacatttttagaacacagttgaattcagagaaaaaacttcaggtgccaaaaagaaacgtaggaaaatatctttatatcaaaaaayatgaactataagaaaagtgttaataatttaaactaaagaaaaacttgaagtttcccagattgggatatttgtctcatcatacccaataaatgattaga

SEQ ID NO: 22702 - DNA, 1219 bp, Homo sapiens
acactcaggcctcatccccgagggctcagccgtgcggttgctgccggcagccaggcctcgacccacccccgcccagatcccaacctcaaaaagtggccgcttctgtccagctccccgctccaggagccccctaccttcaagactggcgtgccctctgggggaggaggggtccgtggggacaaactcccaatggccacagcccctggcctcgcaggaggggtctgacctggcgccsgcagctgacaggaaaacgtccggcccactgtcagaccgcagcccggggtggggaggggacatttctgcaacacttccccagcagccgaggccgccgcctcccctgcccgcccgcagaggacaggatgtaaccgggagggaacagcctggacagagaccaggaggtgggatctgaaagtcaatagccccagggctgacagccgggtgggggcagtggaaggccccccacagcctcagaggccaggctggggtgcggggcagtggggagccctgtgagatggggagagaggggcagagctggcccaccgtaggggagcgcacagaacacggtggcggctgtccctggagaaggtgcaagtggggtctgtgggtttcacttccccgggaaccacctcccctcctgcggcagcatctgaggagcccccagcggccccctgccccatcccagggcccccgaatgtggagcgtgggcgaggaccctcccggctctgccgcgcctcgctgtgtgactgcgggcaaatccccaccctctccgtgctccggcgaagaaagaagagtggctcccacatcccgcctgctaacagccacgcctgctggatttttctttgaaaagatggaatcggctcgttttcccccttcccccttcctcactgcctcgatgcatttatttagaaaagacgttttagataaaatcaccataaatggaaaaatcaagaatggaaaaaacccaaggaaaagcagacgcggggtgaaattccagctgaactgcgtgcctgtcaaaactgtctttttctttggagacagggtctcacactgttgcccaggctggagcgcagtggtgcaatcccagctcactgcagcctggaacgagctcctggggcgatcctccctcctcggcctcccaaagtgctaggatcacaggtgtgagccaccctgcccggccccaaagatgtttttgctgcaaggattgagtgtattttatgtg

SEQ ID NO: 22703 - DNA, 1219 bp, Homo sapiens
acactcaggcctcatccccgagggctcagccgtgcggttgctgccggcagccaggcctcgacccacccccgcccagatcccaacctcaaaaagtggccgcttctgtccagctccccgctccaggagccccctaccttcaagactggcgtgccctctgggggaggaggggtccgtggggacaaactcccaatggccacagcccctggcctcgcaggaggggtctgacctggcgccggcagctgacaggaaaacgtccggcccactgtcagaccgcagcccggggtggggaggggacatttctgcaacacttccccagcagccgaggccgccgcctcccctgcccgcccgcagaggacaggatgtaaccgggagggaacagcctggacagagaccaggaggtgggatctgaaagtcaatagccccagggctgacagccgggtgggggcagtggaaggccccccacagcctcagaggccaggctggggtgcggggcagtggggagccctgtgagatggggagagaggggcagagctggcccaccgtaggggagcgcacagaacacggtggcggctgtccctggagaaggtgcaagtggggtctgtgggtttcacttccccgggaaccacctcccctcctgcggcagcatctgaggagcccccagcggccccctgccccatcccagggcccccgaatgtggagcgtgggcgaggaccctcccggctctgccgcgcctcgctgtgtgactgcgggcaaatccccaccctctccgtgctccggcgaagaaagaagagtggctcccacatcccgcctgctaacagccrcgcctgctggatttttctttgaaaagatggaatcggctcgttttcccccttcccccttcctcactgcctcgatgcatttatttagaaaagacgttttagataaaatcaccataaatggaaaaatcaagaatggaaaaaacccaaggaaaagcagacgcggggtgaaattccagctgaactgcgtgcctgtcaaaactgtctttttctttggagacagggtctcacactgttgcccaggctggagcgcagtggtgcaatcccagctcactgcagcctggaacgagctcctggggcgatcctccctcctcggcctcccaaagtgctaggatcacaggtgtgagccaccctgcccggccccaaagatgtttttgctgcaaggattgagtgtattttatgtg

SEQ ID NO: 22704 - DNA, 1219 bp, Homo sapiens
acactcaggcctcatccccgagggctcagccgtgcggttgctgccggcagccaggcctcgacccacccccgcccagatcccaacctcaaaaagtggccgcttctgtccagctccccgctccaggagccccctaccttcaagactggcgtgccctctgggggaggaggggtccgtggggacaaactcccaatggccacagcccctggcctcgcaggaggggtctgacctggcgccggcagctgacaggaaaacgtccggcccactgtcagaccgcagcccggggtggggaggggacatttctgcaacacttccccagcagccgaggccgccgcctcccctgcccgcccgcagaggacaggatgtaaccgggagggaacagcctggacagagaccaggaggtgggatctgaaagtcaatagccccagggctgacagccgggtgggggcagtggaaggccccccacagcctcagaggccaggctggggtgcggggcagtggggagccctgtgagatggggagagaggggcagagctggcccaccgtaggggagcgcacagaacacggtggcggctgtccctggagaaggtgcaagtggggtctgtgggtttcacttccccgggaaccacctcccctcctgcggcagcatctgaggagcccccagcggccccctgccccatcccagggcccccgaatgtggagcgtgggcgaggaccctcccggctctgccgcgcctcgctgtgtgactgcgggcaaatccccaccctctccgtgctccggcgaagaaagaagagtggctcccacatcccgcctgctaacagccacgcctgctggatttttctttgaaaagatggaatcggctcgtttycccccttcccccttcctcactgcctcgatgcatttatttagaaaagacgttttagataaaatcaccataaatggaaaaatcaagaatggaaaaaacccaaggaaaagcagacgcggggtgaaattccagctgaactgcgtgcctgtcaaaactgtctttttctttggagacagggtctcacactgttgcccaggctggagcgcagtggtgcaatcccagctcactgcagcctggaacgagctcctggggcgatcctccctcctcggcctcccaaagtgctaggatcacaggtgtgagccaccctgcccggccccaaagatgtttttgctgcaaggattgagtgtattttatgtg

SEQ ID NO: 22705 - DNA, 1219 bp, Homo sapiens
acactcaggcctcatccccgagggctcagccgtgcggttgctgccggcagccaggcctcgacccacccccgcccagatcccaacctcaaaaagtggccgcttctgtccagctccccgctccaggagccccctaccttcaagactggcgtgccctctgggggaggaggggtccgtggggacaaactcccaatggccacagcccctggcctcgcaggaggggtctgacctggcgccggcagctgacaggaaaacgtccggcccactgtcagaccgcagcccggggtggggaggggacatttctgcaacacttccccagcagccgaggccgccgcctcccctgcccgcccgcagaggacaggatgtaaccgggagggaacagcctggacagagaccaggaggtgggatctgaaagtcaatagccccagggctgacagccgggtgggggcagtggaaggccccccacagcctcagaggccaggctggggtgcggggcagtggggagccctgtgagatggggagagaggggcagagctggcccaccgtaggggagcgcacagaacacggtggcggctgtccctggagaaggtgcaagtggggtctgtgggtttcacttccccgggaaccacctcccctcctgcggcagcatctgaggagcccccagcggccccctgccccatcccagggcccccgaatgtggagcgtgggcgaggaccctcccggctctgccgcgcctcgctgtgtgactgcgggcaaatccccaccctctccgtgctccggcgaagaaagaagagtggctcccacatcccgcctgctaacagccacgcctgctggatttttctttgaaaagatggaatcggctcgttttcccccttcccccttcctcactgcctcgatgcatttatttagaaaagacgttttagataaaatcaccataaatggaaaaatcaagaatggaaaaaacccaaggaaaagcagacgcggggtgaaattccagctgaactgcgtgcctgtcaaaactgtctttttctttggagacagggtctcacactgttgcccaggctggagcgcagtggtgcaatcccagctcactgcagcctggaacgagctcctggggcgatcctccctcctcggcctcccaaagtgctaggatcacaggtgtgagccaccctgcccggccccaaagatgttyttgctgcaaggattgagtgtattttatgtg

SEQ ID NO: 22706 - DNA, 1791 bp, Homo sapiens
taatgaatacattaggtaacgttacaaggttattgcaggaggcatttattaactaaacaaatttgtgttttcaacacatgtgggtgctctgctctcatgaacggagatgtaagaaagttaagttaggtccacatgataaacatatcaaatgaattaaaatatttctgtgtagagttttcccctaggtataggaacaatttactgtgggctataataaccccaggatgtgtagacagaagacacatggtgtctgtgtatactaaactctaatgaggttacaaaccacttctastctattccagatctattgaggctcctacttatcttggttggtatttgacccagtggacctcagatgcatggagagtcaacatttgtcatgtttttggtatggaaattagataaaattattacaacataaagtgtagcttcataaaaactaagaaaggacaaatacgtttcttcacatttcagacgctcacatctaggtgtgacattactttaatcaattagataataccagttacaattctctgtacctagaagatagtaatggctgacttcattcctctgtttgaatttcaggctttcacttaatcagacctgagtacttagatggtcacagctgggtattagatcctaatatcaaaatctgctatgaaaccacatgtgatcaatgtttagcaacaaagagaataaatgatggaccttggcaggtgtcccaggcactacacaaaattcacatcacattacaaagatgataagtagtctgattaaaatttattgcttttattcaccttacgtattgttccccaagcatttctttcagaataggctaattagcatacctttgggctccaagcagaagaaaatacaggaaattatatgtaggaatcagtagtgttggacattgtgtcttttcaagaacatacttagcctgtgaacagtgcagaaaaacatctgctggcaatgagctgcatggagcacgggtcacttggctcagcatgaattgaaattattagggaagaatttactcgcgaagatataacacagcatccacctaccgcttcacaatatttcaggtcaactgacttgccatcacttcgaacacaatccaacatccttgtttttattccatttccacaaactgccttctcactcagctgacatgtactccagtctgaaaaaaagggaagcccatcagaacagaaggctaagtaagaaacagatttcaaatgaaactctgatgacctgaatcccatatttaattcacaactgcttcctaagccccataatcaatcatcccccatgcagagcatatgggtcccagctttgaacgtatcaggagtcaaatggaattgctggggttgcacatagctacagggattattcttaaaggcagatgtctacttgaaaatcttgatagctagccgtttggtgacactgtgaaaatggctttggcttacagatcaatgtcacttaaaaactttctttcccaataaaaatataatttaaaatcttagcattacttttagccaaataatcataattgtgacagacggtactttaactgtgtagttatattcagataaaacatacattttatttcttatccatatttagaatgcaagaaaatgcatacgtttattaaagtgataaaaatcactttggccatatttattcattctcttatgtctttcgtaagaagacataaaagacacctctttccctgggtaacatagcacatcccagataactgtgattttttttttttgtatcatcaaaggaaac

SEQ ID NO: 22707 - DNA, 1791 bp, Homo sapiens
taatgaatacattaggtaacgttacaaggttattgcaggaggcatttattaactaaacaaatttgtgttttcaacacatgtgggtgctctgctctcatgaacggagatgtaagaaagttaagttaggtccacatgataaacatatcaaatgaattaaaatatttctgtgtagagttttcccctaggtataggaacaatttactgtgggctataataaccccaggatgtgtagacagaagacacatggtgtctgtgtatactaaactctaatgaggttacaaaccacttctactctattccagatctattgaggctcctacttatcttggttggtatttgacccagtggacctcagatgcatggagagtcaacatttgtcatgtttttggtatggaaattagataaaattattacaacataaagtgtagcttcataaaaactaagaaaggacaaatacgtttcttcacatttcagacgctcacatctaggtgtgacattactttaatcaattagataataccagttacaattctctgtacctagaagatagtaatggctgacttcattcctctgtttgaatttcaggctttcacttaatcagacctgagtacttagatggtcacagctgggtattagatcctaatatcaaaatctgctatgaaaccacatgtgatcaatgtttagcaacaaagagaataaatgatggaccttggcaggtgtcccaggcactacacaaaattcacatcacattacaaagatgataagtagtctgattaaaatttattgcttttattcaccttacgtattgttccccaagcatttctttcagaataggctaattagcatacctttgggctccaagcagaagaaaatacaggaaattatatgtaggaatcagtagtgttggacattgtgtcttttcaagaacatacttagcctgtgaacagtgcagaaaaacatctgctggcaatgagctgcatggagcacgggtcacttggctcagcatgaattgaaattattagggaagaatttactcgcgaagatataacacagcatccacctaccgcttcacaatatttcaggtcaactgacttgccatcacttcgaacacaatccaacatccttgtttttattccatttccacaaactgccttctcactcagctgacatgtactccagtctgaaaaaaagggaagcccatcagaacagaaggctaagtaagaaacagatttcaaatgaaactctgatgacctgaatcccatatttaattcacaactgcttcctaagccccataatcaatcatcccccatgcagagcatatgggtcccagctttgaacgtatcaggagtcaaatggaattgctggggttgcacatagctacagggattattcttaaaggcagatgtctacttgaaaatcttgatagctagccgtttggtgacactgtgaaaatggctttggcttacagatcaatgtcacttaaaaactttctttcccaataaaaatataatttaaaatcttagcattacttttagccaaataatcataattgtgacagacggtactttaactgtgtagttatattcagataaaacatacattttatttcytatccatatttagaatgcaagaaaatgcatacgtttattaaagtgataaaaatcactttggccatatttattcattctcttatgtctttcgtaagaagacataaaagacacctctttccctgggtaacatagcacatcccagataactgtgattttttttttttgtatcatcaaaggaaac

SEQ ID NO: 22708 - DNA, 543 bp, Homo sapiens
caagttcgttgttaaaaagtaagttctttttgccactgtagtcgtttctggaatcaaaacaataaaatgacatttctgttaagatgtttttcaagctagaggtgacaggcgtggctgtaagtccttgatggcaaagcctggctgtgagctgcagtccgggtactgtccattgcccctgcccatactcaatcatcttcatccgtgcaaggaaaatagtgacaatcgcctccgcggagtcaccgtgaggccccgtggtgactcgcagtatgcctgagtacttgaatggaagtttaatttgctggtttttatctgctctgttattcctggtcaatcttgagagcgactaaatattgatgattgagtttctttcttttttttgagacggactcttgctctgtcgcccaggcttgagtgcggtggcgcaatctsagctcactgcaacctccgcctcctgggttcgagcaattctcgtgcctcagcctcccgagtagctgggattacagacttgcaccgccacgcctggctaatttttgtatttttaga

SEQ ID NO: 22709 - DNA, 935 bp, Homo sapiens
cttgaagctaggaggttgagaccagcctgggcaacaaagcaagaccccatctccacaaaaaaaaatttttttaaataactttttaaaaaatagccaggcatggcggtgcacacctgtctcaggaggtttgggtgggaggatcacttgagcccgggaatttgaggctgcagtgagctatgatggcgccactgcacyccagcctgagcgacagagaccctgtctctgaaaaataataaaaaaagaagaagaaatgtaaccaggggctatcaacaaggatgctttgtggtttttgtttgtttgtttgagatggagtctcacttggtcgcccaggctggagtatagtggtgcaatctcagctcactgcaacctccgcctccctggttcaagcaattctcctgcctcagcctctggagtagctaggattacaggcacccaccaccatgcccggctaattttgtatttttagtagagacggggtttagccgtgttactcaggctggtctcgaactcctgacctcaggtaatcctccctccttggcctccgagagtgctgagataacaggcgtgaaccactgcgcccagccggcaaggatgctttgagctacaaacaacagaaagccaggacataaccaataagaagtttgaactttgtgtgatcagagtttatgggttgggctgccccaggcttggataacttaaaggcttgatgaggtcatcaatttatgcttggctacccatggcacagaagcatagccccactgtgatggctggggtggctccgggcatcctgggcagtcaggaggaaactccatgaaggaaggagctaacctttctgggggtacccctatctcagcacagacttcctcatctcattggtcagaactgggtcacatgaacatgcctcagcctatcacaggcacagggaatgagaccat

SEQ ID NO: 22710 - DNA, 530 bp, Homo sapiens
tagagacagggtttcactatgcccaatttggtctcaaacacctgggatcaagtgatctgcccacctcagcctcccaaaatgctgggattacaggcgtgaaccactgtgccttgcctaactttttcttaatgtttactttttgcagagatagtctcactatgttgcccagtctgatctagaactccagggttcaaatgatcttcttgccttggcctcacaaagtgctgggaatacaagcatgcaccatcatgcctagttattatttttcttttctttctaatttttttttgcacagctaattatgttgtctacaacacctcaaagcaytgggccctaatgggaatggctgctctattatatatacacattatactacattagagatttcaatctcttccccacaatttttttttttttttttttagatggaatctcgctctgtcacccaggctgcagtacagtggtgagatctcagctcactgcaacctccgcctctcaggttcaagcgatcctcctgtctcagcctccca

SEQ ID NO: 22711 - DNA, 530 bp, Homo sapiens
tagagacagggtttcactatgcccaatttggtctcaaacacctgggatcaagtgatctgcccacctcagcctcccaaaatgctgggattacaggcgtgaaccactgtgccttgcctaactttttcttaatgtttactttttgcagagatagtctcactatgttgcccagtctgatctagaactccagggttcaaatgatcttcttgccttggcctcacaaagtgctgggaatacaagcatgcaccatcatgcctagttattatttttcttttctttctaatttttttttgcacagctaattatgttgtctacaacacctcaaagcattgggccctaatgggaatggctgctctattatatatacacattatactacatyagagatttcaatctcttccccacaatttttttttttttttttttagatggaatctcgctctgtcacccaggctgcagtacagtggtgagatctcagctcactgcaacctccgcctctcaggttcaagcgatcctcctgtctcagcctccca

SEQ ID NO: 22712 - DNA, 530 bp, Homo sapiens
tagagacagggtttcactatgcccaatttggtctcaaacacctgggatcaagtgatctgcccacctcagcctcccaaaatgctgggattacaggcgtgaaccactgtgccttgcctaactttttcttaatgtttactttttgcagagatagtctcactatgttgcccagtctgatctagaactccagggttcaaatgatcttcttgccttggcctcacaaagtgctgggaatacaagcatgcaccatcatgcctagttattatttttcttttctttctaatttttttttgcacagctaattatgttgtctacaacacctcaaagcattgggccctaatgggaatggctgctctattatatatacacattatactacattagagatttcaatctcttccccacaatttttttttttttttttttagatggaatctcgctctgtcacccaggctgsagtacagtggtgagatctcagctcactgcaacctccgcctctcaggttcaagcgatcctcctgtctcagcctccca

SEQ ID NO: 22713 - DNA, 639 bp, Homo sapiens
aaaataaaaatatttgtattatatgtcactatatactgaaaaaaattaaaaattaatacaatgaagttaggaagtttactctttagggatttttgttgatgtagaataaaattaagtataaagcaagaaaatattgatacttttacctgctctaaatttcttatctcagattcatgaratggtaacttctatgtcagcgaagtatttatttagatccaaactgggattgtaactataagaaggaaaatatcttactactctgcaaacaatggcagggacttcttctggaaggtattatgtgaaattgatgcttgtaaacacatgattacaaaagatgtttataatgaactacatgcttgagtttgcctctcatgcacaataataaagtgctgactacctattcctccagctagaaggaaactaagtaaatatatgaaaatggttctgtgaatgcccaagatgtcacagtgtgtaagaaaacaaggctttcccccacaaccatcatagtaaaataaaacagaaaaaaaaaaaactttggtaaactataagctactgctcagaggttttattgtaataaagtattcagtggttccactttggttcttgtttatctctctgtttccatttttgtttatgtca

SEQ ID NO: 22714 - DNA, 1029 bp, Homo sapiens
tcaataagattaacatacaaattttcatcagaaaccatggggttcaggaggcgttgggatgacaaatttaaagctgagaaagtaaaaggactatcaaccaagaattgtatgtctgcaaaactctccttcagaaatgatggagaaatcaygacattcacaggttaaaaaaagctgactgagattgtctcaaccctacaagacatatatatatacacacacacatatatatatttgtaattcctctcttgtttttcctatttgatttaaaagaaaatgtccatcgaccaatgaatggagaaacaacatatagttttttcctacaatagaatattatttggtcataaaatgaataaagcactggcatatgctaaaacattgctgaatcttgaaaacaagacaagtgaaggaagccagtcacaggaggctacgtaacttatgagcccatttttgtgaaatattcataagaggcaagtcgatagagaaagaagtggatttgtggcgacagggtctgctggcaggtggaaatggagggtgactgcttaatgggtgcagagttccccctgaggtgataaaaacactctggaactagagagtgatgatggttacataacattgtgaacatacgaattgtcactgcattgtgcactttaaatggttacggtggtatcctttgtgtttatgtgtattttaccacaatgaaaaagaggctgaggaaggtattccaaaatcttttgtatagtaaactcctgagtttgcttgagaatctgcctatctgtcttttcttctcaggacatcatctcctacccagagcaaacctttgttcttctgcaagtagaaagccctctttcagaacattgtccaagatcagccaggcccaaccctcaaaatgactttctgtctttgacccaaatgctcaaatgcaactctggggctaatttcagtgggagtaagagattatccaatcaggataattcatttggagagaaaatgttttgcttaagtcagcaaagtcctttgctttcctaaaaa

SEQ ID NO: 22715 - DNA, 750 bp, Homo sapiens
ccctctactatccttccccacattccctgcagcttgagtcctattggctactccttttagtttgccatagtaactctgccctctggctttttcaggtcactgccaccatttggtctttgtctcttcagggccacactctccccagggatattaataaatgcaactctgggtcatctttactaccatcacccccagcctgcagaggacaacaccccgacacttcttagtgatgcaggtccctctcaccatcacgtttctgaggctctggtggaaggtgtttcctttggaccctcttgtggagcatggtactggtgggccttcaccatgcccacttccctcagccttgttattccatcctgtgcaagttccagggcaactaagttatgtctaccttgttgagagttrggcatcattttttctagtctatatggattcaccccagcagtgggtttggcccccccccttatcaaagtcctggggtgtttgataaacccatgccttgagaaagtgcctccaagccaaaggatttttattcttccagcttgaaattctggttccttgatcaaacaccctcaaattccaatcccagaagtgctcctcggcctcctatggggacgtgccagctagttcctgcaaagctcttcagtgggattcctgctgtatcatgggggtgagacttctgtagcatcttccagcataggaagtgggaaccattactagagaagggtgagcctcctatgcatgcccaga

SEQ ID NO: 22716 - DNA, 750 bp, Homo sapiens
ccctctactatccttccccacattccctgcagcttgagtcctattggctactccttttagtttgccatagtaactctgccctctggctttttcaggtcactgccaccatttggtctttgtctcttcagggccacactctccccagggatattaataaatgcaactctgggtcatctttactaccatcacccccagcctgcagaggacaacaccccgacacttcttagtgatgcaggtccctctcaccatcacgtttctgaggctctggtggaaggtgtttcctttggaccctcttgtggagcatggtactggtgggccttcaccatgcccacttccctcagccttgttattccatcctgtgcaagttccagggcaactaagttatgtctaccttgttgagagttgggcatcattttttctagtctatatggattcaccccagcagtgggtttggcccccccccttatcaaagtcctggggtgtttgataaacccatgccttgagaaagtgcctccaagccaaaggatttttattcttccagcttgaaattctggttccttgatcaaacaccctcaaattccaatcccagaagtgctcctcggccycctatggggacgtgccagctagttcctgcaaagctcttcagtgggattcctgctgtatcatgggggtgagacttctgtagcatcttccagcataggaagtgggaaccattactagagaagggtgagcctcctatgcatgcccaga

SEQ ID NO: 22717 - DNA, 535 bp, Homo sapiens
caccaggaaacggaatcggcagagacacagtagatgaaagtaccacgaaggactgctaggttctaatagaaagtagcagatgtgagtatcaaaagttataaacctttttgcaaatcagaaaagaaacagacttttttttttttttttttttttttttttttttttttttgagacggagtctctctctgtcacccaggctggagtgcagtggcgcgatctcagctcactgcaagctccgcctcccaggttcacgccattctcctgcctcagcctcccgagtagctgggactacaggcgcccgccactacgcccggctaattttttgtatttttagtrgagacggggtttcactgtgttagccaggatggtctcgatctcctgacctcatgatccgcccgcctcggcctcccagagtgctgggattacaggcgtgagccaccgcgcctggccgaaaaagacattttaagactgaaaagtggtatcaccaatgttagaaccaaaaaactggacctgagggtgcatcacccgagggggt

SEQ ID NO: 22718 - DNA, 535 bp, Homo sapiens
caccaggaaacggaatcggcagagacacagtagatgaaagtaccacgaaggactgctaggttctaatagaaagtagcagatgtgagtatcaaaagttataaacctttttgcaaatcagaaaagaaacagacttttttttttttttttttttttttttttttttttttttgagacggagtctctctctgtcacccaggctggagtgcagtggcgcgatctcagctcactgcaagctccgcctcccaggttcacgccattctcctgcctcagcctcccgagtagctgggactacaggcgcccgccactacgcccggctaattttttgtatttttagtagagacggggtttcactgtgttagccaggatggtctcgatctcctgacctcatgatccgcccgcctcggcctcccagagtgctgggattacaggcgtgagccaccgcgccyggccgaaaaagacattttaagactgaaaagtggtatcaccaatgttagaaccaaaaaactggacctgagggtgcatcacccgagggggt

SEQ ID NO: 22719 - DNA, 535 bp, Homo sapiens
caccaggaaacggaatcggcagagacacagtagatgaaagtaccacgaaggactgctaggttctaatagaaagtagcagatgtgagtatcaaaagttataaacctttttgcaaatcagaaaagaaacagacttttttttttttttttttttttttttttttttttttttgagacggagtctctctctgtcacccaggctggagtgcagtggcgcgatctcagctcactgcaagctccgcctcccaggttcacgccattctcctgcctcagcctcccgagtagctgggactacaggcgcccgccactacgcccggctaattttttgtatttttagtagagacggggtttcactgtgttagccaggatggtctcgatctcctgacctcatgatccgcccgcctcggcctcccagagtgctgggattacaggcgtgagccaccgcgcctggccgaaaaagacattttaagactgaaaagtggtatcaccaatgttagaaccaaaaaaytggacctgagggtgcatcacccgagggggt

SEQ ID NO: 22720 - DNA, 510 bp, Homo sapiens
gtactatgtcctagccaagtttattggcattgactctgggtcaaggcaccgtgtctccctcccatcgagttttccatcatctacacgagacctagatgactactttgatatctactgmaggccacagccttgtcaaagccagccccagctgaaatgcactcacctgcattcccacacaattttacatacaattcgggggaggttatgggatctatgaagaccaagggtctgtggtcctgtgacactttctctcagagggtgaagaaggagttccttggggcagcaactccccaggggtctcctgcctgcctctcctcccctctcagccccaatcctctttcctgctgttgatcatcatgcagtttttaaatccctactccctgccccaccaaggttgggctctaggacctgcctattgggaacctgcggttgggagaaagtatgaagtgacccacctgaatttagaggagggaagtgaggaatttggagacatctaaaaacattttgtcc

SEQ ID NO: 22721 - DNA, 510 bp, Homo sapiens
gtactatgtcctagccaagtttattggcattgactctgggtcaaggcaccgtgtctccctcccatcgagttttccatcatctacacgagacctagatgactactttgatatctactgcaggccacagccttgtcaaagccagccccagctgaaatgcactcacctgcattcccacacaattttacatacaattcgggggaggttatgggayctatgaagaccaagggtctgtggtcctgtgacactttctctcagagggtgaagaaggagttccttggggcagcaactccccaggggtctcctgcctgcctctcctcccctctcagccccaatcctctttcctgctgttgatcatcatgcagtttttaaatccctactccctgccccaccaaggttgggctctaggacctgcctattgggaacctgcggttgggagaaagtatgaagtgacccacctgaatttagaggagggaagtgaggaatttggagacatctaaaaacattttgtcc

SEQ ID NO: 22722 - DNA, 473 bp, Homo sapiens
ttcattttgagtatttgggcacacattttgtttataggtacatgggaaaatctagcacataattaatatattaaactggctgtctttatatcacaacatagtctatttaatctattatgttgtttaaccaaaaccaaactataaaaagcaagcatggatatagtagattttttctcagaaaaaaagcttgactattatttttatgaaattgcaaagaattacaatattctttcacactgcgtttcaagaaaatgagcaaaggatatttatagacatgtttttgatagataccccagkgacaacggaagtcacttttaaattataaggtaaaatgtgaaactaatagataaaatttgacatgttaagagttgcatcttcctcaaatataaagataagaaccaatgtagtttgaaaatagcaaaagcgctttcactatcctatggacagatattttggaaaacctattactttta

SEQ ID NO: 22723 - DNA, 554 bp, Homo sapiens
aaaggtgggggtaaaggttgctggagtgtaaatggggtcaaaggcaccaaaacaaggcctttccgtgccaggtgggcgttggtgactagagggaacttagatttttagtgtttagaggcaggcggccactccctcttctgatgaccaactttggggactggggtggggaggtttcattccatcatgcctatatttgagaggctctgggtacctgtgaagctgtacttcttacctcttgatgatgcctttagcccagggaaggcttccgtgagggaatgagtgccagctgtgagcatgcacgcccatggtgaaggggtggagcccgagtcccaggaagacagcactgccagttattgaggccagacctccctcttcgaaagccaaggggaaaacccatcaacctcccagagaagaagtctgaagacagctctttctgttcctacctagaccaggacaakagaaaatgaaagcgggttacagtaggagggcttgcagttagatacagactaagataagacttaacagctattgcaaaagtgacactggaatgggat

SEQ ID NO: 22724 - DNA, 554 bp, Homo sapiens
aaaggtgggggtaaaggttgctggagtgtaaatggggtcaaaggcaccaaaacaaggcctttccgtgccaggtgggcgttggtgactagagggaacttagatttttagtgtttagaggcaggcggccactccctcttctgatgaccaactttggggactggggtggggaggtttcattccatcatgcctatatttgagaggctctgggtacctgtgaagctgtacttcttacctcttgatgatgcctttagcccagggaaggcttccgtgagggaatgagtgccagctgtgagcatgcacgcccatggtgaaggggtggagcccgagtcccaggaagacagcactgccagttattgaggccagacctccctcttcgaaagccaaggggaaaacccatcaacctcccagagaagaagtctgaagacagctctttctgttcctacctagaccaggacaagwgaaaatgaaagcgggttacagtaggagggcttgcagttagatacagactaagataagacttaacagctattgcaaaagtgacactggaatgggat

SEQ ID NO: 22725 - DNA, 555 bp, Homo sapiens
taagtccaaagtaagttgttctaaatattttatcatgttcagcatatgctgttaaaaaaaacctcagactataattgtcaacattcgattcacaaaaagtaaacaacagctgagtataatgggatgataaagaatctctccataattcccgacatatggcaaagagtatgtccattttgaagtggaagatggtcatgtttatcaactgagccattttctttgtttgaatccttctaatcagaaaagttccctagaaacactaggarcattttcctgagcagatgagggaaatgaaaaaaagctgtatggcacagttagatctcaggcaggaggaatttagaactcacaatggcaattgaaagaggctgggtaaagaaggccatatatttctgtaaaagcagtcattccagggttagtatacatgaaaaacaagtgcgtgcttcgtggggaatgtatggagaaatttctacgtatcagtcgtttctgtgaacaagctctgatggacccagccagtgtcacatcctgccatcatgtagattcattttaaatgcacgg

SEQ ID NO: 22726 - DNA, 1398 bp, Homo sapiens
acggggtttcaccatgttggccaggatgatctcaatctcttgacctcaagtgatccgcccacctcggcctcccgaagtgctgagattacaggcgtaagccaccacacccagcccagggttcttcattttctaaataatagagaaaaagcacaacctactcctctctcaaaaccctgaagatatccaaacaacagattgattcaagttccatttcccctcctgtcaaaggaagaggtgttaccaaaaaacggaagtacccacaaggtaggctaaaaatattttttttttctttttttgagacagggtctcactctgtcacccaggctggggtgcagtgatgcaataacagctcacggcagcctcaacctcacaggctcaagggatcctcccacctcagccccgcaagtagctgggactacaggcacatgtcaccatacccaactaattttattgttattttttgtaaaaacaggtctcgccatgttgccgaagcttacaaataattgttaaaccatataatcagacattaaagaataaaattaccagccaggtgtaatggctcacacctgtaatccttgcactttgggaggctaaggcaggaggatcacttgagctcaggaattcaagatcaacctgggcaacatagtgagacctcatctctataattaaaaacataaataaataaaaatataataaagaaataaaaagaataaaattaccagcactcaactataaacatatgagtataactctcattttatggataaatgccaggaaaatagaatttagaattttatataagctttagattttttttttttttttgagatggaattttgctcttgtttcccaggctggagtgcaatggcacaatcttggctcactgcaacctccacctcccggcttcaagtgattctcctgcctcagcctcccgagtagctgggattacaggtatgcgccaccacgcccgactaattttgtatttttagtagaaacgtggtttctccatgttggtcaggctggtctcaaactctcgacctcaggtgatccatgcatctcggcctcccaaagtgccgggattacaggcttaagccaccgtgcctggctagattttttttttttattgaataaactatttcccccagtaagtgaatcaaagaactcaatcaggaagatactttttttctgagacacggtctcactctgtgacccagacaggagtggagtggcaggatcacagttcactccagcctcaacctcccagactcaggtgatcttcccacctcagcctccagagtaggtaggaccacaggcatgcaccaccacacctagcttattttttgtagagacagggtttcaccgtgttgcctagggtggtctcaaaccccygagctcaag

SEQ ID NO: 22727 - DNA, 997 bp, Homo sapiens
ctccgcatgctctgactccattctgggaacccctcccaggtttcttctacctcctggctgggggccccttcccccggagtgggcagttgcacagggcccaggaggccggggagggaggccagtggggggaggctgggccctggtrgaccgaggggcctggacaggctgcctgcccctgcctgacctgggtgagcctctgcccggcagggcgggcccttcactccttccctctcacccttgaccccctgctttcagatgctgagccagggaggcggcccttccagcagccatgagggaaggacaggagatggggcccaccccagtgcccagcaaccccctgctccaccgctcattcccctgctggccccggggctggtctcacccagtgccaacccgagagctccttttggaacctgcacagcccgccgacctgttgccacctgcacccaccgctggaccatgcagcctcgcctcctggatgctgtcccagcctggccgagggtcccaggtgaagactggagggaccccaacagccaccgcccaggacgctgaggctcccttgcctgactgtgacttgtgcctctctcctgcccccgtggggacatggcagcccagagccaaggctgggtgggcaggtgacccaaggaacctttctgggaacaccttctcgccgggctgggaacaataaatgcagccatgtctctgcagctggtgctgaccccatgccacctctagacccgtgcgtactggtgcagccagtgtgggggtgggtggcggagcagggctcaagccagcctcggttccccatctgcgaccatgcttgggttctccagccttgctcccaagtaaggaacccatcttcagctgcctgggatgaggccctgcctgtcagcatctctcttcctagagagaactcctattcatccgtcaaagcccctgccccagggccccctctatgccatcccttcagcctgggtctcatgggccctgccctgga

SEQ ID NO: 22728 - DNA, 936 bp, Homo sapiens
ggaccacactcacagacaagtmagccttgaaatgctagacctcatgcaccccaatccaatctcccactggacagatccggaaactgaggcccgagagggaagaggaccccaagatcactgcaggcaaggtcggagtgatgttggggggctggtgggatgcccgtggggaatgaagagcttcaagagggctggactctgtcttgctcactgctacgtcccagtgcctagaccagagcctggcaggtgtgcaggaaacacactgagtaagcaggtgagcatggtgatggtgtccggagtcccgccccgggaccacagagctaggaaagctggagggccagccttagctcctcagggttaaggctggaataacatagcgactcagttccccgacctggccatatggagtggggctaggcctgtcctccctgcttctcactcccttcctaaccccatagttctctgagactcagatgccacaagggcccaggtgcttacataggggtccaggagtctgctggtgtcctgcatgagatctgtctgcttctggagctggccaaggagcacgcggtactctttcgagcagctgcctatagccgccatgctcgccatgcttggaaacaggagtgcaaggaccagacctaaggcagagaagaggggtgtcacctgacttggtgaggaaagccacagatgggagcctcggggagggggttcaagagggccttgaaaggtgcctccttcatcccagactttgtgtagtggagggcgggggctgggcactgtgtggcacggtgtgtgcccaggtgtgcccaccaaggccaccatcatctccccagtaagtcactgcccagggcctgacacagcaagcagtgggagggactgagacagtggctgcgatttaccaagtaggtctttgagcaaaggctgcagtgcctggcc

SEQ ID NO: 22729 - DNA, 263 bp, Homo sapiens
gccaccacgcccagccagaaacttgggtttaaaatggactttgcattataatgagatgggtaattcacccaggatgaatccagccttcagcttttgctttcttttgcttttgctttctctctctgtctctctttatatatatattgcccagactggacaacattgcaagacctcrtctctacaaaaacttaaaaaaaaaattaacccagcgtggtggcatgcatttgtagtcccatctactcgggaggctgaggcaggaggat

SEQ ID NO: 22730 - DNA, 608 bp, Homo sapiens
ctgtgtgctatttgctatacaatatatgattgtctggagttttgagtcctggtaaagaggctgacatttgtttagtccctggacttacagatagagcatgaattgaacaatactattctgtgacaataaatggtatggatgatagtgctaggctgrtgtttgccttgtaaactgacctgtgctgagccatggatgtatctgacatgagccaagcctcagttcttgaggaaccaaaggtgcagaagaggcagcctttgctagttcattagcacagatgattactataaacaaaaagtctgattgctaaaattcatttacatatgctttaggtcgaaatgagacatcatgaccaaaaaaaaaaaattccatcaatttcctgtttttatatcatgttgaaataataggcaatgactactatttttgattatcagacttgagaaaactactacaacaaacaactagtgactagatctcctattttttcccctgacttcaatttgagcattggaatactgatgatagggcctagtagacacagctgtcatcagggccccaggaatcctgagagggaagaacagaaaagatgaggccaggaggggcctatttga

SEQ ID NO: 22731 - DNA, 608 bp, Homo sapiens
ctgtgtgctatttgctatacaatatatgattgtctggagttttgagtcctggtaaagaggctgacatttgtttagtccctggacttacagatagagcatgaattgaacaatactattctgtgacaataaatggtatggatgatagtgctaggctgatgtttgccttgtaaactgacctgtgctgagccrtggatgtatctgacatgagccaagcctcagttcttgaggaaccaaaggtgcagaagaggcagcctttgctagttcattagcacagatgattactataaacaaaaagtctgattgctaaaattcatttacatatgctttaggtcgaaatgagacatcatgaccaaaaaaaaaaaattccatcaatttcctgtttttatatcatgttgaaataataggcaatgactactatttttgattatcagacttgagaaaactactacaacaaacaactagtgactagatctcctattttttcccctgacttcaatttgagcattggaatactgatgatagggcctagtagacacagctgtcatcagggccccaggaatcctgagagggaagaacagaaaagatgaggccaggaggggcctatttga

SEQ ID NO: 22732 - DNA, 615 bp, Homo sapiens
tgatcaggtaactcataaaacaaaaacgtcaaagagtcagttgtatgtttatatgactccacttgtaatcattgcatgactcagtttccatcgtgcattgctttctccagctctattttgggtacgtagcccatattyttccttccttgatatgatgaagtctttgctgagaaaatcagaacaaaatatttatcatttgaaagttcgccttaaaaatgcccaaggcacaggaatccttaagagtcataaaatccatcacaagcatggagactttttttctgtcattaatgtcatttaggactgtaacatatttacctatgtcccagataccgaacaggaagcaattgttcagacacacttctaagtagctccagggcaggcaacaatgtctgacattagctctccatatttgtctttcctttgaatcatggagctcacccttcagccccaaagtgctttcagatgggaccttgctgagcgtctgcaccttatttctttcaattacgcttgcattgtctggcctaatgagtttccaaagctagttttcattttatttagggcatgttttcagatgtgttaaattaattggtgctaaataaaaggtaacctgacccc

SEQ ID NO: 22733 - DNA, 572 bp, Homo sapiens
gactatgtagggttattatgaaaatcaaacatgttaacacatgaaacgtgctcaaaagggaacttggcccttcacccccactatataaatgttattattattattattgatttattattattgggtctctgtggattttccagaagactgcttatttcaaatatgtaaagcccctgtccctacaggttccccctcttttmcatgtcacacagcatgttctgattcccagcaagaaataatatacgatcactctgacttcgttggctgatgaaaaaaaaattcattttgtccatgtaaatagcacctctaaacaagggacacagctaacccagaagggagtaattggccccatataaaacaaggccaagtgaaagataggagttctgaaaagccgaaggaggtctggcgggagctgccgacagctcttctaacctgcccaacttattactggaatcatttcaagagataatttaatggtctccctctgtgtggccctgttcactcctgaagggaaatatataaataaataaacaaacctaactaccccaaccaacccatgctttatgagaaca

SEQ ID NO: 22734 - DNA, 572 bp, Homo sapiens
gactatgtagggttattatgaaaatcaaacatgttaacacatgaaacgtgctcaaaagggaacttggcccttcacccccactatataaatgttattattattattattgatttattattattgggtctctgtggattttccagaagactgcttatttcaaatatgtaaagcccctgtccctacaggttccccctcttttacatgtcacacagcatgttctgattcccagcaagaaataatatacgatcactctgacttcgttggctgatgaaaaaaaaattcattttgtccatgtaaatagcacctctaaacaagggacacagctaacccagaagggagtaattggccccatataaaacaaggccaagtgaaagatasgagttctgaaaagccgaaggaggtctggcgggagctgccgacagctcttctaacctgcccaacttattactggaatcatttcaagagataatttaatggtctccctctgtgtggccctgttcactcctgaagggaaatatataaataaataaacaaacctaactaccccaaccaacccatgctttatgagaaca

SEQ ID NO: 22735 - DNA, 615 bp, Homo sapiens
tttaggaagattcattttayggatggagagactcaggcacagaaatgttaagagacttgccgcatgtcacacagctatgagtgttggagtaaggcttggtgcctaagaagtctggcactggagtctagaccctcaagtacagaagcagacgtttgtttggaagctccagcctagagtgaagattgctaattacaaactccattgcatacttttattttttatttggaaacattttagatacataaagatatacacaataacatcaaaccccgtacacccaccagtcagcttaacaaataaaccaaatatacataatgcctaattgagaccccttgccttactctgttgagactgctaaaacaaaatatcgtaaactgggtggcttgtaaacaacaaaaacttatttctcacagttcaggcaactggaaagtccaagattaaggtgctagcagattccatgtctggtgaaggcccgtttttggttgacaggttgctgtcttctcactgtaacttcacacagtaaaaggggaaagggagctctctgggttctctcttatgaggtactaatcccattcatgagggctccatccttgtgacctaatcactgtacaaagg

SEQ ID NO: 22736 - DNA, 615 bp, Homo sapiens
tttaggaagattcattttatggatggagagactcaggcacagaaatgttaagagacttgccgcatgtcacacagctatgagtgttggagtaaggcttggtgcctaagaagtctggcactggagtctagaccctcaagtacagaagcagacgtttgtttggaagctccrgcctagagtgaagattgctaattacaaactccattgcatacttttattttttatttggaaacattttagatacataaagatatacacaataacatcaaaccccgtacacccaccagtcagcttaacaaataaaccaaatatacataatgcctaattgagaccccttgccttactctgttgagactgctaaaacaaaatatcgtaaactgggtggcttgtaaacaacaaaaacttatttctcacagttcaggcaactggaaagtccaagattaaggtgctagcagattccatgtctggtgaaggcccgtttttggttgacaggttgctgtcttctcactgtaacttcacacagtaaaaggggaaagggagctctctgggttctctcttatgaggtactaatcccattcatgagggctccatccttgtgacctaatcactgtacaaagg

SEQ ID NO: 22737 - DNA, 615 bp, Homo sapiens
tttaggaagattcattttatggatggagagactcaggcacagaaatgttaagagacttgccgcatgtcacacagctatgagtgttggagtaaggcttggtgcctaagaagtctggcactggagtctagaccctcaagtacagaagcagacgtttgtttggaagctccagcctagagtgaagattgctaattacaaactccattgcatacttttattttttatttggaaayattttagatacataaagatatacacaataacatcaaaccccgtacacccaccagtcagcttaacaaataaaccaaatatacataatgcctaattgagaccccttgccttactctgttgagactgctaaaacaaaatatcgtaaactgggtggcttgtaaacaacaaaaacttatttctcacagttcaggcaactggaaagtccaagattaaggtgctagcagattccatgtctggtgaaggcccgtttttggttgacaggttgctgtcttctcactgtaacttcacacagtaaaaggggaaagggagctctctgggttctctcttatgaggtactaatcccattcatgagggctccatccttgtgacctaatcactgtacaaagg

SEQ ID NO: 22738 - DNA, 2029 bp, Homo sapiens
cgaggtcaggagttcaagaccagcctggccaatgtggtgaaacccaatctctactaaaaatacaaaaattagcctggtgtggtggcgtgcacctgtagtcccagctactcgggaggctgaggcaggagaatcacttgaacttgggaggtggaggttgcagtgagctgagattgcaccactgtactccagcctgggcgtcagtgcgagactccatctaaaaaaaaaagtgctcctgctcatttctctgggtattgacataaagaaataatatagcgaattgataccccaaataatcatagtaacagtaacaattatggtacttggtggtttaagttgcatgtctttggtaagcaattatctatcatcatactaccaatgttttatagcaatctactgtcttaaaatataaacaaaaaccaagaaacaacaacaacaaacaccaaattcactggccccagtgaagcaggtacggaacaagaaaacaaamaaacaataaaaccaaggcaccaaggcagaaacagagcaggatgtagctggttgatactaaaattactctatttttctaacagtccacatggctcagcccatatgagtttagttatgagaaaatgtgtcccatatggggttgagcctcttcagtggaagaatttgttttctttaagtccctgtccctttccccaccaccatctaacttaggaagatgactcagttctttgaccacataggaaagatgtacattttctttagtatcatttaggaatcaccctcaagatgaaatctactatctggattacaacaagttttacgattaaagccaagtgaccagccagaaaacagccacaacatggtattaaaaaaagaacactcatttgcaaatcaaaagacagagactttagagcaaatttttctcccctcattagcatgaacaggaataaagaccttcccttggtcttgaggcagcagggcaccctggctcatctgtgaggctttggatccagcaagtcagggttcaaatcatgcctctgcctcttcctggccctctgaccgtgagcaagtcatcttgtctctctgagtctcactttcttcattgtcatcgatgaagttgttataaatactctgcctcacagttttcaataaagattaaatcaaataatggatgcaaagaactgagtgcatgcctgacatgtgggtcgctgtcaatcaaacatcagtttccactgatctttccatggttggttccttgtcatcaaggtttcagcttcagggccaccatcctacccaaagtagcccattctttctattaaaaaaagtttttttggagacagggtctcaatacgttgcctaggctcatctcaagctcctggcctcaagcaatactcacacctgggcttccgaaagcattgggggattacaggcgtgcgccactatgcccagccatagcttctttctagttatcctctcccttgttacaatgtttttattttttgtttgttttctttataatacttagccctatcttgaagtaagcttatttcaatccttgtttatctctgaatccctcactcaaatgtaagtcatctgagagcttcgtccttttctgtctcattgaatatatttttagtttctggcacagtgcccaacacttagtgggcactcaatacatatttattgaaaaataacaaatgaatgaatacatcttcatgcacacacagatccacatgtgcatctatagataccatcaatataccaccaatagtttggttggctaattcattcgctctctcttctctctttcctgcctccctctttctttttctcttcctcttcttctttttttttacctttttccttccttcagccaataattattaagccagtctctctgctacatgttggaggtacattcatggaacggacagaacatcctcgaaagagcccaggattcagatttatctctacctctcacttccttcacttccccttcctgatggattgctcagatttcagcctccactatctacaacagtgt

SEQ ID NO: 22739 - DNA, 479 bp, Homo sapiens
tgcaaatgatgataaatatcagtgtatcattactgcacacaatatatgtttcttaggacatcattttggggaaaaaaaaaacctggggacaaaattagataaaaaaggaaatcgaacaagcaacaattgtgcaaacaaataaaccatatcaatcagtgattctatagcttggctgtagttgatagattgctgaatgtctagtgaagctcttccatgtataaattttttctctgcaagcaggttactatttgtttttctttttttagattgcctcacattctttgcctgattcagacttttgggggctttactactgcaatcatcacttttagmctggtcctgggaacttctgttctgaactaggaaccatctccattgtagttgtttgtattatttttgccacctgtgcactgcaccagctactcactactcagcagacaacgctacactctaatggtatggtaggaacctggactttt

SEQ ID NO: 22740 - DNA, 528 bp, Homo sapiens
tgttttgggtggcagggggtaggggtaagggcacatggagcgttttgtttgaggtacttgaaagggagatgtcaagtaggcaactgaatatccaaatcaagagagtctgtagtggagtggtgactcaagcccgcacctggatgaggtcatagggatggaaygtctgaggagaggcaacagctggggcctgctctctgggccacccatatgcagagctcacgaaggaggcactcccagagaggagggagtcccagaagccatttacaaagggtattttatgagtgggcaacgtgaaagtaccaacatcagaaaagcacctcaggacctccaggtcctgactccccactcctcccttctcatgagccaggcaggctgtctgcaggccagccagtgaattgaactggggctctcagagtctgaacagctggccatgtcttggacagtgcttcatgactctaagttattactttctgttcctttcctagtccctaactcagacccaagctctttgctccctggagtttctaa

SEQ ID NO: 22741 - DNA, 540 bp, Homo sapiens
tttccttactcttttaaatagtctttttccccccttttgctgcttttcctattggttttctttcattamaaattgagacccagccagtcgcagtggctcatgcctgtaatcccagcactttgggaggccgaggcgggcggatcccttgagcccaggagtttaggaccagcctggaaacagagatgctgtctctacaaaaaaaaattgaaaaaattagctgggtgtggtggtgagcatctatagtccctgctactcgggaggctgaggtgggaggatcacttgagcatgggaggtagaagctgcagtgagccatgcagtgagccatgactgcaccactgcactccagcctgggtgacagagtgaggtcctgtctcaaaaaaaaaaaaaaaaaaaaggcacccaaaatttttagaatgactgtcacaataatagcacatgtccctgaatagagatcctaccttaatgttggttaaagggggttgctcttaaaaaggaaccatggccagtcgcagtggctcacgcctgtaatcccggcacttt

SEQ ID NO: 22742 - DNA, 497 bp, Homo sapiens
atcattacaaattactaaaaatgtttgtattctttgatgccaatcaattctacctgaagaaatcatcaragatttatacaaatatgtaagaacaatatgcaaggacaaaatattcacccatgttttttgtaaaagaaaatgaatgaaacctaaatatttaatactagggaaagtaaataatgtatattatcctgaccaaagaattattttatgaaaggtgtctgacagggaaatgcttatgaaaatgctttcagttaaatgggggaaatcatgatacaaaatttatacacaattgatacatccaatgtagtaaaattataaaaacatggacagcaggatacaaaccaatttcagaatactgattgcttcaaggagaagaaaggagaataatattgggaaggaatgtaaaaggggcttcaccagcatcattaatactttatttccaaaaggaaaaaggatgaaagggatggagaaaagaagaaagaaatatctgaagc

SEQ ID NO: 22743 - DNA, 570 bp, Homo sapiens
tctcaagattgggctctggcagggtatggtggcttatgcctgtaatcccagcactttgggaggccgaggccggtggattacctgaggtcaggagtttgagaccagcctgaccaacatagtgaaaacccatctctactaaaaaattataaaaattagccaggtgtggtggcggccacctgtaattgcagctacttgggagactgaggcaggakaattgcttgaacctgggaggcggaggttgcagtgagccaaggtcgtgccactgcattccagcctgggcaacagaatgagactctgtctcaaaaaaaaagaatgggctctttcttttccatttctcctcacctccctcagtgtcagctgggcaccttaggcaggatttcttggacaggtagcatgagcatgtgaaactgggagggtgggaaacaggaattaagctgatcgggcagccagcctatcccagccaagtcaatctgcttttctacacattgttctggccaaaaacacctatctttaagctttatgctgctcactgctgccaactggccacccaaccatggattcatataaaag

SEQ ID NO: 22744 - DNA, 589 bp, Homo sapiens
taaaaatacaaaaaattagccgggggtcgtggcgggtgcctgtagtcccagctactcgggaggctgaggcaggagaatggcgtgaacccaggaggtggagcttgcaatgagccgagattgcgccactgcactccagcctgggtgacagtgagaggctccgtctcaaaaaaaaaaaaaaaagaaggaatatgatacctgagatagtttaaaataatggaggtattgataaccataaaggttggttccaggactgtagggttgatcatttaaaagcataggacataaggaaaatctcagctatgttgatttagtattccattggaggtggagcttgcaatgagccgagattgcgccmctgcactccagcctgggtgacagtgagaggctccgtctcaaaaaaaaaaaaaaaaagaaggaatatgatacctgagatagtttaaaataatggaggtattgataaccataaaggttggttccaggactgtagggttgatcatttaaaagcataggacataaggaaaatctcagctatgttgatttagtattccattggaggtggagcttgcaatgagccgagattgcgccactg

SEQ ID NO: 22745 - DNA, 589 bp, Homo sapiens
taaaaatacaaaaaattagccgggggtcgtggcgggtgcctgtagtcccagctactcgggaggctgaggcaggagaatggcgtgaacccaggaggtggagcttgcaatgagccgagattgcgccactgcactccagcctgggtgacagtgagaggctccgtctcaaaaaaaaaaaaaaaagaaggaatatgatacctgagatagtttaaaataatggaggtattgataaccataaaggttggttccaggactgtagggttgatcatttaaaagcataggacataaggaaaatctcagctatgttgatttagtattccattggaggtggagcttgcaatgagccgagattgcgcccctgcactccagcctgggtgacagtgagaggctccgtctcaaaaaaaaaaaaaaaaagaaggaatatgatacctgagatagtttaaaataatggaggtattgataaccataaaggttggttccaggactgtagggttgatcatttaaaagcataggacataaggaaaatctcagctatgttgatttagtattccattggaggtggagcttgcaatgagccgagattgcrccactg

SEQ ID NO: 22746 - DNA, 538 bp, Homo sapiens
tgcccctcacaggtctccaccgggaaccttctggtcatcctgagtcgacactaccaggacgtctcctgccttcagttcacaggggacagcagccacttcatctcagggggcaaggactgcctggtgctggtttggagcctctgcaggtagcgccttgcgcactcaggcctgcacctggaactgcacccgggctcaggcggggagaggaggcgccaaggcccctggcgggaaggggcttctctcttgggggctggagtgcagaggacggagtgatcatcccaggggtcctggctgcccacactggggtctggtttgttctgggggccgtgggggcccagccttgagtttactcaggtgaggcaggccaggctgctgagtggaggcaggtgtgtgcgtgaggtgggtgctggaggcgtggactgccctgttccctccgctccccgcctgctgagcacctgccccaccccgctcagcgtgctgcaggccgacccctccaggattccggcgcccaggcacgtctggtctcaccacrcgctcc

SEQ ID NO: 22747 - DNA, 520 bp, Homo sapiens
atgttaaccttatttgaaaatgtgtccaataggatgcctggtgtcaatatttttcctcaagaaagttttgctcgagtatctgaataaatacaggctgagattccaaagttctttctacattatagaacacaaatgtttaaggccgttgcagtggctcacatctagatgtaatcccagcactttgggaggctaaagcgggtggactgcttgaggccaggaggtcgagaccagcctggtcaacatggcaaaaccctgtctctactaaaaatacaaaaattagccaggagtggtggtgcacgtgtgcaatctcagctacttgggtggctgaagcacgagaatcacttgagcctgggaggcagaggttgtagtgagctaagatggtgmcactgcactccagcctgggcaacaaatttagacagtctaaaaaaaaaaaatttaagagtagagattatcagctagctgtctgcctttgctgtgaaaaaactctgtcatagcccctatgcaatgatttgctgggtta

SEQ ID NO: 22748 - DNA, 597 bp, Homo sapiens
gaattttaattggctcacagtgcagcaggctgtacaagcatggtgcctgcatctgcctggcttctgaggaggcctcagggagcttttacccatactggaaagtgaagcaggaaggggtacatcatatggcaaaagcaggaggaagaggcagcgggagggatatgccacacacttaaacaaccagatcttgtgagtattcactcactattgcaaggacagtaccaaaccatgagggatccacctccgtgacccaagcacctcctaccaygctctacctccaacattggagcttacattttagcattaggtttgcagggggagaaatatccaaactatatcaaacaccatgctgataatttgggtgtgtgtatatacatgtgtgtgtgcatgtatgtgtgtatgtgcatgtacttgtgtgtgtgtgtgtgtgtatgtatgtacgtgtttgtgtgtatgcctgatgttgatatttagggaagacaaatcaagttgattggcaatgagaagtatgtcccagcaaagtcacatcccaatcacggctatgtttatccattttgtaatttccctgaaatttttacaagatgaggaactagggaa

SEQ ID NO: 22749 - DNA, 1085 bp, Homo sapiens
aggcaggcaggagagcaggcaggcccagagcctctgctccagctctctatctcggcccgggagaagccagagacctgaatggagcatgcgtctgagcctggcatcaggcactacgcccagcagcttctccagcttcacgggaccctacatggccagtgttactattattgtgcccatgttgtagctgcagggcctgaggcacgcccagagccacaccgggggaagcggcagggctggccagggtagaccaggcacatggtgcacagggccagcgctctgacccaggggctccagggctgtgcyatgcagcccaggacagaagctcaaaggctgggcaaagcctatctactccctgtcgtgttttgtgccattcacaggcccccaacgtgtccccatgccacctgatatgttcctccactagagtcgtgaccaaaagccttgtcatggtttgttggcctacccggctccccagtcagtgtttcctaaaagtactcattcattcattcattcattcattcattcatctattctctcatgcaacaaatcactttgctaagcacagggaccaaagcagtgaacaagagagttaaacgtcttgctctcaaggaacagaagttctagtcatggagagacagacaataaaccagataaataagcaaaggagtcacgtcagttagaggcagatctgaacttcatagctggaagagaggcttggcatggggccaaggcatctgtgggcccctctgccccatccaccccacacatccattgcagaaggcccagggtgggtgtctggataccactgagcaaccctcaaagtctctctcctttccaacctcaaaacatttgaaacagtactatttcgtgtaagtaatttttacaagttacagcattccaatgaaaatgtttctggtgggtaagcattctggattctaggtggaaatctagaatccagagatgcagggcctcagggtgggctgccagtgatcgtctgtgtgtcccactggctatatacacgcccttgaagccgcactgcccttctttccccactccagaatctaacaaggctgcacagttttcacaca

SEQ ID NO: 22750 - DNA, 1085 bp, Homo sapiens
aggcaggcaggagagcaggcaggcccagagcctctgctccagctctctatctcggcccgggagaagccagagacctgaatggagcatgcgtctgagcctggcatcaggcactacgcccagcagcttctccagcttcacgggaccctacatggccagtgttactattattgtgcccatgttgtagctgcagggcctgaggcacgcccagagccacaccgggggaagcggcagggctggccagggtagaccaggcacatggtgcacagggccagcgctctgacccaggggctccagggctgtgccatgcagcccaggacagaagctcaaaggctgggcaaagcctatctactccctgtcgtgttttgtgccattcacaggcccccaacgtgtccccatgccacctgatatgttcctccactagagtcgtgaccaaaagccttgtcatggtttgttggcctacccggctccccagtcagtgtttcctaaaagtactcattcattcattcattcattcattcattcatctattctctcatgcaacaaatcactttgctaagcacagggaccaaagcagtgaacaagagagttaarcgtcttgctctcaaggaacagaagttctagtcatggagagacagacaataaaccagataaataagcaaaggagtcacgtcagttagaggcagatctgaacttcatagctggaagagaggcttggcatggggccaaggcatctgtgggcccctctgccccatccaccccacacatccattgcagaaggcccagggtgggtgtctggataccactgagcaaccctcaaagtctctctcctttccaacctcaaaacatttgaaacagtactatttcgtgtaagtaatttttacaagttacagcattccaatgaaaatgtttctggtgggtaagcattctggattctaggtggaaatctagaatccagagatgcagggcctcagggtgggctgccagtgatcgtctgtgtgtcccactggctatatacacgcccttgaagccgcactgcccttctttccccactccagaatctaacaaggctgcacagttttcacaca

SEQ ID NO: 22751 - DNA, 2186 bp, Homo sapiens
tcccacctcaacttactgagtcactgggattataggcatgagccaccaggccaagcccgctattaatggactaaggtaatgaaatatataccaaaagtaccattaaaataagacagagcatgagatctgcccattgagaggtacagtagatggactagagaaatccaacagaagaagagttattttctgccttgggaatcagggaaaactttccagagaaggtgcattctggttgaacccttttggtatgtaggatgggaagcaggaaggaatggcagaatccagtgctgctagccccaagggcataggccaccatgaaagagggttgcctttgtgaaaggggggaacagagattagattggaaaggtaagtttggaaggctttgaatgccaggtgaaagctaagttaaaacaaaatgataatttttattcttaagaagcccacattatccacaagactccgtttatcccataagtcttttaatatttgaagaaaaaaggcagaaatgtcttttaaaattctactttccaaacaattaagatttctgtagcaccaatattctttccactggcaaataggtattacctagaattaaggcaacacataaatgaataaaatagatgataactttttcattgtttcatttggagaaatactttagaaggtccacaaacaggtccctgagcctaccaaagagggatgttagcattttatttccagcatgtcctgataacttactgatactaaacatttttgcaaggagcagccagccttcaggctcctgaatctaagaaggatgatagtgaatgattattcatgttgagttttctgcattggttatggctttatcaatccagatgatcaatcaactttcagattttagttctgaacctggagctttctgtttggtattcaaaataatgggtgtcaaagttatagctcatatcacaccgacagactgggcctcccccatcagcacttctctgttcagcaagcgtgtttgttggccttgtattcctcttctggccccaggatccaggaaaacatgagtctcagcttttttctacttctgtacagcacagggccttcaggtggtgccttcacagcaaatacccccgtcccttcatctgtcaatttaggacaataaaaataatctgcctcacagagccatgctttactttctccagttaaaacactatgaagggaaatatgagtatccgaactgcagaaacakaatctgttgtccttttgtgaaatttcagagatgaataatgaaacctgttaccctattgcacaatttgggacaagaaatataagccatagattgaagataagacatttccccctagtagaacaggtcacagttgattagttatctccagatgcaatgaagaaagcaaaaatttttcaaactatacattccttccttaaagtgagcaacttacaatcactttggaacacaaacttcatgccaggtacactgtagctttccacatagcatcttatttaatcttcacagcatcctgtgttatcagatttttgtggcaggtgtagaaactgaggctcagtaggtctaagtaatttgctcaagttcgcagctaagtgacagaaccagagtttgaacccagttgtcttcgaagcccagatggtaaaattctaccgggcgacatagccaagtcagatagtccaccatctaaagatctggggggctacatagattactagtcaaacaagtaagtgctgttttctatcagaagaactctggggaaacagtaagttccttctgatctgatcaacaagccaagtgtgtgatgggtcacgtgtccctgaaggctccagattaggaactgcatcatttcgtgcagtccacaaaatgaaggatagtggtaggggctgggaaaatgcgggcgcttgggtctccttagaccagccagggctgtttcaaggtccatacagttgaggggtaggaagacgcagtcccacgtgactgaagagtgctcacactcctttaacagtttagcaaggtgtatttttaaaaaatggaccttaatgagaagacacactgggatagtatcctggagggatttttttttttaagttctaatcaactagaaaatgtgacgtgggtgcgtactgtgattatttaacattcattattcactgtatgttaggtccttggttgatgt

SEQ ID NO: 22752 - DNA, 2186 bp, Homo sapiens
tcccacctcaacttactgagtcactgggattataggcatgagccaccaggccaagcccgctattaatggactaaggtaatgaaatatataccaaaagtaccattaaaataagacagagcatgagatctgcccattgagaggtacagtagatggactagagaaatccaacagaagaagagttattttctgccttgggaatcagggaaaactttccagagaaggtgcattctggttgaacccttttggtatgtaggatgggaagcaggaaggaatggcagaatccagtgctgctagccccaagggcataggccaccatgaaagagggttgcctttgtgaaaggggggaacagagattagattggaaaggtaagtttggaaggctttgaatgccaggtgaaagctaagttaaaacaaaatgataatttttattcttaagaagcccacattatccacaagactccgtttatcccataagtcttttaatatttgaagaaaaaaggcagaaatgtcttttaaaattctactttccaaacaattaagatttctgtagcaccaatattctttccactggcaaataggtattacctagaattaaggcaacacataaatgaataaaatagatgataactttttcattgtttcatttggagaaatactttagaaggtccacaaacaggtccctgagcctaccaaagagggatgttagcattttatttccagcatgtcctgataacttactgatactaaacatttttgcaaggagcagccagccttcaggctcctgaatctaagaaggatgatagtgaatgattattcatgttgagttttctgcattggttatggctttatcaatccagatgatcaatcaactttcagattttagttctgaacctggagctttctgtttggtattcaaaataatgggtgtcaaagttatagctcatatcacaccgacagactgggcctcccccatcagcacttctctgttcagcaagcgtgtttgttggccttgtattcctcttctggccccaggatccaggaaaacatgagtctcagcttttttctacttctgtacagcacagggccttcaggtggtgccttcacagcaaatacccccgtcccttcatctgtcaatttaggacaataaaaataatctgcctcacagagccatgctttactttctccagttaaaacactatgaagggaaatatgagtatccgaactgcagaaacataatctgttgtccttttgtgaaatttcagagatgaataatgaaacctgttaccctattgcacaatttgggacaagaaatataagccatagattgaagataagacatttccccctagtagaacaggtcacagttgattagttatctccagatgcaatgaagaaagcaaaaatttttcaaactatacattccttccttaaagtgagcaacttacaatcactttggaacacaaacttcatgccaggtacactgtagctttccacatagcatcttatttaatcttcacagcatcctgtgttatcagatttttgtggcaggtgtagaaactgaggctcagtaggtctaagtaatttgctcaagttcgcagctaagtgacagaaccagagtttgaacccagttgtcttcgaagcccagatggtaaaattctaccgggcgacatagccaagtcagatagtccaccatctaaagatctggggggctacatagattactagtcaaacaagtaagtgctgttttctatcagaagaactctggggaaacagtaagttccttctgatctgatcaacaagccaagtgtgtgatgggtcacgtgtccctgaaggctccagattaggaactgcatcatttcgtgcagtccacaaaatgaaggatagtggtaggggctgggaaaatgcgggcgcttgggtctccttagaccagccagggctgtttcaaggtccatacagttgaggggtaggaagacgcagtcccacgtgactgaagagtgctcacactcctttaacagtttagcaaggtgtatttttaaaaaatggaccttaatgagaagacacactgggatagtatcctggagggatttttttttttaagttctaatcaactagaaaatgtgacgtgggtgcgtactgtgattatttaacattcattattcactgtatgttaggtscttggttgatgt

SEQ ID NO: 22753 - DNA, 1341 bp, Homo sapiens
ggaatgctggatcataggcatagaagacccaacaaatgcaagctgacaaacgaaaggtgcttgaatctctgagctaggttttgaaaaatgctaaaatttaataatttatgtgcaaattatgttatatttttaattgggaaaagagtattttgataaaaaaaygaaagttaaatttggtaaatttaatgtgactaatctgtaaactttttttttctcgagcaggttagccaatatacctttgctatgtgcagttatagagaaaagaagtctgaaccacaagaattaatgcagcttgaaggctatactgtggattataccgatccccacccaggtaaatcttaattgaatcacttttcctgccatgtatgtatgcatggaattcttataaatatcctttgtctgttctacaatttaaacccctctcgatgaatagggtgcatatttcacttatatacctgggcaagactttatgagattcaaattatctcttttggagggcttgtatttttagccatatttcatcatatttgttattattttagcgcaggattgaaatgtgtaaaattcactgtaatggaataattaggtgagatattacaatgttttcagaaacttctttgcgggaaagcaaaagttatagcagaaataggcaaagaaatggcaaatgaattattatattataactactaattttctccccaacaatacatgcttgtacttctctctctcccttcatattaatactggaaagagtattggacacctgatatttaaaaaattgaatgaatgaatattaatgacattaatatctaagatcaagaaatgtagacattaataaacataatgattaaatattggtgaatagagattaagaaatagaaatttatgactatattaactaattgttcacttaaaatgcaaaatattatgtgaaagaattttataaaagataaaatacatgcaatatgaaatatcatttttgtcttaatcattatatatttttcccatgtatagaatggcaactatgccaacagataaaacttctttctctggcatgaaatatcagattgtgctatgcatttccatggagtgtgtttatatgtcttgtagaatgatactctgtcatggactgtttccctaggttattttttatttctgaggtaatatgggagcttaaccctttttgttattgtttttcttcaaatctttgattgtggatttgatcctttaaactaaatattctttaaaacatttaactgctaatatcaaagccattcttttccatgaggtcagttagtgaatgagacgaaaatctgccaatcctataaatttttaatgatg

SEQ ID NO: 22754 - DNA, 522 bp, Homo sapiens
ttgatttaaagtgccaaagagatattccatccaattagtatgggaaaatggctagtggttcagaaactttttaaaaggagttagtttcagagtttaaaaatttgttttttccaggtcattaaatttgacggtggagaggaagtacttatttcaggggaattcaacgacctgagaaaggtaatgcttttgtgtgtataatgtaatatcagcagctaggatactaagctttaaaaacatgtaaaaagsacattaaattgacatcttttttgtgttaggtcaccaaggagcagtgggacaccatagaagaactcatcaggaagacaaaaggttcctaagaccactttggccttcatcttggttacagaaaagggaatagaaatgaaacaaattatctctcatcttttgactatttcaagtctaataaattcttaattaacaaacattcattgaatatgtattatgtgccaggccagtgatagccattgtatattcaaagataaataaaatgaaatatagtccttc

SEQ ID NO: 22755 - DNA, 519 bp, Homo sapiens
gggagcacagacctggcgtctcgttcacggttgctctcccagacctactcgctactcagtaggggcgcagcagcaccggtgaatggagctggggcaggsgggctgggctggatctgggagatccagaggggtcctcagctgtggagggggagcactggagaggacgtgacctgggacctgggctcaggcacacagtgagttggctaccaagatggggcatcaggaagaagcacaggcttgggtcagatgtgctgagcagtcaggacctgcagggttggaggggcccaaggggcgccctggatgtggcttgacgtgctgcgctgggcacgcatggtggacggagtggtggagcaggcaactggagcctagaacgtgcccggcatgttgcagacgctcaagaaactttctgcagcaaacgaagaggcagatgctgtgggagacactgcccgggctatggtggggtttgggggatcccagctcctgccctctggccctgtgagaacaccctggctacagccc

SEQ ID NO: 22756 - DNA, 519 bp, Homo sapiens
gggagcacagacctggcgtctcgttcacggttgctctcccagacctactcgctactcagtaggggcgcagcagcaccggtgaatggagctggggcaggcgggctgggctggatctgggagatccagaggggtcctcagctgtggagggggagcactggagaggacgtgacctgggacctgggctcaggcacacagtgagttggctaccaagatggggcatcaggaagaagcrcaggcttgggtcagatgtgctgagcagtcaggacctgcagggttggaggggcccaaggggcgccctggatgtggcttgacgtgctgcgctgggcacgcatggtggacggagtggtggagcaggcaactggagcctagaacgtgcccggcatgttgcagacgctcaagaaactttctgcagcaaacgaagaggcagatgctgtgggagacactgcccgggctatggtggggtttgggggatcccagctcctgccctctggccctgtgagaacaccctggctacagccc

SEQ ID NO: 22757 - DNA, 1265 bp, Homo sapiens
tgttccaaaaggtaactcatcacacagaggccagaactcaaggcaacagtaacagtagcaaacaaagaagaaatgcattgcaattcatgtgacactgtttgcagccaaattagcaaagtgccaatgcaacaacatctggtcagagggactccttgtgtcttcaatttcagccacttcaaagtcagctctttccccaacatcccctgaaaccatctctcatccctctccttttgctcattcccctgctacactggcttccttgctggccttgaacatgtgcaagaagcacattcctctgagtctctcattaatccttccttctgccttgcacacacttctgcgggccacatggtgacttctgccctgccttcactatggtctctgttcatttgtcacctggtctgctggtattgcatcaatgaccagtaaaaaaatagtaaaaaaaaaaaaacaaaaaaaacccaccccgtccacactttccttcttatttcttttttcctcttcaaagggtttgtcaccatcrgataccatatggtgacaccatatggtatttctcttgtttgtttgtattctttctctgtcactgatttgcagcaactttttttttttttccggagtctcgctctgtcacccaggctgaagtgcagtggcatgatcttggctcactgcaacctccacctcccaggttcaagcaattctcccgcctcaacctccagagtagctgggactacaggcgcgtgccaccacatccagctatatatatatatatatatatatatatatatatattttttttttttttttttttttttttgtattttttgtagagatgagaattcaccatattggtcaggctggtctcgagctcctgatgtcaggtgatccacccacctcggcctcccaaaatgctgggattacacgtgtgagccaccccacccagcctgtagtgacttttgttttatagaactaattattcaatgtccagacagtatttgtaacacttcagaattcactttatagtcctcaaatgcctaaaaattttctcatgaatactgcagagttcatgcactcagggaaagactgtgagtgggacaagaattcctaaccagggttgtcaaagggatgccctaacagaggctagattcacacgcaaaatgtagaaattaacttcttgtaaaatggaggttaccagagcctgggagaattgggggaggggggttgttggcaagatgatggtcaatgaatacaaaattacagttaaacta

SEQ ID NO: 22758 - DNA, 1104 bp, Homo sapiens
tgtacttgtactgtaagatagttttctccatacgtgcaatctcatcagctcaggggaagtacaaggcattttccacctgtgcatctcatctctcagttgtctccttattttatggtaggagcctaggggtgtactttagttctgctcctacccaaaactctcactcaggtgctgcagcttcagtgatgtacactgtggtcacccccatgctgaaccccttcatctgcagtctgaggaataaagacataaagagagctctgaatcaattcatcagggtagtgccattcttcaggaagtgacagtgatcccagagctctaagccttggactgagaaattgtgatttgtgaaccagattctggaagtaggacttgtctcttctatttattagctggagtttcaatttctttgattgccactattctatagaatttacacttttctgtggaaaactgctccttgatatccaacagtgttttgttttgtttgttttgttttgtttttgtcattttcctacttttccaaagttattcccaaactaaggtcagaaacaaagtggagattcctattagtctcatagagttgtgagctgtgttagcccaaagaataaattacacttggcaactataaagtcattaatgtaatctttttctytttttttgagacagtttcgctcttgtcacccaggttggagtgcaatggtgccaccttggctcactgcaacccccacctcccaggttcaagcaattcttctgcctcagtctccggagtagctggattcaggtgcctgccatcacgcccggctaattttttgtacttttagtagagacggggtttcaccatgttgaccaggctggtctcaaactcctgacctcagagatccgcccgccttggcctcccaaagtgctgggattacaggcatgagccactgcacccagcctcattcatgtaattttattgtagataaatatctgagaccacagtttttcttttctgagtccaccattctttgctctatcactacttgactgctctacttgacaatgtaaaccttaacacattagtgtgtttacagctcatcgtggcatttcattcttctcattagg

SEQ ID NO: 22759 - DNA, 565 bp, Homo sapiens
ggtttgctgtaatgaaataattcctgggccccaaagaacatgcagctccacggagttccaagttcaagtctattattcacttcagtacagaggagtaacagtcaaactggcagtatgtcacttgcagtgtgattccaaggtatgctgagaaatgtgcttggcttggtgtgacctggtttggcttgtcctcctcactgtcacatgaagccaacatagccagaatccataagatactttaccccaagaaagccctttctctcttgcagagataagggggccttatcctatgcacttcagttgatatttttccagccaatgccggattttccctctggacttgctgtacttctaaaacctgtttactttgcaaccccaagccmaaaactttgcaaaatcaggcatagtaaataacacaaacctgattttactatgacctccctcttttggacattaatcactatttaccttgaattttctctttgcttaaatggctgcccactgtactgtgtcaactggtaattctgcgagatcaaagggaagaggagaaagccgtcattttatattt

SEQ ID NO: 22760 - DNA, 547 bp, Homo sapiens
attgtgatgcagttataagaaagtggcctgaccttaggtgaaggaactccagaagtaaaaattgatgtctgacaaagatcttcttaygtgtagtaaatgaattctgctctccaaatatgaagtgaaactgcatcaattcaagaaatgcctacaatcccttcagcatggtggttccactgaaaggcccttaagaataacggatattttactcacatgttttgagattagtagaaccgtcgtggctttatgtgtctatttagttactacattcagaaaactgagggtataaaacaaactttaactttgttttcttcccgtgtctttagtttccagtctttaagctccattgctttccctagggcagtgttctttaggcccttaaatttctatttgctctaatggaaaactttatatattttttaaagccaagatttgttgttgcttgcttgttttgaataacagataagctactttacatactctttttatctgggttctaaacttacagttcatggataaattttattttgttctatactttttaata

SEQ ID NO: 22761 - DNA, 532 bp, Homo sapiens
ggaagatctgcttgatcaattycctggacggccagaattggggaaaagacttcgtattggtgataggcagctgtctctgttatcatagagtaagagttggtaaatacttctttcctttcttgccatgacttccaggaagcgcagatggaaagtgatgctgaatggcaatctgtctgtgatgccacgagcagcttccttcctctctttggttttattttcactagattgttgttaggagtttttcttgtaattcagtcccttagtgttcaaagtgtggttctgggaccagcagcattggcatcgcctgagcgtttgttagaaatacataatctcaggccccatacggccctactaaatcagaatctgcattttaacaatacccccaggtgtttacgctcacattatagtttgagaagcactgatggaatcccaaaaaactttttaaatcaaagttgcatgaactaagacctgtgatgcctcttcccctttcctatcccaatttccctaccaggggcctcccacgaagccctgt

SEQ ID NO: 22762 - DNA, 550 bp, Homo sapiens
tgtctcttctcctcccctcagccagcatctgtctgtctctgcctttctctcctgctccctccctccctcctctccagcaccttccaatgccaggtggggctgccattccttccaccttcccagtgacccgccagtgtgactgccttgagaggaaagtcctaaactgtccctatcttcaccagcctgccctcaaatcattggttcaaatcgctstcgagaagtttgggagctcccagggcgggggctttctaacagctctgcctagctcgggcctgccctcaaccgcagcatgcagggcagccacagacaacctctctgcaacttctgatgcctccgtgcccccatccacagagccctggctctgggggactggggactctgggacatccctaacatggcatgcagtggcggtgcgggaggacttgactgcccctctggagccctgggcccggggactccaggccagtgcctctctgggtcgggatggggatgtcaggccagcaggatcatggtacctgcctccagggagggcaacgtccacccactgagt

SEQ ID NO: 22763 - DNA, 545 bp, Homo sapiens
cttagcatggctgttcatttgctcgttataggaatattaatgaatttaagggtgtagttccagaccttactggttgccttctgaaatatacatggcacatgggctccaacagggccagtactagtccatggcctgttaggatctgggccgcacagcaggaggtgagtggtgggcaaggagcattaccacctgagctctgcctcctgtcaaatcagcagcagtacattctcataggagcacaaaccctattgtgaactgcacrtgcgagggatctaggctgcatgctccttttgagaatccaactaatgcctgatgatctgaggtggaacagtttcattctgaacccccgaccccacccagtccacggaaaaactgtcttccacaaaaccagtccctggtgtcgaaaaggttggggaccgctgggctataataactttctaagaaagattctgaattctaaaacatctggcctcaagagtttcagataagggattgcagacctgtaccatatggtaacgtgtacatggtatacattaggaaaaatg

SEQ ID NO: 22764 - DNA, 545 bp, Homo sapiens
cttagcatggctgttcatttgctcgttataggaatattaatgaatttaagggtgtagttccagaccttactggttgccttctgaaatatacatggcacatgggctccaacagggccagtactagtccatggcctgttaggatctgggccgcacagcaggaggtgagtggtgggcaaggagcattaccacctgagctctgcctcctgtcaaatcagcagcagtacattctcataggagcacaaaccctattgtgaactgcacgtgcgagggatctaggctgcatgctccttttgagaatccaactaatgcctgatgatctgaggtggaacagtttcattctgaacccccgaccccacccagtccayggaaaaactgtcttccacaaaaccagtccctggtgtcgaaaaggttggggaccgctgggctataataactttctaagaaagattctgaattctaaaacatctggcctcaagagtttcagataagggattgcagacctgtaccatatggtaacgtgtacatggtatacattaggaaaaatg

SEQ ID NO: 22765 - DNA, 557 bp, Homo sapiens
gcccactctagtgacctygttttaccttaatccaatcttgtccattctgcagccctagggccacatgcagcccaggacagctttgaatgttgcccaacacaaattcatacttttttaaaacatgagatttatacacggacctgttttttcgctcatcagctattgttagtgtattttatgtttggcccacaacaattcttcttcttccattgtggcccagggaagccaaaagattggactcctttgccttaatcacttctttaaaggccctacctacaaatacagtcacattctgaggtcttgggggctagcacttcagtgtatggtatgggagagggggcctcaactcagctcataacagcatacttctaatggtggttctcagtctttattttgaggaaagtggtcacttaaataatgacatatggaaaagatacaatttaagtaatagagacttcccacgcaaaccccatgtaaggggaggaatcgaacgtatcaagggcattccccaagcccaaggtgatagaggtgagaaatgctcacttattagtgccaat

SEQ ID NO: 22766 - DNA, 557 bp, Homo sapiens
gcccactctagtgaccttgttttaccttaatycaatcttgtccattctgcagccctagggccacatgcagcccaggacagctttgaatgttgcccaacacaaattcatacttttttaaaacatgagatttatacacggacctgttttttcgctcatcagctattgttagtgtattttatgtttggcccacaacaattcttcttcttccattgtggcccagggaagccaaaagattggactcctttgccttaatcacttctttaaaggccctacctacaaatacagtcacattctgaggtcttgggggctagcacttcagtgtatggtatgggagagggggcctcaactcagctcataacagcatacttctaatggtggttctcagtctttattttgaggaaagtggtcacttaaataatgacatatggaaaagatacaatttaagtaatagagacttcccacgcaaaccccatgtaaggggaggaatcgaacgtatcaagggcattccccaagcccaaggtgatagaggtgagaaatgctcacttattagtgccaat

SEQ ID NO: 22767 - DNA, 557 bp, Homo sapiens
gcccactctagtgaccttgttttaccttaatccaatcttgtccattctgcagccctagggccacatgcagcccaggacagctttgaatgttgcccaacacaaattcatacttttttaaaacatgagatttatacacggacctgttttttcgctcatcagctattgttagtgtattttatgtttggcccacaacaattcttcttcttccattgtggcccagggaagccaaaagattggactcctttgccttaatcacttctttaaaggccytacctacaaatacagtcacattctgaggtcttgggggctagcacttcagtgtatggtatgggagagggggcctcaactcagctcataacagcatacttctaatggtggttctcagtctttattttgaggaaagtggtcacttaaataatgacatatggaaaagatacaatttaagtaatagagacttcccacgcaaaccccatgtaaggggaggaatcgaacgtatcaagggcattccccaagcccaaggtgatagaggtgagaaatgctcacttattagtgccaat

SEQ ID NO: 22768 - DNA, 557 bp, Homo sapiens
gcccactctagtgaccttgttttaccttaatccaatcttgtccattctgcagccctagggccacatgcagcccaggacagctttgaatgttgcccaacacaaattcatacttttttaaaacatgagatttatacacggacctgttttttcgctcatcagctattgttagtgtattttatgtttggcccacaacaattcttcttcttccattgtggcccagggaagccaaaagattggactcctttgccttaatcacttctttaaaggccctacctacaaatacagtcacattctgaggtcttgggggctagcacttcagtgtatggtatgggwgagggggcctcaactcagctcataacagcatacttctaatggtggttctcagtctttattttgaggaaagtggtcacttaaataatgacatatggaaaagatacaatttaagtaatagagacttcccacgcaaaccccatgtaaggggaggaatcgaacgtatcaagggcattccccaagcccaaggtgatagaggtgagaaatgctcacttattagtgccaat

SEQ ID NO: 22769 - DNA, 523 bp, Homo sapiens
taatagggtgccatttaggctaagtgtaggcaggagaagaaaagcacaccttttgactgcagaaactgcgcttgacttgcttaataacaaggatagtggttgtggagcatctagttcacagtgcaatagagagaaaagacagcttctggcatcaagaagtttctagaaatacatagagactggaaaatttctctcaaaaggaaattaagaaacatatctgaggaagagctattggtattataaaggacatagctgggtgggcattataatgctgaatccagataaaaytgtttttttcctaagcacatctcatgttgcagttgtgccctctatcatttctatctgtatgttcctgtaaagcagaggatgacaaactgcagctcaccacctgtttttgtatggcatgagaggtacgatttttgcagttttatatagttgaaaaaaatcaaaagaataatctttctgacacatgaacattatgtgaaattcaaatttcagtgtctacaaataaagttttactgga

SEQ ID NO: 22770 - DNA, 598 bp, Homo sapiens
tactgtagagacttttcttttgcactgtagagattgttctttcttgatctacataaatgctttatatcatagaggctgttctcttccttacttttttcctcaatagtgtttgtaatacctctccacgttgctgctcattgtgcatctagtttattacttttcactgatgcagagaactccctagttgtttcttccagagcttacaaatgatttccctygtcatcaataactacattgcctccgactccctgctgtcataagcaatgctgcaataaatatcacaattcgtatcctatttaccgaggacttggatttgtggagtcaaagggtcattgtatatacaatttcaccaagcctcagaaaggctgtgcccatttaaatgtccaatagcaatgcctgcagagtcctgtttcctcacatcctcactaacactctatattctccaatctgtagctttcgtcagtcttacagatattgtgtcacacacaaacatacatacatacttatgtacagattttttttcttaggataaaatgtggaattaaaatattgttaagcataatcaacaaaaacagactactttgaacctacagaagtt

SEQ ID NO: 22771 - DNA, 1087 bp, Homo sapiens
ccacgaaacaggccccagagtaccttgatggctcctccaagcacctgacatgcttcaagacttctggccaggtgaacagaggccagcagcctcaagactgctcagatatgttgctttagtcctttctccgtattctaatacctgagaacacaccgggaatcctagcaccctcccagcttggagggagatgatcagccctcaggctttgggtccagaaccatggcccctctgggagccctgtttctactctccccttggagctctatccccaccctgctgccttacacatgggcttcagctgtcccaacaactcctcccgggaccacttcagccactctcgacggtcgctgctgatggaacaaaagatggggctgcagccctttccacagtcctccagggctgggacgttcaggtagtgcacaaggacgatgtcagggttctgagagtataaggggacacacagagccatggggtcctgaggtccaggggcttggcttcctaatcctcactttcttcctgggcaccctcctaacctcgcccccaatttctgactctctccatccccaagcccctttctcttcttcccaggctcctttcctcactcagaactcagccatcctttcacttccttctttcagacccgtgtccctcaaagagtcaggaagagggtggctccctgggctcttccgtccttacctggagcagccagtagcagcgccgatggaatgtggggacgatggaagagtgaacgtagcagccatagagacactgccaggagacaggctggggtggggggagggctagtctgctccccaactcttcctctgttcagtccctttgcaggaatcccaatctttccaccagttcctcttcaacccttcccccaccctcrcccccacctattccccaccccttttgaatcccagccaccctgagtcatagatgagcagtggggctggggccttatagtgaggaccagatttgagatacgggactatctagaaaccagagggcagagcaagaatgcatctgagatgaggggcaatgatttggggaagagaaacctgtgctgagagcatcattgctg

SEQ ID NO: 22772 - DNA, 1627 bp, Homo sapiens
ttggacaggtaacccaacatgtttataagttcttcaattaagatagaaactcaccaaaaatagtttgtcctgaaaatgtcaagaattcattacagagcccacaatcaaacctcttcataaagttactcagggagaataacaggttccttttagcactccttcctttttttttttttttccttctttttttgaggtggggatcttgctctgtcacccaggctggagtgcactacagtctcaaacttctagctcaagagatcctctcaagtagctaggactacagatgcacacctctatgcttggataattcttattttattttattttttttttttgtagagacaggagttttactttgttgtctgggctggactcaaactcctggcttcaagcaaccctcccaccttaacctcctaaagtttagcactcttcttgagaaatactaactagagaaaactaaggacagaagaatccatccaattacaacttatttataaatgtaaaccaaacagaaagaaaaaattgaatacgtattttttcagtgtacatatactgagtatttactatccatcaggctcagttgtgagttgagaaatataaatattatgttgtgcttgctacaacttatagtttaaaaaaggagacagataaataaagcaacaattaccataaaacttgcaaaatgctgtaaaagaaataagcagaggatactacggaggcataaaaacaggcacctaattccaagcattggagatttccccaaggctaatgtcacttgagctgagctggagaggtgagaagtcagccaggtgggcaatgamcaaaggagggctttccagaataaggggatagcatatgcagaagtagaaactaaaaggacttgttaaacattacattaacgctaatattaagcattaactagtattctttgatcatttacttttcacaaagcaacttggtaagcattttacaggcatttgtctcatttaattctaccattaccatttaaaccagttctattattattccaattgtactgaaagaaacaggtttagagaagtaaaataacttattgaagatttttcaacagtctgactctaaagccccccaccgccactagactctaactgcctccccagctatgccacagtggtgcttgtctgtcctctgtaggcaatgaaaagccacacaaaaaattttaggtgaatctcctaaaagtaagcacaacatttttttaatgtgaaaatgactccctttttttggtcatttaaaaaatcctttggttcaataccttgattatgtccttgttaaatttgatttctatcttgttcagaaaaggaatcatgacttaagaaggacctattgtgcatgtgaatcacaacccccataatgaagagagaggtgaaaatgatgctgtttccaataagtagggatgggaagtgtcatgtgtcactctgatatgcgatacagaaatcaacatgagttgtcacaccatgcatacagggtaggacttatcatttatacctactcttatggaggcagggtcagatttctaaatctaaatactttaaattcagaatacttctccagcaatctttgctttttaattgatggtctttaaagggca

SEQ ID NO: 22773 - DNA, 1627 bp, Homo sapiens
ttggacaggtaacccaacatgtttataagttcttcaattaagatagaaactcaccaaaaatagtttgtcctgaaaatgtcaagaattcattacagagcccacaatcaaacctcttcataaagttactcagggagaataacaggttccttttagcactccttcctttttttttttttttccttctttttttgaggtggggatcttgctctgtcacccaggctggagtgcactacagtctcaaacttctagctcaagagatcctctcaagtagctaggactacagatgcacacctctatgcttggataattcttattttattttattttttttttttgtagagacaggagttttactttgttgtctgggctggactcaaactcctggcttcaagcaaccctcccaccttaacctcctaaagtttagcactcttcttgagaaatactaactagagaaaactaaggacagaagaatccatccaattacaacttatttataaatgtaaaccaaacagaaagaaaaaattgaatacgtattttttcagtgtacatatactgagtatttactatccatcaggctcagttgtgagttgagaaatataaatattatgttgtgcttgctacaacttatagtttaaaaaaggagacagataaataaagcaacaattaccataaaacttgcaaaatgctgtaaaagaaataagcagaggatactacggaggcataaaaacaggcacctaattccaagcattggagatttccccaaggctaatgtcacttgagctgagctggagaggtgagaagtcagccaggtgggcaatgaccaaaggagggctttccagaataaggggatagcatatgcagaagtagaaactaaaaggacttgttaaacattacattaacgctaatattaagcattaactagtattctttgatcatttacttttcacaaagcaacttggtaagcattttacaggcatttgtctcatttaattctaccattaccatttaaaccagttctattattattccaattgtactgaaagaaacaggtttagagaagtaaaataacttattgaagatttttcaacagtctgactctaaagccccccaccgccactagactctaactgcctccccagctatgccacagtggtgcttgtctgtcctctgtaggcaatgaaaagccacacaaaaaattttaggtgaatctcctaaaagtaagcacaacatttttttaatgtgaaaatgactccctttttttggtcatttaaaaaatcctttggttcaataccttgattatgtccttgttaaatttgatttctatcttgttcagaaaaggaatcatgacttaagaaggacctattgtgcatgtgaatcacaacccccataatgaagagagaggtgaaaatgrtgctgtttccaataagtagggatgggaagtgtcatgtgtcactctgatatgcgatacagaaatcaacatgagttgtcacaccatgcatacagggtaggacttatcatttatacctactcttatggaggcagggtcagatttctaaatctaaatactttaaattcagaatacttctccagcaatctttgctttttaattgatggtctttaaagggca

SEQ ID NO: 22774 - DNA, 1040 bp, Homo sapiens
atctgcaggacgcctgatgcctcccccttggctgctgcagcggacacctgcctccctccccatcccagactgctctgcttgtcccatgaaagcagagaaaagaaaccatagggtgcggaacggacctcagtagtattcaagacaacacttcaccgtgaaatgtaaagttctcctttaagaattcctgcctaatattgagaacaacagccatgtcaattgatagccgttctaacagacagtccgaactgctccaaaccactctaaaagcttgccttgatggagaaggggcctctggggcctctctatcacctgcctgggggcctctatttcccaagtagccctcaaagaaaaaagaccctatgctcccgcgtaggggtaggaaaagtgcctgctatgatgggtctttctattcaatacagaattaagagttgggtccctgtggaattctcttcctaactactctctgaggaaccagccaattctgacgggatttgctggattcgagcaaaacttggcgcacatggggtggggtgtgatggggagcaggagggaggggggcgcatctcctttcttccagataattgggacccagcaaagaaggaggggtggagcggtagggagagttatttgcggtcatcaactgaaataggcaaaaccaataacgcacctcgcttttcgccctgtttactccatccccattcagtgattggcaaagcaggccctgaaggcaaaggcaataattgctccgcgctctccttactagggaaatgtgtaggcatttgaagtgtactaaaaataaacgaaggagcgagaaaatgaaaaggggacagagtgacaatttgcggcaattaaagcgtctgcgcgctgttgccggaggaacagggacccacagcggtttttgttttcccaggcttgatratgtgactaactcgttagagaatttgcgtcctaggttgtgtgtgtgtgtgtacttgcgtgtgtgtgtgtacacgcgcgtgagcattcagcaacccaggagcccacagcaatggccggatccg

SEQ ID NO: 22775 - DNA, 564 bp, Homo sapiens
atcaatgcgctcgttgacgaagagcgctccactcgtcaggtccagctccaggtagcgcggactgggcgcacccagatggttgatgcgcaagcaacccggccccaagcgccgcagctcaagccccagcgcgcgagccacgttgcccacgagcgcgccgggtgcctgctcctctggcacagagtatcgcagctgggaggccgcwgggccaggtagcagcagcagcaacagcagcaggagaggcagtagcagcagccagggcatgggccgccggagccgtggatgctctgtcgccgcaggtctggtgcccgcctgctccatagccactggccgcggcggaggcagccgggcagggccggaggcggcagcttccccagccgtgccccacgcccgggccccgcctccgctcgtgccaccctgcgcctgctcccccaccgctcacgctctagaaagcgcctggggccgctccctccgtaggccctcccaagggctcctggccccaccgtcctcgctgactccccatattccagctcctccgctcgcctccgagtcgctcaacccggctcg

SEQ ID NO: 22776 - DNA, 536 bp, Homo sapiens
atcacaaaatgaacatatattgcttctacttggtccctcccagaagacacttcgtagctcgtttccaatcagatatctctgtcctaactactaatctgcctttttactgcaagtgttgcctcgtttgtgaaatgtatataaaagaaatgatgcagtttttatcctttagcatttggcctcttttactcaacatcatgtttgtgagattcatctgtattatcgagagcacctatagtttgttttttgtttgtatttcaatgtagaattccattatgtaagtacattataatttattcattccactattgatagatatctgagtggtttcaagattctattactactgcttctgtgaacattcttgtaacttcatgtgcatgtgacttcaactcccactcttcttgctcttgcccactctactttagccatctagcctccgtgccattctttgaatatgccaggtacactcccacctctagggctttgcatacrctgttccttcttcccagaatgctcttccaacagatagccccgta

SEQ ID NO: 22777 - DNA, 1143 bp, Homo sapiens
cctgttcccagtcctagtgtccttatctgtgaaatgcaataatagtagcatctaccacagaaagtcattttgaagagtcaatgatgtaagtcatgtaaagtttagcacaatgcacgatatatacacaacaatacatattagctctcactagtgaaaaaaagtgatacataacttagaggagctatcctataaaatacagatttgtgcccccattatagagatamtaggttaagtgacttgccaaaagtcaccagctgaaaagcagaatacccaagatttgaacctcagactgtctttctccaaagtctatatttctccctctttgtcaattgcctttatgatagtaccttggttgcttcttcagtgagggctaaagtcattgccctggcatttaagacccttaaagttggacttccatcagccatttccaatcttagctccacttgcacccactgttcctcgaatgtccactgtgcattctcgcctttgggcctcaagtcatacacctacttgggcctaaatctttcctcttttccgtggctggttcggatgcctctcccccctcctcacaatctgcctgccagcagtgcttcgtgctctgctgaggcccaggagcactttgtgaattttcttagtctgtctgatattatcaaatcttgcttgcaaggcatctctgtcctgccagactgggctcttaggagcaagaatttgtcctaatcatctctatcctggctgcaactcttagtaactcaatcccatgccttccgtttttaaatagggtagggtggaggagacaggtttgtcataaatcaatccatttgactaatatgggatgtcatagacacccttaacattattaattgtcaacaaggtttggctgtgaagtgtttggcaagctgcccatgatgagtttttgacagtcagtcatgttggaaatttggggtggcagatgggtgtggttagcagcatatggcttgaagtgtagtttcggtgtttatgtatttttacaaactatgactttatatttatgcatcaagaagagaaagaattcaaaattaagttgtgcatttcagggaattgtgttaacgttcttcaacaaaaagcaaatttcaggttgtagagagcaccctggagagggagctg

SEQ ID NO: 22778 - DNA, 569 bp, Homo sapiens
tatgggacagggagttctctggaacataccagctgaagcatcatcgaaacgctctcccaggtggcttccttgatgtgatctccaccatccaccaggccttgataaccctgtgtgacacattatacctgttcagcccgttaggcttctctataaattcccaagattaagacaggatccctgggaagagattctctgagagtcaagccacctcctcccattagtgagtcctggatgctcgtgagactatcatatttaacacagtccaaagaaggaggcatcaacttttgcaatactctcttctactttctcccatttttgaaatactgggatgtggatatccttcctaatagttaatcttaattcttatttttggctcatcctatctcctccaacctgcttccyagggggccaatgataacagatggtcttgataaccatggagaaaaggagaaggggaagttggtgggagggaaggaaagaaacgcgacttgctctaaaagattataaaatctgatacaagaaagcaggtggaccttataaaaagaagagtgggtgaagcatgagagggt

SEQ ID NO: 22779 - DNA, 558 bp, Homo sapiens
tgtgttttccttttccttagtctgccttctccttccctgttcatttgtttccattttctctcattgctgatagcagtgtaagtcgttgaattctgttacgtttattgcttctattctagctcttctrtagtaacaaaggtatcaaaaatggttctgaagtaaaattctgccataatattatagttattgagctgatacctgttaagagcaatatgaataaaattatgcttttaaaaaaatgttcaggcagattattattattattagagacagggtctcactctcttgcctaggctggagtgcagtggtgttatcttggctcactccatcctctgccttgggttcaagcgattctcatgcttcagcctccaagtagctaggattacaggcatgtgccactatgcctggtgtatttttagtagagatggggttttgccatgttagccaggctggtctcaaactcctggcctcaagtaagtgatccgcccacctcagcctcccagagtgctgggattacaggtgtgagccaccacacctggcaggtggattacttcttaa

SEQ ID NO: 22780 - DNA, 558 bp, Homo sapiens
tgtgttttccttttccttagtctgccttctccttccctgttcatttgtttccattttctctcattgctgatagcagtgtaagtcgttgaattctgttacgtttattgcttctattctagctcttctatagtaacaaaggtatcaaaaatggttctgaagtaaaattctgccataatattatagttattgagctgatacctgttaagagcaatatgaataaaattatgcttttaaaaaaatgttcaggcagattattattattattagagacagggtctcactctcttgcctaggctggagtgcagtggtgttatcttggctcactccatcctctgccttgggttcaagcgattctcatgcttcagcctccaagtagctaggattacaggcatgtgccactatgcctggtgtatttttagtagagatggggttttgccatgttagccaggctggtctcaaactcctggcctcaagtaagtgatccgcccacctcagcctcccagagtgctgggatyacaggtgtgagccaccacacctggcaggtggattacttcttaa

SEQ ID NO: 22781 - DNA, 556 bp, Homo sapiens
gcttttctatttaacttgtgatccatgacagaagtcagcattctctaggctgttcttatcctgtgacctgcctgacttatctatcatctgccctcttactagggtttggacttccaagggtcttctgcccctgccttgagaaactaagagttttgttggttagcctcttggctgtaggactcagaaagattacagtagtcttcccaggtctttttactcctcatgcttcagtctccttgccttaccacaatatgggaataccagttataccattgaarctgcctcaacaggaatttttttttttttttttttttttgacacagagtctccctgtgttgcccaggctgaagtgcagtggtgtgatctcagctcactgcaacctctgcctcctaggttcaagcaattctcctgccttaacctccctagtagctgggattgcagacacccaccaccacgcccggctaaattttgtaattttagtagagacggggtttcaccatgttggccaggctggtccgaactcttaacctcaagtgatccgcctggctccccctcc

SEQ ID NO: 22782 - DNA, 854 bp, Homo sapiens
gacccagtttggttgatgattgtggtttgaaaacataattcaccctgctccctttcagctgtcttagcttctatgctgcaggatttccttcaaagcacaatttataacccattaaatgggcctttcattccttcttcctcaggcttacccatctaagtagctccaaatggtctctcacctttagcagaggaaaatgtgtgcccactgctgtacatacagcaatgcttgtacactggtaacagttgttaccacctacaaatgcttaagggctagggtctgtggtaaatgttatacatcttctatagtcttcacaagaattccccaaagtagggatcatcatttccattttacagatgaggtaactgggctcagacaattgaagtcacatgcctaagttcacccaggtggcagacataaagctatgattagaactagatatgtgtgtagtgacaatctgtgcttgtagttatgccaccatctgtatggtcytgttcctgcacttaaggcagcctcttctgaatgatcagcccaccgtgcgtgcctagggcccagcagggtgtctcagggagggccagggcatgcctaggaacttggtacaaagctgtttcccaaactgacttgtaactcactgactcattcaagaagtgtctgtggaatgcttgccctatgccaggtactggctgagtctgagtgccccacacctcaaccctcctggaactcatccagagctgggggcctctgcgcctctgctattccaggtgcccagggccatctggtttgtcttcctgctctttgagtgtgcttctaaagttctcctgcaaatgttgtgatggagggtgagatgataaagggct

SEQ ID NO: 22783 - DNA, 640 bp, Homo sapiens
tgtatacctttttttcttttttttgagacaaagtttctgtcacccaggctggagtgcagtggtgtgatcacagctcactgcagcctcaacctcctgggctcaagtgatcctcttgcctcagcctcccaagtagctgggactacaggcatggaccatcatgcctggctaattttgcaaaaaaattttgtagagatggggtttcatcatgttgcccaagctgttcttgaactcctggggttaagtgatcctcctgccttggcctcccaaagtgctgggattataggcatgagccactgtactccacctaaaaccttgtttataaacacaggtggccagcttgtgtgtcatttgccaacatctgccttcagttatttcattacatgtgacccccaaatgtcctattattcttatcagatacagggatcatggcmttctaggtcactactgtatccccagtgcctcccagtaggtgctccacaaacatttggtgattcatgttctcctgattgcgtagggatatggtggtgttgggggggagtagcggatatctaaccccgaaatatggtgcctcatctgatgcttctccttttgtctttttgaccaggaatgttgaaaacccccagtcccagccgagacccag

SEQ ID NO: 22784 - DNA, 712 bp, Homo sapiens
tacctttctttagcactttctttaaatgctctgactaaagtgtttaatcacacactttacatggaacttggagatagtactttgctgttttgaggaattgacatttttttaaccaatgaattttctgaatagtgttctgtggatattaagaattataggatgaagccagacgtgttggcttacacttgtaatcccagcactttgggaggctgaggcaggaggatggtttgagcccaggagttcaagaccagcctgggcaacacagcaagaccctgtctcaaaaaaaaaaaaaaaaaaaaaaaaaaagaatgataaggatgaaagttgtcaccaaagktttgtgtaggagatgagaaaactagacccaaaggtgagaggggttgatataacttacaattacttacctgagaaatcagctcttcttccaaattgagttgttttcctactctcagcaaaacatgtttcaatttattctctgacttcagaaaacttctataagtcaaatacctaccaaatcatctatgtccttgaactgaatctaggaaactctgagagatgatatttatgcatatattacagcaagaatgggctaaaaaatgtaattctccttggagagctttgaagaacagggtgtcttttgtttatgtattctgaggtgatgtcattgtctccccagtcaccgggtcactgggagggtgcaaggagttgcgat

SEQ ID NO: 22785 - DNA, 641 bp, Homo sapiens
ttcatctgtcttaggctatttcagagtccctgtgtagctggaataacattttcagctttgaagataggatggggagcaaggctgaaaggacagcaggaggaggaggagacggtcaggcgggtagaggacctcacatgagaaatagggcagcgagatgaagcgaggattggttccctctttccttgagtcagtgcacaaagctggggctttgtcttcagccaaagcacacaaggaacctgtgcactgctttggctttaaatggaatataaaacgttctcaaacccattaccttaaagaaccctaacatgcttcttttttctttttcttttctttctttytttttttttttttgagacagagtctcgctctgttgccaggctggagtgcagtggcgtgatctcggctcactgcaatctccacctcccaggctcaagcgattctcctgcctcagcctccagagtaactgggactacaggcgcgtgccaccacacccgactaatttttgtatttttagtagagacagggtttcatcatgttggccaggatggtctcgatctcctgacctcatgatccacccgcctctgcctcccaaagtgctgggattacaggcgtgagccacggagaccggccaacatgagtta

SEQ ID NO: 22786 - DNA, 2920 bp, Homo sapiens
cagaaactagcatggtctcagtcttgaccggaggcaaatcccactccagaaacaaacacaaccaatagaaacaaggacatgggcagatattctctcagaaccacctcaactcagttgaacaccatattacactagaaaagagacacaggaattcacctgtagtacacccagtggccggctcacaggtggctaagtgcaagtcctaacttgttcttagagtgyaagcatagctgtggatctggcttccagcttcccttgattcctaaatgtttcccaagcctcccaattcctgcatattcccccagccttcccactttctctattaattatatcatgtttgatttttgtttacgttggccagagttcttgttctgtacaactaaaaacccacacaaatacaaaaagttaaataagtcccaatattgttaacagaagagattttggtataggtctctgattctcctcttaaataaaaataatcttaagaattacctttttgggtcggaaacacacattcatactgcaatctgtgacagtaggctatatgaagttttgatgagtatttctaatcattctttagtaactcttaagcacatagttaagaactaattgctggggataagacagtaaaaatgctagagaaatgtatgctttcactgaggttacaggctggtgggaatttgcaaataggtgattctaatacgttgtgataaatgtttgataatagaagtgctggataagagaacttcaaggacaaattacgtaagagagatgcagaataataatgtaatataacctggtaaggtaagaaatctagccacgaaacacccttagtttatttaggatttgtcacttacttgcttaattgaatatgtggggaaattattttcagtatgaattgtctaaaaggagtaacgctgattagttaaaaatatttacttatcatctattagttatcaaacctgatcctagctgctaggattatttccaaagatgagtaaaacaagaacagggaatttttcccaattaaatagaaacacccatggataatttcaacatcatgtgacattacagtgaaggactgcttagagaattcattcctaacttgggtctgtgaaaactaagatttctggggagacacaacacatgggctgagttttgaaagataatgatgcataacacatggaagaaagcaggaggcttttagaaatgaattacatagtgttctgtaaaaaacaaacaaacaaacaaaaaactccagttgtacctaaaacctgctccttgatatttccaagggcactccgatggcttgaaaataataggcttttttcaacatttagatggcaccaagattttaaataatcttttaaacagtgttaatgcatacacatcttctccccacatggctcctctagccctgggtatcacacccaggtgtcagcacccctacatgacacccagcagaaacagatggaacctgacatccaaggtgaaaagaaagtgttccctggtctaagccctgtagagagggacaacaccatcttccctgtagtctaaggagaagcattgttagtctcattcaacaaaagtgctccttgcaattcaaaatcacaggatttagaggagtcagcgtttttaatatttacgattttttattttagttccttttagtctagtcattgatacactaaatgcactcttattcccttcctctgactttctctagctctcttctacttccaaagccagagttaactatagtgtagttaagtatattgcatataatgtacacacacacaatgacttttttcttagtgtggtgtaatatcttctgttgtattttaaatgccctctctgagattcttcagcatattcttgaccttgctggctacagcagcaaaactgaagtctttaaggaatacacctcaaacaactctcagattcctaaccccacattgtaagtgatagttcagtgctcatctttgtgtaattgccatttggatattttcccataaaatttactcactagcccttgcttaaattgaattccagctgtcacttctgttccccaacaattggaagaccgtggatagctcagttgcaatcctatcatcaactaaaatgtcctgccctatagtgacgtgtcaacaaataatataagtcatcttgcctagtgttggagttattctgtttgctcttggccaaataatacaaatcccaactcttaataacaagaaaaccaggcaggaagaatccgagggtgtatttgcaagaagacctgtatgtgcgatcacataagtgtgtatgaaaaaccagacagggacaattccacaactttttaagaaacaattttgttggtgtggtattatgtgattactttcaaccatcacttcttaactcattgatctaaaaatctattaaaaataagtttaaaacatgacaagaaaacatgagctcttatattaacaatcactaaaacaattcaacattttttttaaaaaaagtaaaatgtaaaaagccacgttactcaaaacttttgacaaatgatctagcattctctaaaatattactggaagataatttatttctgaagactccatccacagtgcaggaagggaaaagggttctgtcaggaacatactttatgaaatagaatagccataaaaaacaatgcctctgattaaatttagttgtaaactgacttcctgcagctgcttaaaatggtctcgctctgaaaatttattttgggttcatgcatgatctgagaaacatagcaccttcgcatacacattcctccctcctctaacactccaaaatgattcatagctatgcatggataattttgagacctctgatttatagcatttgataacgaacagactaaaatatattactaaactaatctaatcaataatttaag

SEQ ID NO: 22787 - DNA, 525 bp, Homo sapiens
ggaaatgttgcgaatcttggtttgggtagttacatgggtgtatgcgtagataaacattcacagtgatgtgcgctcaaaattgtgcattttatgggayataaattaaaaacgtaaaaatattgaaaaacagaaattggagaagtgttaaagggtcaggttgaatgaggactgtctaacctggagctggcatcagaaacaactaccagaaatccctgtaacctgcttctcctttggggtctgtgaaccgcaggactaagacactcccacattctgaccctggcaccagcaacagactacttgccatcggattgatgtcgagaaatgatcacaggataacagctcttctcacggttcagcagataatagtaagtcaaacttttgccccagttgaacatcctatctctaagtataccccccatttcctctgaacccccctaaaccatttgccagtcacccaaatcaccatctgtgaccactactcccctgcattctacatccaatcaatcaccaagccctgtcaattct

SEQ ID NO: 22788 - DNA, 525 bp, Homo sapiens
ggaaatgttgcgaatcttggtttgggtagttacatgggtgtatgcgtagataaacattcacagtgatgtgcgctcaaaattgtgcattttatgggacataaattaaaaacgtaaaaatattgaaaaacagaaattggagaagtgttaaagggtcaggttgaatgaggactgtctaacctggagctggcatcagaaacaactaccagaaatccctgtaacctgcttctcctttggggtctgtgaaccgcaggactaagacactcccacattctgaccctggcaccagcaacagactacttgccatcggattgatgtcgagaaatgatcacaggataacagctcttctcacrgttcagcagataatagtaagtcaaacttttgccccagttgaacatcctatctctaagtataccccccatttcctctgaacccccctaaaccatttgccagtcacccaaatcaccatctgtgaccactactcccctgcattctacatccaatcaatcaccaagccctgtcaattct

SEQ ID NO: 22789 - DNA, 525 bp, Homo sapiens
ggaaatgttgcgaatcttggtttgggtagttacatgggtgtatgcgtagataaacattcacagtgatgtgcgctcaaaattgtgcattttatgggacataaattaaaaacgtaaaaatattgaaaaacagaaattggagaagtgttaaagggtcaggttgaatgaggactgtctaacctggagctggcatcagaaacaactaccagaaatccctgtaacctgcttctcctttggggtctgtgaaccgcaggactaagacactcccacattctgaccctggcaccagcaacagactacttgccatcggattgatgtcgagaaatgatcacaggataacagctcttctcacggttcagcagataatagtaagtcaaacktttgccccagttgaacatcctatctctaagtataccccccatttcctctgaacccccctaaaccatttgccagtcacccaaatcaccatctgtgaccactactcccctgcattctacatccaatcaatcaccaagccctgtcaattct

SEQ ID NO: 22790 - DNA, 525 bp, Homo sapiens
ggaaatgttgcgaatcttggtttgggtagttacatgggtgtatgcgtagataaacattcacagtgatgtgcgctcaaaattgtgcattttatgggacataaattaaaaacgtaaaaatattgaaaaacagaaattggagaagtgttaaagggtcaggttgaatgaggactgtctaacctggagctggcatcagaaacaactaccagaaatccctgtaacctgcttctcctttggggtctgtgaaccgcaggactaagacactcccacattctgaccctggcaccagcaacagactacttgccatcggattgatgtcgagaaatgatcacaggataacagctcttctcacggttcagcagataatagtaagtcaaacttttgccccagttgaacatcctatctctaagtataccccccatttcctctgaacccccctraaccatttgccagtcacccaaatcaccatctgtgaccactactcccctgcattctacatccaatcaatcaccaagccctgtcaattct

SEQ ID NO: 22791 - DNA, 525 bp, Homo sapiens
ggaaatgttgcgaatcttggtttgggtagttacatgggtgtatgcgtagataaacattcacagtgatgtgcgctcaaaattgtgcattttatgggacataaattaaaaacgtaaaaatattgaaaaacagaaattggagaagtgttaaagggtcaggttgaatgaggactgtctaacctggagctggcatcagaaacaactaccagaaatccctgtaacctgcttctcctttggggtctgtgaaccgcaggactaagacactcccacattctgaccctggcaccagcaacagactacttgccatcggattgatgtcgagaaatgatcacaggataacagctcttctcacggttcagcagataatagtaagtcaaacttttgccccagttgaacatcctatctctaagtataccccccatttcctctgaacccccctaaaccatttgccagtcacccaaatcaccayctgtgaccactactcccctgcattctacatccaatcaatcaccaagccctgtcaattct

SEQ ID NO: 22792 - DNA, 1844 bp, Homo sapiens
tgaagctggagaggtcgaggccaggttagggtatggggtacccagggtaggggaggcaggagcaagaagctgctcagcctccactcttgagcctcagtttcctcacaagggccctggcccccagcaaagggctgtgatctcacctcctagctggccaacctcccaaagctcctttctcacgtgcgggcctcatcgagtcccttagtgggacagggcagagcccacccggaggtcccatggagagcctgcctttgcccccatccctaccctggagctctgcactccctcaagtataccctactcttcaggcagggagactgaggccctgcccagagctgccccgtctcagctccctggttcctgcccagagcccggagtgggggctgtgtggggaggggctgccagatggctgtaatcccatgtcaacaggggtttagacacctgctcagctccttgccaccccctcaggcctgccccgcattccggcacatctcggcttccaaggggctttccccacttggctggagtctgggcctcccacactggggkgggggtgctgtctccccacccctgccccatctgaagcacagacttcacagcctggtctcaaaggccaggcctgccgctgcccccactcactgtcctgccacgggtccaggcctgggaatgggctgggcactgtggcaaatcacacgagtgaattttctggacaattggggctggagatgtggtggtgtctgaagcagcatcatggggctgggtcagggaggctgaggcccccacttggtgctgagccgcagaggagggatggcaagaggtcttgggaaggggtctactgctggggcagagggtcccagggctgagctccggggtggccaggtcaggtgggcaggacctggtgggtggaggctgggggaatggtgaacggggcaggcagagctggaggccagggccctgtggaaggagccaggaccggggtctgtgagacaggagggcccagtgcccacatggctgaggctagctctgggacaatctcctgatgcggacatgggtcacgtctggagacaagcccttggaggaactggagcttagagttgtagttggagctgggatcagctgggaatgaggacaggggtcaggcgagcctcgggggtgctagcttcttcccatgctgggatccctgctctgtctatccaggtgaccttcccctgccctacgctgtggcccacaagcctgacttgagccagctcatccacttaggaaatgcaacccctggccagagcacgtccacaatgaggactgcccccagcgacgccccaccctggacccctgtttagtggtagccaagccaggtaacactcagcccctctcaagcctgggagtcagaccaggtaacacgcaggccctcccactcagggtctgagtctacgtgggtcctggacattccgttccgacctgcaggggtgccgagagggttggggaggaaggtggaagctggttcttgttccggcccagcacctggccccctggccaccccacccaccctggaaacccccctcctggctcccttctttcagagtgggacaggcctttcagggctaggaacggagggcctggatttccatgtcaatggcgaggcaggcccgcctggtaagctgcttaacaagcctccagccccattggggtgttaactcaggccccattctccgggcccagtctcgcggttgccatggtgccctgcgtggccctttgggccgcggctaatcccttctctgggcctctcatcccggctgtcccacccccgggctggtcgctggtgacttggccatgcccaacaaggctgg

SEQ ID NO: 22793 - DNA, 802 bp, Homo sapiens
caagagtgaaactctgtctcaaaaaaaaaaaaaaaaaaaaaaaaaaaagccagatgtggtggtgcatgcctgtagacccagctacttgggaggctgaggtgagagattgcttgagcccaagagttcaaggctggggtgagctatgaccatgccactgccctccagcctgggcgatagagtgagaccttatctctacaaaaataaaaatgaaaaaatgagccagatgtggtagcacacctgtagccccagccactcaggaggctgatgtgggaggattgctcgagcccaggaggtcaaggatgtagtgagccataattgcactactgcactccagcccgggtgacagaatgagaccctgtctcaacaacaacaaacaacaaccaaagactgaaagcctcccgcctcagcctcccatgggattacaggtgtgagccacactcccagccatcactcctattttagggatgaggttacatccctgcagaagcccagagcagaaaggaccttctcccgcaggacggatagggttacggtcagttggagtttgcggggtcttccaggcacgggcaggggacagaaagggatggygtagacaaaggcatcagcacagcagagctgggaaacatgaaggcagctggcagagtgccctgagcatctctgaaaggtcctgtgatctgcctggctctgcaaggagcggtgggacgggaacctgggaggagaccggggaaggtgaggcagcatgagaggggccacacatcctgatttttcggaagctgtgagctggtgtttgagccagaacatt

SEQ ID NO: 22794 - DNA, 805 bp, Homo sapiens
tgcagaggctgaaccatcccacaatctgtcaaggatatcagggaagagcatgagctggatagacttcaggctctgccagcagctacattctaggggtgcccggacgtcctggtctcttgagatgagatggtcttgtgtctggaattggtctcactgactaaaagaataaagccgcagaccttcacagtgagtgtgacagtttttaaagatggtgtgtctggagctagttccttcagatgtttggacgtgttcagtttctttctgctggtgggtttgtggtctcgcttgcttcaggagtggctgcagacctttgtagtgagtgtcacgagctcttaaggtggtgcgcctggagtttctcattcctcccagtgggtttgccatctcactgcctttaaggagggaagctgcaaagcttcgcgcagtacgacagtttccaaacatgatgcaagcacagcttaccacggttgcctcsgcagcccgcttttattcccttatctgaccccacccacatcctgctgattggcccattttacagagagctgattggtccgttttgacagggtgctgattggtgcatttaggaatcttgagctagacacagagtgctgattggtgcatttacaatcctttagctagacacaaaagttctccaagtccccactagattagacacagagcactgattggtgcgtttacaaacctttagctagacacagagtgctgattggtgttataatcctgtagctagacataaaagttctccaagtccccaccagactcaggagcccagctggctttgcctagt

SEQ ID NO: 22795 - DNA, 805 bp, Homo sapiens
tgcagaggctgaaccatcccacaatctgtcaaggatatcagggaagagcatgagctggatagacttcaggctctgccagcagctacattctaggggtgcccggacgtcctggtctcttgagatgagatggtcttgtgtctggaattggtctcactgactaaaagaataaagccgcagaccttcacagtgagtgtgacagtttttaaagatggtgtgtctggagctagttccttcagatgtttggacgtgttcagtttctttctgctggtgggtttgtggtctcgcttgcttcaggagtggctgcagacctttgtagtgagtgtcacgagctcttaaggtggtgcgcctggagtttctcattcctcccagtgggtttgccatctcactgcctttaaggagggaagctgcaaagcttcgcgcagtacgacagtttccaaacatgatgcaagcacagcttaccacggttgcctccgcagcccgcttttattcccttatctgaccccacccacatcctgctgattggcccattttacagagagctgattggtccgttttgacagggtgctgattggtgcatttaggaatcttgagctagacacagagygctgattggtgcatttacaatcctttagctagacacaaaagttctccaagtccccactagattagacacagagcactgattggtgcgtttacaaacctttagctagacacagagtgctgattggtgttataatcctgtagctagacataaaagttctccaagtccccaccagactcaggagcccagctggctttgcctagt

SEQ ID NO: 22796 - DNA, 872 bp, Homo sapiens
gttcaattttcacaaagtgttgttagtcgaggcaacacttcacagtgaggcgtgatgctcacagagctgagttgtagcacgttattaagccactgatagtgcatgagcccaacccaagacactccaaccaacaggtccctccagtggcacatgctgcacttcactctccttgcagcctcctgggagcagctcctggtgaatttttcarctctttctttgtgtccagatacctcactttagtaggatttggagtcataaatgaaatactgagctgagaactagaaagggtgggaagcaatggagtgcagttcattcacttattcactctttcactcactcaacagaccttgcctagctactctgtgccacacagaatattggtgttcttatggaactttagagtccagtggggagatccatattggacaagtacttaaggtcattaaacaatggaagatactagacaggagaactgcccagtgcaatggaagcatatgagaaagggtcccaaagtggcctggggtgtcagaggatgccctccggggaggtgaaagctgaaatagaaacagaatatgagtgagaggctgtccctaaacacctatagttaactctgttctaggtcagtggcaatcccatacagcctcctcagagtcactcttctcaaagtcctcccatgacacatccagaacttccttcctgatctcatcttcccatgaccatccaaattagtccccctaaaacctattctcccatgactgtccacaccttcctaaacccattctacatgacaagtccagagcagccttcctaaaacccatattcccatgacacatcaaggccagacttcctaaaactcattattgcaaaaatac

SEQ ID NO: 22797 - DNA, 872 bp, Homo sapiens
gttcaattttcacaaagtgttgttagtcgaggcaacacttcacagtgaggcgtgatgctcacagagctgagttgtagcacgttattaagccactgatagtgcatgagcccaacccaagacactccaaccaacaggtccctccagtggcacatgctgcacttcactctccttgcagcctcctgggagcagctcctggtgaatttttcaactctttctttgtgtccagatacctcactttagtaggattkggagtcataaatgaaatactgagctgagaactagaaagggtgggaagcaatggagtgcagttcattcacttattcactctttcactcactcaacagaccttgcctagctactctgtgccacacagaatattggtgttcttatggaactttagagtccagtggggagatccatattggacaagtacttaaggtcattaaacaatggaagatactagacaggagaactgcccagtgcaatggaagcatatgagaaagggtcccaaagtggcctggggtgtcagaggatgccctccggggaggtgaaagctgaaatagaaacagaatatgagtgagaggctgtccctaaacacctatagttaactctgttctaggtcagtggcaatcccatacagcctcctcagagtcactcttctcaaagtcctcccatgacacatccagaacttccttcctgatctcatcttcccatgaccatccaaattagtccccctaaaacctattctcccatgactgtccacaccttcctaaacccattctacatgacaagtccagagcagccttcctaaaacccatattcccatgacacatcaaggccagacttcctaaaactcattattgcaaaaatac

SEQ ID NO: 22798 - DNA, 578 bp, Homo sapiens
tgcaacctccatctcccaggttcaagcaattctcatgcctcagccttcccgagtagctgggattacaggcatgcaccaccactcccagctaattttgtatttttagtagasattgggttttgccttgttagtctcaaactcctggcctcaagtgatctgcccaccttgacctcccaaagtgctgggattacaggtgtgaggcaccatgcctgggcaattaagatatatttttaaaactatgaatgaaaactgaactttagcaaaagttttcgtgtacttattgagatgattatgattttttttttttaaagacagagtcttgctttttttgagacaggcaggcaccaccacgcccggctaattttggtatattttgtagagatagggtttcaccatgttggccaggctggtcttgaactcctggcctcatgtgatctgcctgcctcagcctctcaaagagctgggattacaggcgcatgccaccatgcctagccgagatgattatgatttttatcttaattgttaattggtttattccactgattagattttttgaatagtcaaccaactttacattc

SEQ ID NO: 22799 - DNA, 718 bp, Homo sapiens
gattgcttgagcctaggagtttgagaccagcctgggcaacatagtgtgaccttgtctcaacaaaaatatactaaaattagccaggcttggtgatgcgtccttgtagtcccagctacttgggaggctgagatgggaggattgcttgagcccaggaggttgaagcttcagtgagccatgactgcatcactgcactctaacctgaaggacagagtgagactttatctytaaaaatacaaaagaaacaaaaaattatttgtcaattaaaaaaaaactggcagctttcctagttttcggtcctgcttccagcttaggagcaaccagagaaagacaaatatgtgcccctaaccaatcacttgggatgccctgccccttgcttccccaggccaacagcctcaaatgaggacatccctggaggcttcccttttttcactataaagcttacccactcctctgcctgacattgagtctcatccaaatacaaatgatggtggctgactcccttgttatagcaagctaacagcctttttgcttttctcattttattgtctttattcccagttatcaccatctgatcattagccagtggacttttgcttgaagcatgaacctgtgtatgcaaagacagggcaaaggtattctgatggataagaacagcctgaggaagtcagcacatccagagttaggctaagagaagttttagtagtgttgtttactgtat

SEQ ID NO: 22800 - DNA, 1326 bp, Homo sapiens
aaactattgtttattagcaccaatggtgtcagacacagatgctggagactgaaatgtgtacggtgagcctgtggctgcagagcaggaagtggagcccggggatggatggtgggagcaggctttggtaagagtgatcaggaacacctttatgaaaacttcaaaagcaaatgtaaagaaaaaaaatcatgtaacgaagtcccctgtgcccatgtgtgggcagtcagtttcatgtgcaccttctcctcattcctgcttcctgcctgtgtgggccgaatagtgtcccctcagagtcatgtgctgaagcccctacttccaggacctcaggatgtgactgtatttgaagatggagtctttttttttttatttgtttttattttagacggagtcttgttgctctgtcacccaggctggagtgcagtggtgcratcttggctcgctgcaagctccgcctcccaggttcccgccattctcctgcctcggcctcctgagtagctaggactacaggtgcccgccaccacacctggctaatttttttgtatttttggtagagatggggtttcaccgtattagccaggatggtctcaatctcctgactccgtgatccacccacctcggcctcccaaagtgctgggattataggcttgagccaccatgcctggcctgaagatggagtctttaaggaggtgattgaggtaaaatgaggtaattgtgtgggccctaatccaatctgatggatgtccttataggaagttattaggacacagagaggaatgatcattggaggactcatggagaaggcagccatctgcaagccaaggagagacctcaggagaaaccaccctgctaaatttaccttgatcttggactttcagcatctagactctaagagaataagtttctattattgaagccactcaagtctataatacttagtcctggcagcccaagaaggctaatgcaccaggtgattttgaagcaaaccctagagttcagtttgtagatagaagtgcagtagtaactcatcaagacagaagagtaacaagccttatgttgctggtcattctggcctcatctgctggctgccttagggtctctggggtgagttctgaggaccaagtctacactgtcaacatggccacggacgagctgctcagagtgacaggacaaccctcactgtgctgtatgtaaaccataaatcacagcacactctttgtggttgggagaacatgtatggtgttttgggagctggcacagtcagggatgtcattcatttcatctgggacaggctttgtgctctgggatctgtggcgggagcagtgagcccag

SEQ ID NO: 22801 - DNA, 1326 bp, Homo sapiens
aaactattgtttattagcaccaatggtgtcagacacagatgctggagactgaaatgtgtacggtgagcctgtggctgcagagcaggaagtggagcccggggatggatggtgggagcaggctttggtaagagtgatcaggaacacctttatgaaaacttcaaaagcaaatgtaaagaaaaaaaatcatgtaacgaagtcccctgtgcccatgtgtgggcagtcagtttcatgtgcaccttctcctcattcctgcttcctgcctgtgtgggccgaatagtgtcccctcagagtcatgtgctgaagcccctacttccaggacctcaggatgtgactgtatttgaagatggagtctttttttttttatttgtttttattttagacggagtcttgttgctctgtcacccaggctggagtgcagtggtgcaatcttggctcgctgcaagctccgcctcccaggttcccgccattctcctgcctcggcctcctgagtagctaggactacaggtgcccgccaccacacctggctaatttttttgtatttttggtagagatggggtttcaccgtattagccaggatggtctcaatctcctgactccgtgatccacccacctcggcctcccaaagtgctgggattataggcttgagccaccatgcctggcctgaagatggagtctttaaggaggtgattgaggtaaaatgaggtaattgtgtgggccctaatccaatctgatggatgtccttataggaagttattaggacacagagaggaatgatcattggaggactcatggagaaggcagccatctgcaagccaaggagagacctcaggagaaaccaccctgctaaatttaccttgatcttggactttcagcatctagactctaagagaataagtttctattattgaagccactcaagtctataatacttagtcctggcagcccaagaaggctaatgcaccaggtgattttgaagcaaaccctagagttcagtttgtagatagaagtgcagtagtaactcatcaagacagaagagtaacaagccttatgttgctggtcattctggcctcatctgctggctgccttagggtctctggggtgagttctgaggaccaagtctacactgtcaacatggccacggacgagctgctcagagtgacaggacaaccctcactgtgctgtatgtaaaccataaatcacagcacactctttgtggttgggagaacatgtatggtgttttgggagctggmacagtcagggatgtcattcatttcatctgggacaggctttgtgctctgggatctgtggcgggagcagtgagcccag

SEQ ID NO: 22802 - DNA, 545 bp, Homo sapiens
ccaccgcacccggcctctgtatcagttttgaatttagttctgggtgttttccttacacctaaagtgtggactttttggatttctactgagtagccagttcagcaaagtctcttcagctgattataatgttcaggaaagactcttcagctgataataacttctggcatcaccattcagcagtcagtcaaacattaaatgattacctgtaggcattgtggagtttcatctctgcatgtccaggccagcccttagtcaaggcccaagaaacatgtttttatcgtcaagaacttctaggctcttagtttacataatggaatcttacagattttcctttgtttgcttgctgaacactgtcattgtcaccctgggatttcttttctctgcttcctgggttggttccactgtttcttggagtccacatctttttctctcttggatgatcctcgttttgctgggagtagatcctctagtatgtttttcaaaagggggtttktagagtgtaaagatcccaaggcactgcaggtgtgaaaataactattttgcac

SEQ ID NO: 22803 - DNA, 556 bp, Homo sapiens
ttttctcatttgtaaatttggattaaagtgtttattatgataatcaattaagaaaatctcttaacacttcatacatacagagaacttatcattaagttaaaactggcaattaatgcacctttatatatatttttaaatgaaaactaatactattcatgatgtttattttatatcaaatatatgcccagggcatgctactttaaaaatccgaggaatctccaacaaggtgctggattaaaatcagatttygtgcttgaagtggaagaaaaatgaagttgtttatggataagagagtgagaatgtgtatcctcaagtacgttaagatgatttaactgaaagatggctttaggtttttcttgaagaattaggaaagtaccatccccacagattcagcatactcttcaggtactagataaaggtgaaggaagtcatggaattaaaatgacttagcaactccccagggaacttgtggggagaatgaggtggttagaaaggtgagaatgcacaaagacagctctgggttgggtaccaacagtttgcttggtagaaagaaacc

SEQ ID NO: 22804 - DNA, 399 bp, Homo sapiens
ttatctttctataagcataattgcrtactgaagtaattttaaaaaggcacatttaagttttagaatagaaaacagaaaaaaatatttctacctccctttttggtacaaagatgagaaggtgtctaaatattattgtctctgaaattattcattaaatgatcttcatattttaagttcaattcgcatattcctttatcattaagggaaggattagaaatgccgcccctcccctcctctctccaccttcaacccacgaattcctcactttctcattttctgattgcatattatgaaccacacactgtgtgaggtactgtagacataaaaaaacaaaagtcctgccctgaaggggcccatattttaatggggatgcagatgtgtaagtggattaattttaaa

SEQ ID NO: 22805 - DNA, 531 bp, Homo sapiens
gtttaaccaaatattttcagaattgtgaaggtttattttactttaattagagaatatttacagtttaacaaatatggctttgggacatgtaaataagacacacaataatttwaaaaaacccataaacagaggcaaaaataagtctgaaatcgcctaatttaaaaaaaaaagtggaaggatatgttatttcaggttttcacagacatgaaggactattgtttagatcataataaccagctaattttattcttcaccgaagaaaggacaagagggaaatgatttaaaaagaagaatagggcatttgtattagatactaaagaggatttctggatgcagaagtttatcaaatattggaattgagaggttagatggtctccaaaatgcctttaagcagatgtttgattctcgtgcgtctgggtatgcttagtgggggcagagggatctatctctagaaagagaaagaaactgcatcccctctgtgtggcctgtctgtaaattctatggggatatttttaaaaatgtgagtaatca

SEQ ID NO: 22806 - DNA, 531 bp, Homo sapiens
gtttaaccaaatattttcagaattgtgaaggtttattttactttaattagagaatatttacagtttaacaaatatggctttgggacatgtaaataagacacacaataattttaaaaaacccataaacagaggcaaaaataagtctgaaatcgcctaatttaaaaaaaaaagtggaaggatatgttatttcaggttttcacagacatgaaggactattgttyagatcataataaccagctaattttattcttcaccgaagaaaggacaagagggaaatgatttaaaaagaagaatagggcatttgtattagatactaaagaggatttctggatgcagaagtttatcaaatattggaattgagaggttagatggtctccaaaatgcctttaagcagatgtttgattctcgtgcgtctgggtatgcttagtgggggcagagggatctatctctagaaagagaaagaaactgcatcccctctgtgtggcctgtctgtaaattctatggggatatttttaaaaatgtgagtaatca

SEQ ID NO: 22807 - DNA, 584 bp, Homo sapiens
tttctggcccccaccgtatctttcctcctctatgatatactcaaaattacaaataagtgcaaaaagcctctttaaaaagagaaacgtggctctagaggaacattggtggcttgtcgtagagttagaataagtcaacttttccagcaatcagtgctcartggaatcccgtgattgaaactagagtccacgtacctattgggcaatatgacactcttagtgaattataaatttctccattcctggggcttactacattagacagtcatctttcctaggagccactgcattatatatatgtgctcatagtaagttgtatttcagagacagaaaatggatgaagagatttcaaaagaagtatgttttctttgataattgcaaaagatattaaaaaatagtctagaagtctaatttatgatgctgtttttttcatttgtgtagccattaacagtagagtaaattgtggaccagagggctacatgtttgtgtcttagattatcagaggtaaccttgcaatcgtatgccacgccattattttttgttagactgccatatgaatcaatgaattattccacccactatattgt

SEQ ID NO: 22808 - DNA, 541 bp, Homo sapiens
tcaaagagtgtgtgtgtagttaagtacaggagaagctgatagttaaagataaatacaatgcaccatataaagcaataagggccctagcagagataaaaagtcgtaaagaaactcagtgggggaactgtagaggctggaggggtcaggggcttgcccaggaaccatgtatgtttgrctctgcaatacagtaaatgactttttaaaatataattgattctctttcataattagttgtaattactaattacaactgtagttgatttaaagtctccaagcatgcatgaattcattaacacaacccacaggttttctgattaggaagaaccagaccccaaaattttgacccctgagtgcagtaaatgacaagaaaagatactttaggaaataaattaacataaaacatataaataccacaaataatatttgtacatttgtgaagactttttatgtcatattaagttatatgagtaaaagcataaatctaaatctctgaataaaactttttatcaatgtttctggttcctgaaactttaagtttaac

SEQ ID NO: 22809 - DNA, 612 bp, Homo sapiens
ttgattaactggactataggttttcaagccagatcagtgagatccctatagatgggacattttttgcatataaacaaaaacaataaccttatatctagaaaatgtagaaatgtgttatttttcttccccatataaatacaccatgggacagaaagggcaaataagcaggtatttacatttccctatatcagaagtgagtgataaacgagagktgaatggaataaaaaaaccgttgtgggaagtttcttttttaacataattttattcaacttatctttgctgaaaattaaattctttgaggagaagagcaggaattatgagtaaataacaatacataaaattagtgtctgtataaacagcatagatattataaaacctactagaggtaattatggtgtccgaacctctcatattctcaggatatgaagatattttagtgaattcaaaggcattccttttgaattacgggggttatgaggaatggaaagatccattgtttgtggtttagaatggtcataatacctagtgtagcatctttaacacactaggtgtttagtgtaaaatgaaaaataaaagtgtgacttatattcagaaacaattagctatttgaag

SEQ ID NO: 22810 - DNA, 635 bp, Homo sapiens
ccagctttcacttccttccctctacactctattctcaacactgcagttagagaaatccagttaaaatgagatttcaaaactatgaatgaagagttaagaaaaaagttagattgaatttctctaatactcatctaagactgtgctcttcaatactggccccatgtagctactgaactgtgaaattaatttttttattttaattatttaagtttaaaaattagatcattgtaaaatattttttctgttcaacacagctttactgatttgggaagaatacattttaatttaactgttgaaaagttgacattcmcattgaggtgtgctgtaagtgtaaaatacacagcagattttgactttgtgtcttagtctattcagactgctataataaaaatgccatagaccgatgtctcatagacaacagaaatttatttctcaccattatggagactgagaattctaaaattaaggtgtcagcagattgagagtcttgtgaggctccactttctggttcataaatggccctcttcttgctgtgtctttatgtacataaagggagaagaatgcacttgagcatcttttttatgaaggccctaatcccattcaagaggattttctctcataacctaatcatgacc

SEQ ID NO: 22811 - DNA, 1109 bp, Homo sapiens
atctcctcgtcgtcctcctcctccccgccctcctctgtcccctcggcctccttccgccggtggcccggcgtctcctcctgggagcgcttgtcctcggcgccggcttccccgtcctcctcctccgcgaacaggagcgcgttctgccgcgccctctccgcctcctccgcctctgcctccgcctcggccgcctcctcatcctcttcccccaccctctcctccccgccgcgtctctcctgctccgcctcctcctcctcccttgcactctctcgctcctccgccgyctcctgcagcccccgacccccgaggccgcgctgccgggccccgccctgcagcaaatactggagcagcaggtccgaggcgaggtcggccagccgctcttcctgcgccgcggcctgccgcgtggcctccgcctgccgccgcccggcctccacctgcgccagcccttgctggagaaggcgctcgcccgcctcggagccgcccaggagtgcgctctccggccggcgcgccttggggaacggggcggccacgccttggtacgccttggacaggggtgccaatgcctcgcctaggtgtgttttgggggaggacactccttccccgaacttgtgggtttcgggaaggggcccgctgtcgggcatacgcgcctggaattgagagggggccgggggcggcaggggcgcgcgctccgggacacgcgcctggaactctccccaggaagcgcgccatacgcgctctggccccgggctctccagattcactcgggtcagcgtgtgcgtgcgggtttccgtctctgctgccgccgtctcctgctggcgcttggcgctacttggactgaaatctcgcagttcctggagcagggacgctagcgcctcgagctcctcggagggatcgctcgcctcgggcccattctccggagtctgagggcgaggcggagccgcgggctccgggctctccggcgccgggaggctgtgggtctggctgcgcacggtctcggtcagcagagcttcagctgcttcttcctccggcccctgctgggagccgcttggtgccgggggtgaggcgggacggtcgagtgcctgcagcagcaccgcggccagcgcccggggatc

SEQ ID NO: 22812 - DNA, 596 bp, Homo sapiens
ctttttgagatagggtctcattctgtcacccaggctggagtgcagtgatgtgatcatggctcacttctgcctcaacctcctgggctaaagccatccttctaccttggtctccccaatagctgggactacaggcakgcaccaccacacctggctcatttttaattttttttgtagacatggggtctcactatgttgcacaggctgctgtcaaactccagggctcaagtgatcctcccacctcagcctcccaaggtgctgggattgtaggtatgagccactgcacccagcctattctctcctttcttatcttttgcttgtatttagaaacctttgcttttacagttgccctcagattacactccccttttccctactttctatgaactcttacaagtcctccaagatccatctctgttgttaccttcttggtgaagccttttcttattctctcctccaaacatccacactctttagagctaatgtattttatgtatgtattttttaatttatatggtatacgtgctgctgaagcgagcactagagctaatctctataaaggcactttgtaggttttattgcagtgtacctattttggt

SEQ ID NO: 22813 - DNA, 596 bp, Homo sapiens
ctttttgagatagggtctcattctgtcacccaggctggagtgcagtgatgtgatcatggctcacttctgcctcaacctcctgggctaaagccatccttctaccttggtctccccaatagctgggactacaggcaggcaccaccacacctggctcatttttaattttttttgtagacatggggtctcactatgttgcacaggctgctgtcaaactccagggctcaagtgatcctcccacctcagcctcccaaggtgctgggattgtaggtatgagccactgcacccagcctattctctcctttcttatcttttgcttgtatttagaaacctttgcttttacagttgccctcagattacactcccyttttccctactttctatgaactcttacaagtcctccaagatccatctctgttgttaccttcttggtgaagccttttcttattctctcctccaaacatccacactctttagagctaatgtattttatgtatgtattttttaatttatatggtatacgtgctgctgaagcgagcactagagctaatctctataaaggcactttgtaggttttattgcagtgtacctattttggt

SEQ ID NO: 22814 - DNA, 596 bp, Homo sapiens
ctttttgagatagggtctcattctgtcacccaggctggagtgcagtgatgtgatcatggctcacttctgcctcaacctcctgggctaaagccatccttctaccttggtctccccaatagctgggactacaggcaggcaccaccacacctggctcatttttaattttttttgtagacatggggtctcactatgttgcacaggctgctgtcaaactccagggctcaagtgatcctcccacctcagcctcccaaggtgctgggattgtaggtatgagccactgcacccagcctattctctcctttcttatcttttgcttgtatttagaaacctttgcttttacagttgccctcagattacactccccttttccctactttctatgaactcttacaagtcctccaagatccatctctgttgttaccttcttggtgaagccttttcttattctctcctccaaacatccacactytttagagctaatgtattttatgtatgtattttttaatttatatggtatacgtgctgctgaagcgagcactagagctaatctctataaaggcactttgtaggttttattgcagtgtacctattttggt

SEQ ID NO: 22815 - DNA, 557 bp, Homo sapiens
cagggggaggtaattgaatcatgggggccggtctttcccatgctatttttgtgatagtgaataagtctcaggagatctgatgggtttatcaggagtttctgcttttgtttctctctcattgtctcttgccgctgccatataagaagtaccttttgcctcccactgtgattctgaggcctccccagccatgtgcaactgtaagtccaakgaaacctctttttctcctcagttttgggtatgtctttatcagcagcgtgaaaatggactaatacgatcaccctcttctttgttctcctttctatttcatctctaattttttttggcatttggagggtgctatacattgcaaaagttggggactcactaattccactgctcactgtatatcaaggtaatctgtcaggggtttggttttatataagaaacaaatgagtccccagaacatacaagttaagattattcaatcaagggaggcagtcattaccctttaacctctgaaagaaaactgcaagtaggcatcaaactaaccctgagatgggagagagtagaagttccca

SEQ ID NO: 22816 - DNA, 557 bp, Homo sapiens
cagggggaggtaattgaatcatgggggccggtctttcccatgctatttttgtgatagtgaataagtctcaggagatctgatgggtttatcaggagtttctgcttttgtttctctctcattgtctcttgccgctgccatataagaagtaccttttgcctcccactgtgattctgaggcctccccagccatgtgcaactgtaagtccaatkaaacctctttttctcctcagttttgggtatgtctttatcagcagcgtgaaaatggactaatacgatcaccctcttctttgttctcctttctatttcatctctaattttttttggcatttggagggtgctatacattgcaaaagttggggactcactaattccactgctcactgtatatcaaggtaatctgtcaggggtttggttttatataagaaacaaatgagtccccagaacatacaagttaagattattcaatcaagggaggcagtcattaccctttaacctctgaaagaaaactgcaagtaggcatcaaactaaccctgagatgggagagagtagaagttccca

SEQ ID NO: 22817 - DNA, 557 bp, Homo sapiens
cagggggaggtaattgaatcatgggggccggtctttcccatgctatttttgtgatagtgaataagtctcaggagatctgatgggtttatcaggagtttctgcttttgtttctctctcattgtctcttgccgctgccatataagaagtaccttttgcctcccactgtgattctgaggcctccccagccatgtgcaactgtaagtccaatgaaacctctttttctcctcagttttgggtatgtctttatcagcagcgtgaaaatggactaatacratcaccctcttctttgttctcctttctatttcatctctaattttttttggcatttggagggtgctatacattgcaaaagttggggactcactaattccactgctcactgtatatcaaggtaatctgtcaggggtttggttttatataagaaacaaatgagtccccagaacatacaagttaagattattcaatcaagggaggcagtcattaccctttaacctctgaaagaaaactgcaagtaggcatcaaactaaccctgagatgggagagagtagaagttccca

SEQ ID NO: 22818 - DNA, 595 bp, Homo sapiens
tctagggaagaatctttccttcactcttctagcctctggtagcctcaggaattccttggcttggggcagtgtaactccgatctctgcctccgtcttcacatggctttccttctatgtctgtcagtacctctgtgccccctcctcttcctatgaagacacagtcattggatttagggccaacctcctagtatgacctcaacttamcataatcacatctgcaaggaccctacttccaaacaacgttgtattctgaagtcctaggtggacatgaattttgggggacactattcaatctactatggcattcaaccacgaaaagtaaacacagaaattgctgcctctactataggtatgttattttctctcttgcttaaacacacagagaagacacacagagagtgtactgcaaattatgtctctaatttctggttagtaataaaagtgacattgataattatagaattcttgagtgttttgggatctgactctccaagaaggagcagttttaatgttagaaaactatctttggcatgaccaagcaactatccattcggtccccaataatcctggggatgacagacccacagttaaacct

SEQ ID NO: 22819 - DNA, 523 bp, Homo sapiens
gcctgttatttctgaaattcttttaagagtggacataacattcatgttaagacttaaaatggaaattactctggacaagagaaatacttctctagactcaaattaagatataatttgttgacatgagatcctctctggggaaaaaaaagttttgatgggacaagaggtaaaagaagccagggaacaagtaaatgggcacagagaggtgaagcactgggcacacagyccactgatcacagctgccaaggctgggcccttgtgagaactctaaagcaccggctactcaggaagtcacattctggcatcttagagccctcagtgtaactcccaatttcataatctgcctaaattactttgattcaaaatcaattctttgggtggttatagatgggatggattgtgggtgccaaaacagtccttcaattcagtgaaagccttgattgtttgacattatgaggattaaatattgtggttattggctaatttctttcacatttaaagatgttgctgggacatcatgcag

SEQ ID NO: 22820 - DNA, 598 bp, Homo sapiens
tctgtcacccaggctggagtatagtggcacgatcttggctcactgcaacctccgactcctgggtttaagcgattctcctgcctcagcctcctgagtagctgggattacaagcgcacaccaccatgtcagcctaatttttgtatttttagtagagactgggtttcaccgtgttggtcaggctggtctcgaactcctgacctcaagcgatccacctgccttggcctttcaaagtgctgggattacaggtgtgagccacagcccccagccatttgttccytctttaataggtgaatgtatgcaactccttctgtttgaataaccaataacggcatttctcagttatggactgaatgtgaggacactgtgagaaggcagccatctaccaggccagaagagggccctcaccagcacctgagcatgctttgaagtcaggtggatgctggcaccctgctcttgggcttcctacctatattagtcctttctcacactgctatgaagaactgccggagtctgggtaatttataaagataagaagtttaattgactcaccgttctgcatggcttggaaggcctcaggaaacttacaatcatggcaaaa

SEQ ID NO: 22821 - DNA, 879 bp, Homo sapiens
tcccccttcagcctcccaagtagctgggactatgggactatcggtgtgagccactacaccttgctagttgttgtttcttccccccaatcccccacctcaccccatcccatagagactggggtctcactttgttgtccaggctggtcttgaactcctggcttcaagcaatccaccctcctcagcctcccaaagtgttgggattacaggcatgaactaccacacctggccaaggaggcttgtttaaaatgatgcatcgaggccaggtcatgcccataatcccaacattttggaaggccgaggtgggtggattgcttgagctcargagttctagaccagcctgggcaacatggcaaaaccccatctctaccttagccagttgtggtggttagcacctcccagctactcaggaggctgaggtgggaggatcgcttcagcccaggaggtcaaggctgcagtgagccaagattagcaccactgcactccagcctgggtgacagtgagaccctgtctcaaaatatataaaatgatgcatcctggatggtggtgaccacagagcctgacctcagccagtcagtgttgttatcagggtcctctcagaggcgtatgactcacatttaggtccaacagcacactttgtgataaatgacagcatcagcattgttcaaactactcaacagactgaaacagttggtcagatctgtaagatgagatttaactgagatacatgtcttcttccctttccattttgaatggagaagaaataaccccaaaacaccacaggtgaaaacaccttaggtgttgggatcgcctctgagcttatgtgagacaggacgccaaaaaaatggggtaatcataggctgcatgcatcctaaggatatt

SEQ ID NO: 22822 - DNA, 547 bp, Homo sapiens
aaggaatttgtacaagttagtccattttctgtaacttttatattctaataaaggaaaaccatatcttcatatttataaaaatgggattttactggtttgatcacaggggttgtgagaataatgaagaacaaaatgtggaaggcaaagaatgaagaccagatagtgagattagatttatcaacaaaaaagagtgcaagtggggtgggatggtgtaaataaagacagcagctggctaggtrtttgggggtttctgatgaggaaacctgagaaaactcactttatgtggacctggtatattcgcagtcgaacagaatattcgattattgttgcttcagagcttaatggaagcagaggtggaagaatgagtaaaccacagggactcaattcttctctctgtaggggtaacacatcgacactaggataggtgcttcatgttagcaaaatgcgatgcagtgcatgtcaaactgtggaagcaaaacaatcaagaaataaatttcttaagtattatttatttatttatcgttattatactttaagttttagggta

SEQ ID NO: 22823 - DNA, 629 bp, Homo sapiens
ctttataaatccatcagatcgcgtgagacttaytcactagcatgagaacagtatgggaaagatccgccttcatgatccaattacctcccatcagctccctcccatgacacgtgggaattgtgggagctacaattcaagatgagatttgggtggggacacagccacaccatatcatgggtgtctcactatgttacccaggctgatctcgaactcctggactcaagcaatcctcctgcccaggtgccaggcctctctgttgtttagtgtggggaaagagccaagaggttggataatgtatgcagaatacatgttttctgaatgactaaacctgaatcttctatttgctccacagcccagtctttcctgcctgtttccccttcctcaatcattgtccccccaaaatccaggagaaggccaggaggagcactctctacaggtggacttcccatgttcagcttctctaccgtgttgcatggaaaaagcagactaactgaacttgttttcctgctgtgaaaggaacctcaggggtgcctgagtccccagtgaagtctgaattcccgataagatgaaatgccaggctgccaaaagcccagagctcgctgctggctgccggctgccttgtgaggcct

SEQ ID NO: 22824 - DNA, 723 bp, Homo sapiens
gcacacacatgtctgtgcacggtggggtgggggggtgtcaggtccatggtggggcacacgtgggtaccggaccctcactgtggtcccacgcacatgcacagagaccccaccccgactgtcctctccaccctggcccccctggtggccttgttccctgcaggctatgactgccagatgtcccccagctgcaccccaccctcttcacatccccccagacaggcccaaagccagatgggcaaacccaggcccctggcagaccctccctctcaggcccactaccccacttttcagccagcgcaacaaggaggggtgaccaggacccccttcccctcacccagagttctgccatccttggtgacataagtctcccaggattaagcctttccctgctctgcagagaaggtgcctcccagctccwgtcacctcacaggccacagcttcgtgccccagcctgctggagcaggaaggtattgatttcctttctgcaaaagaacatggagtcaaggggcaggccccttgcacattcttccctcccgccccatgtgacccggagcccctgagacctggcaccacccagcaggtccccaggccctaaaagccattccaataaatccacgtgtctttatccctgagccagggcagcctttgtggagaagaaatgtatctccagggcacccccacccacggtcactgaattcccccgtgagagggactccggaggga

SEQ ID NO: 22825 - DNA, 686 bp, Homo sapiens
tattataataatataagatagggctgggcgcrgtggctcacacccataatcccagcactttgggaggccgaggtgggaggatcgcttgagcccaggagttccagaccagcctgtgaaaccccatctctacaaaaatacaaaaagatcagtgaggcatgtggtgcatgcctgtagtctcagctactcaggaggccgatgtgggaggatcgcttgagcccaggagcaggaggctgctgtgagttataattgcaccagtacactccagcctggaccgtggggagagaccctgtctctggggggtaaaaaaaaaagagtataaaatgtattggagacatatttatttttgtgttatcgtctatgtttggcaagcactgctggctgcccataaattatggctataaaatttccttttataatccgtttgtttaaggcggggtcaggaatggcacattggtgccagttggaaccctttgcatgcagtcaggggtccaggtgggctgagcccggcctgtgcctgctcactggccacacgccctggtgctgggccgggccacccagaggatggggcatctttttctatgcacaaaggcaccgcctgctcactaaaattcctaagggtagaatttgacacccagcctcctttctgaggacccaggagcaaactgcgtcttccacatcctcctcct

SEQ ID NO: 22826 - DNA, 686 bp, Homo sapiens
tattataataatataagatagggctgggcgcagtggctcacacccataatcccagcactttgggaggccgaggtgggaggatcgcttgagcccaggagttccagaccagcctgtgaaaccccatctctacaaaaatacaaaaagatcagtgaggcatgtggtgcatgcctgtagtctcagctactcaggaggcygatgtgggaggatcgcttgagcccaggagcaggaggctgctgtgagttataattgcaccagtacactccagcctggaccgtggggagagaccctgtctctggggggtaaaaaaaaaagagtataaaatgtattggagacatatttatttttgtgttatcgtctatgtttggcaagcactgctggctgcccataaattatggctataaaatttccttttataatccgtttgtttaaggcggggtcaggaatggcacattggtgccagttggaaccctttgcatgcagtcaggggtccaggtgggctgagcccggcctgtgcctgctcactggccacacgccctggtgctgggccgggccacccagaggatggggcatctttttctatgcacaaaggcaccgcctgctcactaaaattcctaagggtagaatttgacacccagcctcctttctgaggacccaggagcaaactgcgtcttccacatcctcctcct

SEQ ID NO: 22827 - DNA, 569 bp, Homo sapiens
aatgggaaggaaggaacatctgggctgggtttcaaagggtgagtaggagtctgacaaacaggagaggaaggacacatcctggggagagcaagaacaaggcctgagcatgggcaacttacatggcttttttttaaattattttttgtctgtttcaggatttgtgtgcagggcaggaccatcttgccggaagcgtgctgttaccatggcacccaacacggcatctggtgttacgtgaacatcctcctctgactgcgaacagatgggtggattgtttttccagaaggatgagctctatttcatgatgaaaatcacccaggtgtttttgcacaaatcataggtttagtcccccagatgcgttttttactgaagtctctggctgygttcctcacagcccagaggcctgatgtgctctctgtctgcattcagccaccgtctgggtgtgggactcagagtgagcctcagcccaagtaccgccaccccatgtggagtgaggagattgcactagaccggtggtgtttctcaaacttggaccactggtgtttctcaaacttggaccactggtgtttctc

SEQ ID NO: 22828 - DNA, 1450 bp, Homo sapiens
tctcttctctctctctccttcggccactttggtcttcgttcagttcctgaaatatgccaagttcctccctcctccccatatggccttggcaatgttgttcccctttcctagaatgccttttcccacccgaacttaacattttacctcaaccatcaggagccttctccaaccccctctgcccacaaggctggatctgggcccctgctacacactctcatagccccatctacctttactttgtgaaatcctcacggtctgtaattctatttgtggtatcatttgatttttttaaatgtgtttctcttattacaccctaagctctcccggggccaaggctgtgagtctcgctcactctgaatccccagtgcctcgtgggcagagtgagtaaagagcttggcacaacgttggtgagtgagtgaatgaatggcacctgccctgcgtctggaacctcctttttccacttcccagtcctcaggcctgactgggtgccccctctccacagtggaggaaggccacgagggcctcacgcacttcctgatgaacgaggtcatcaagctgcagcagcagatgaaggccaaggacctgcaacgctgcgagctgctggccaggttgcggcagctggaggatgagaagaagcagatgacgctgacgcgcgtggagctgctaaccttccaggagcggtactacaagatgaaggaagagcgggacagctacaatgacgagctggtcaaggtgaaggacgacaactacaacttagccatgcgctacgcacagctcagtgaggagaagaacatggcggtcatgaggagccgagacctccaactcgaggtgaggggtgcccaagggctactccgccagggtgacccgggggaaacaaatgtcaccagggctcaattctcccataaagcaggtgcaggcacatgcacgtggtctgccggagcttcctgccagccaggtgtgggggaatggaggacacagggcctctgggagttctaggtccactatgcacctgcacgtgtacccatagtgcttagcgctaccgggtaagcggcctacatcccctgtgcgcatgggcagacatgcgcacaaggaccgacccagtgcgcagctttccaccaccggctcagtcccagatccaccttgcacatgcgcaygcagacccagaatggctcactccgcaaatgaattaaggagatttacatcttcttttttcttttcttttattttcctttccttcttttctttctttctttttcttttcttttttttttttttttttttttttttttttgagacagggtcttccactgcccaggctgcagtggtgtgatcatggctcactgaagccttgacctcctagactcaagtgatcctcctgtctcagcctccaaagtagctgggactacaggtgcccaccatcacgccaggctattctttcaatttttttgta

SEQ ID NO: 22829 - DNA, 1450 bp, Homo sapiens
tctcttctctctctctccttcggccactttggtcttcgttcagttcctgaaatatgccaagttcctccctcctccccatatggccttggcaatgttgttcccctttcctagaatgccttttcccacccgaacttaacattttacctcaaccatcaggagccttctccaaccccctctgcccacaaggctggatctgggcccctgctacacactctcatagccccatctacctttactttgtgaaatcctcacggtctgtaattctatttgtggtatcatttgatttttttaaatgtgtttctcttattacaccctaagctctcccggggccaaggctgtgagtctcgctcactctgaatccccagtgcctcgtgggcagagtgagtaaagagcttggcacaacgttggtgagtgagtgaatgaatggcacctgccctgcgtctggaacctcctttttccacttcccagtcctcaggcctgactgggtgccccctctccacagtggaggaaggccacgagggcctcacgcacttcctgatgaacgaggtcatcaagctgcagcagcagatgaaggccaaggacctgcaacgctgcgagctgctggccaggttgcggcagctggaggatgagaagaagcagatgacgctgacgcgcgtggagctgctaaccttccaggagcggtactacaagatgaaggaagagcgggacagctacaatgacgagctggtcaaggtgaaggacgacaactacaacttagccatgcgctacgcacagctcagtgaggagaagaacatggcggtcatgaggagccgagacctccaactcgaggtgaggggtgcccaagggctactccgccagggtgacccgggggaaacaaatgtcaccagggctcaattctcccataaagcaggtgcaggcacatgcacgtggtctgccggagcttcctgccagccaggtgtgggggaatggaggacacagggcctctgggagttctaggtccactatgcacctgcacgtgtacccatagtgcttagcgctaccgggtaagcggcctacatcccctgtgcgcatgggcagacatgcgcacaaggaccgacccagtgcgcagctttccaccaccggctcagtcccagatccaccttgcacatgcgcatgcagacccagaatggctcactccgcaaatgaattaaggagatttacatcttcttttttcttttcttttattttcctttccttcttttctttctttctttttcttttcttttytttttttttttttttttttttttttgagacagggtcttccactgcccaggctgcagtggtgtgatcatggctcactgaagccttgacctcctagactcaagtgatcctcctgtctcagcctccaaagtagctgggactacaggtgcccaccatcacgccaggctattctttcaatttttttgta

SEQ ID NO: 22830 - DNA, 527 bp, Homo sapiens
aaaagcacgaaaagtttactttttttataaagccaattaactaacacagatggtcacctaaattaccaaatacatttataataaacagatagtgctgttaactcctcttatttgagaactagttattgtttatcatgagaagacatatacaattgacacttctgcttggttacataaaagagtatgatttatatttatctttgtaacttctcaagcagattgcctgtaatatgcgtctcattctgttttaatgcttattcaataataattgttttcttcttttataaccttgtggagaggttttctgggctgggaagtgattttgctaattatatttccccagtagtaccaaattacatcttaattgaactgctattaagtatataaaaaaataaggagtgagatattcttagagaagctaaaatgtataaaataaaatttctattgacagccagctagagtatgtttaactaccgatgaaactaaacaattgtagtgyagccagaaatgctatttcttaatattta

SEQ ID NO: 22831 - DNA, 705 bp, Homo sapiens
ttcctggggccactacctgctccttctgtggcctgcgcctgtggccctggaggcaggtgcccctcagtagccttggggttacctatgtggccttgcctttgatggrgtatgctagggagcctcttgggcccctcccctccataccgttgggcaggagctactccctcggggtgggtggcagggtctagcagggccatgtgagggtgtggggggagccttcccaagctggcaccccggtggctcccagcacatcctgagtctgccgttctctgctgggggtgggttggtcgtcatgtgtccagtgatgctttcaggaggggcctccaagccctggccctgtccaggtgggtgccctcctaagggctggagggctgagtctggcttgaggtggccgtgcctggggcccctgacattcagtccacccatgtggggacactgggctggcaggtctgacacagagctgcagagcatgctcggtcagtcccaggatagacaggtgacatggggtcggggtcagggtttggggttgagggctcttgactcgatatgggctgggctgggccagggcggggtgtgagggaagccttgtgaagtgagcccagcagcagcagcaggtgagccagcagccagctggggggagggggcacccagtggggtggagccgggttcctggagcagttgaggttggggatgcgtcctcagtgc

SEQ ID NO: 22832 - DNA, 623 bp, Homo sapiens
caataatatcaggattcaagcatcaagggactaatcatgttgactgggcctttaaaatccttctctgtcccaagatactatgtttgtgtttttgtgagaggttgccttctcttctcaccatcttcataagtcaagtagctatcccccaaatttcccttatctccctcaatcatctgtgctacagctattccttatggaattatttgccctctctagagcacatttatactctcaacctgtgtcatctttcaataaattttcaaattcctctgcttccaagcagaagttcttttcataygtcttatctcaaactatgttatttgagattttgaaagggttactcataattctattattccagcaataacgactatattaacataatattcttccctacatcataagtggtgctcacaaattctcttggccctcatatttcctgactagaaattctaatattgtcttccctgatatgaataatttttatctgaatattttctaggccccttatactttctttgagatgtgacaactagaactatgtgctgcattccaggtgtggctacccactgtttcatatgtaatagatgtgttttactttccatatgataatcagcattaca

SEQ ID NO: 22833 - DNA, 560 bp, Homo sapiens
ttctaatcaggagaagcaaatacgtttcgatgtgccaattagttaaagaggtcagggagacgtgtctctgaataataacggttagcatttattggggactttctatgtgccagacactgttcttaatgtcctctactaagtaactcttttccacccacaatatgagatgagtacactatcatccttattttgcagatcaagtgcacggtacacagagggttaagtaactcatccaaagtgacacaggttatgaatggtgagtcagaggctcaacctggggacctttggtcttaaccatcacattgggctccyttgctcgctgtgaatgattggcagtggagagcaggcttagaacacagcacctcaatcatatgggctccagttccagaggagttgctcacaccacatcttttcacagttcctctctctgttcctttagctaggaggctggaggcaggcagccaagtgggctgagagtgactctcacctcacctgggtacagttacctgtttgtacatcattttcttttctttcctttttccttccttccttccttcctt

SEQ ID NO: 22834 - DNA, 560 bp, Homo sapiens
ttctaatcaggagaagcaaatacgtttcgatgtgccaattagttaaagaggtcagggagacgtgtctctgaataataacggttagcatttattggggactttctatgtgccagacactgttcttaatgtcctctactaagtaactcttttccacccacaatatgagatgagtacactatcatccttattttgcagatcaagtgcacggtacacagagggttaagtaactcatccaaagtgacacaggttatgaatggtgagtcagaggctcaacctggggacctttggtcttaaccatcacattgggctcctttgctcgctgtgaatgattggcagtggagagcaggcwtagaacacagcacctcaatcatatgggctccagttccagaggagttgctcacaccacatcttttcacagttcctctctctgttcctttagctaggaggctggaggcaggcagccaagtgggctgagagtgactctcacctcacctgggtacagttacctgtttgtacatcattttcttttctttcctttttccttccttccttccttcctt

SEQ ID NO: 22835 - DNA, 560 bp, Homo sapiens
gccttggggtgcaaggaaagattttcagacgataatagcagaaagtatttttagtatccccgatttcgaccgtttctgtttccacttgcctgtgtatcagaaattgcatcgggcagagccaacagagactggaagttacaattgcttaatgaaaaagcaatgtattcatttatttttctaaagaaatagaagcatggaggtagtagttctgggctggctggaagtttgttctgttttccttttctaccatccttcctgcatggctcccatcttcaaggctcccccgatctctggccaaccctgagcctgagctagcatacactcttgagaacaggctggcttcagggtgaaatattcttggatccgttatctgattatgttaccctttcatcccacttcctcattcctacttttctctagctttgcttatctttctctgtgaaaggaggcacttttgcctaatccttatttatttatttatttatttatttatttatttatttatttatttttgagacagagtctcactctgttgcrcaggctggagtgcagtggtgcaa

SEQ ID NO: 22836 - DNA, 1147 bp, Homo sapiens
agcccactcggccagggcctgctgggtgtgtacagagacataggttgacggttgacacatcaaccatgtgtctctctactctcctcagtctgaattccaaaccatgacacagcttttcgttcctcatccacaatcaccccccaggttcaggccctgctcagaggggccagaaatggggtcaggtctgattcgggaggctagcctctccagaatccccttgtgagaggggttactctttcatctcaggatatccactggtcacccactgtggggatgattagaagcaaggtcaccaccagggatttcaaagtaccccaactacccttgaaagaaggctatccttggttagtccaaggtgaggagggaccagggggtggggggttgctggtttctcagcatcctcaacattttttgataagagtaactgacaccttctgcatctcgttgaggtgctctgcaaatgcggtcggtagccacgctagtcactcccgcttccactcaaattacagccctaaattccacttggattcagattctgaggttgtcactcttcccaggtgaattcttgtcctcaccttccctgtgacattagtggcaatgccccttattatcaaactccagaatatcaagttttggccccaggaggctacccctggattctaactcattgtattttgtctcccaaagcattttctacatttaaaactttttttgtctgacatgtattaatttctcactcatcaacaacattttgttctaatatgtattatctttttataatacttaccttacagtaagatttccagaattgccagaaatgcaaatatttgttgcatgtttacttgttctgctgamttctgacccccattaggatggcaagcaagtgcattttgtccattgctggatctttaattccttgaatattgtttacagcatagcttttgttcaataaatatttgtccgataaattagaaaataaataaatgacattctaatttcaccacagaagaaatggctttttaatggaaaccacatcacacaatttaagggcagtctactgatggaggcaggagaacatgtttctgttctggagagctgcagatgttgcagcaaacacatgaagcagcccttatgtggttactggatc

SEQ ID NO: 22837 - DNA, 653 bp, Homo sapiens
tgcatttttttgttatttatatttcaaaacagctgtgagaacaatggctgagtactgcccgtgatgatatttcaggccaatgagatttactccccacccacttggagaggtagaaaagaaaaagatgatacaaactcatatgatgtagaacayagagaataatcatctgcttcaggaatcatcaggccaggggaaaatgacaacatgctttttttgttttgttaaataaccaaacaaatgaattttattagcaatagcaaccttggctgtgggcatttctgaggaattaatgagcaattgacatttacagcccaaggcaaaattcttccagcctttcagaaatccccaggaaatgccctaggcgggccttgatcatgattgctcaattattattacttctctactgggaaacatgctttccatgttcactaatactccacggttcctcccctgcctgttcgaggcacaaggaagattgtacttgtcagctttcatgtaattagttggggccattttttttggctaatgacatggaaatagaaatgtcattatcatttctggagtgaattagtgaaaggtccaagcacaagtctccagtcatccttgtgatttgccagggctactgctgagcttcagataggggagccacaaga

SEQ ID NO: 22838 - DNA, 595 bp, Homo sapiens
aaatttggaataaaaatctataagatttgggctgggtgcagtggctcatgcctgcaatcccagcactttggaaggccgaagtggaaggctcactttagcccaggagttcaagaccaggctggggcatcgtagtgagaccccatctccacagaaaatttaaaaatcagcctggcrtagtggtacacacctgtagtctcagctgctcaggaggctgagttggaagtattacttgagcctaagagtttgaggctgcaatgagctataatcaggcctgtgcactccagtctgggcaacagagtggatttggtaactttttggactgaaaggtgaggtgagttggaagcagggaggtgaaatacacagaggaccccagcttggaagccttgagggcttgcaatgttcttactattaataatttttatttttatttttaaaatttattttaagaaataaattatttcatgattattattctatgtagtcagtcttcttcccaccaaagacaaaaagttagatatgcctggaagttagaaatttaaatagatcccagctgcagatgaaattgggatcagaaaatgaggggaatgggaagaaa

SEQ ID NO: 22839 - DNA, 552 bp, Homo sapiens
acaacccctagtcacccatcttatgtttgattttaattctttacctgacccttatatttttttcttttgatttactcctcataaacccttcttgatgtaagctgcacaagagctggggcctggccacccacattgaccaccatgtctctagggctttgaagatacctggcacatgggaagcttcattaaatacacattagaaaacatagaagcacatgtacaaacaagaccacatcaatcattcagtagcaactcagagcgtcgtgctctcttgtctttgtmggaagtcttgagggggcgttcatcccccttcttaggaagatgtgaaagtattcccgggccacccaaacagtttaagcattgtatcttggcaacagactgtcatgtatcgatagacacacaagtaaagctttgaaatctttctctaaacttgtgaatgaagcaccaaataccatggacagagcagcagttgacctctcaggtggcccacactcttgggcctcactgcatggccacccatgttatcgatcagttgatcacatactggcacat

SEQ ID NO: 22840 - DNA, 630 bp, Homo sapiens
ttatcagtaattttttactacgtttctgggttctgggaggagggtgttacagaatgctgagctgggaagcttcaatcatgagattttaatatttatcaatgaagggtttaaaaagatggagaatgagttaaaggaattaactgccacagagaaaaataaagtggtcccttgkcctacatcttggaatctctattgcgataattgctatgtgtgtggcaacttcctggaggttacttattaaaaatgtaccctgaagtaattcatatgtgtcatgctaatgccctgtccacttcttactaaaatgtatgggttaaaattaacagtaatacttttgtctggatactgaatccaactaagtagaaattactcatttctaagttgtaatgtattgtatataaatgtaacattgttataatacaattatatgtatacaatgtaaaaatgtaatatattgtgtatatgtacaaatgtacatttgttgtgaaatattgtgcaatataattgtaatattttcaagccctatatgaaaaagctgttatttgcatgactgtatcctatgaatagttatggaaatgaataaataagctttttagaaacagtttacagagtcataaacacttaaatatttgc

SEQ ID NO: 22841 - DNA, 630 bp, Homo sapiens
ttatcagtaattttttactacgtttctgggttctgggaggagggtgttacagaatgctgagctgggaagcttcaatcatgagattttaatatttatcaatgaagggtttaaaaagatggagaatgagttaaaggaattaactgccacagagaaaaataaagtggtcccttgtcctacatcttggaatctctattgcgataattgctatgtgtgtggcaacttcctggaggttacttattaaaaatgtaccctgaagtaattcatatgtgtcatgctaatgcyctgtccacttcttactaaaatgtatgggttaaaattaacagtaatacttttgtctggatactgaatccaactaagtagaaattactcatttctaagttgtaatgtattgtatataaatgtaacattgttataatacaattatatgtatacaatgtaaaaatgtaatatattgtgtatatgtacaaatgtacatttgttgtgaaatattgtgcaatataattgtaatattttcaagccctatatgaaaaagctgttatttgcatgactgtatcctatgaatagttatggaaatgaataaataagctttttagaaacagtttacagagtcataaacacttaaatatttgc

SEQ ID NO: 22842 - DNA, 1030 bp, Homo sapiens
ggtcgttaatctaaaaaaagactgcaaaatcgctctggccacgagtcacagctgagggtgccactcaccgccagcaagccagggcttttcatcagtagtttgctttcattttctgccgtctcaggaccaacactcttgagctctggggaaggtcaaaggcagaacatggtggggtggcctccatgccacagagcaaggaggctggagtgccacccccatcacgccaaggtccagactgcagacctcaaacagaattmctgccatgaggaccaccctgattcctcagtccactgccacctcctgcctcactcttcggtgctcctggagaaaccagaggctcagagagggcatggattcaccccagcacacacagcaagttgctgattcctgactcagagctcctcctcgatgctgccacttagagttgaggtggtgggagctgctggagccgttctgggactatctggaagcacagcccatacatccaggagtctagggggattttttttttttttgtaacagcattattgggatagaattcccaagccatacaattcatccatttaaagcagggatgtccaatcttttggcttccccgggccacactggaagaagaattgtcttgggccacacctaaaatacactaacactaatgatagctgataagctaaacacaaacaaacaaaaaaactgtcgcaaaaaaagtctcataatgtcttcagaaagtttacgagtttgcgttggattgcattcagggccgttctgggccacgtgtggcccatgagcctcgagttggacaagcttgatttgaagtgtacaattcaataaactatcgaacttttgtatattcagagttgtaaagccaccaccaaaatcaattttagaacagtttcatctccccagaaagcaaccctgtactcattggcagtcactcctcacttccttccccatcccagctcctcgtaaataatctactttctggccaggcagggtggctcacgcctgtgatcccagcactttgggaggccga

SEQ ID NO: 22843 - DNA, 1030 bp, Homo sapiens
ggtcgttaatctaaaaaaagactgcaaaatcgctctggccacgagtcacagctgagggtgccactcaccgccagcaagccagggcttttcatcagtagtttgctttcattttctgccgtctcaggaccaacactcttgagctctggggaaggtcaaaggcagaacatggtggggtggcctccatgccacagagcaaggaggctggagtgccacccccatcacgccaaggtccagactgcagacctcaaacagaattactgccatgaggaccaccctgattcctcagtccactgccacctcctgcctcactcttcggtgctcctggagaaaccagaggctcagagagggcatggattcaccccagcacacacagcaagttgctgattcctgactcagagctcctcctcgatgctgccacttagagttgaggtggtgggagctgctggagccgttctgggactatctggaagcacagcccatacatccaggagtctagggggattttttttttttttgtaacagcattattgggatagaattcccaagccatacaattcatccatttaaagcagggatgtccaatcttttggcttccccgggccacactggaagaagaattgtcttgggccacacctaaaatacactaacactaatgatagctgataagctaaacacaaacaaacaaaaaaactgtcgcaaaaaaagtctcataatgtcttcagaaagtttacgagtttgcgytggattgcattcagggccgttctgggccacgtgtggcccatgagcctcgagttggacaagcttgatttgaagtgtacaattcaataaactatcgaacttttgtatattcagagttgtaaagccaccaccaaaatcaattttagaacagtttcatctccccagaaagcaaccctgtactcattggcagtcactcctcacttccttccccatcccagctcctcgtaaataatctactttctggccaggcagggtggctcacgcctgtgatcccagcactttgggaggccga

SEQ ID NO: 22844 - DNA, 1030 bp, Homo sapiens
ggtcgttaatctaaaaaaagactgcaaaatcgctctggccacgagtcacagctgagggtgccactcaccgccagcaagccagggcttttcatcagtagtttgctttcattttctgccgtctcaggaccaacactcttgagctctggggaaggtcaaaggcagaacatggtggggtggcctccatgccacagagcaaggaggctggagtgccacccccatcacgccaaggtccagactgcagacctcaaacagaattactgccatgaggaccaccctgattcctcagtccactgccacctcctgcctcactcttcggtgctcctggagaaaccagaggctcagagagggcatggattcaccccagcacacacagcaagttgctgattcctgactcagagctcctcctcgatgctgccacttagagttgaggtggtgggagctgctggagccgttctgggactatctggaagcacagcccatacatccaggagtctagggggattttttttttttttgtaacagcattattgggatagaattcccaagccatacaattcatccatttaaagcagggatgtccaatcttttggcttccccgggccacactggaagaagaattgtcttgggccacacctaaaatacactaacactaatgatagctgataagctaaacacaaacaaacaaaaaaactgtcgcaaaaaaagtctcataatgtcttcagaaagtttacgagtttgcgttggattgcattcagggccgttctgggccacgtgtggcccaygagcctcgagttggacaagcttgatttgaagtgtacaattcaataaactatcgaacttttgtatattcagagttgtaaagccaccaccaaaatcaattttagaacagtttcatctccccagaaagcaaccctgtactcattggcagtcactcctcacttccttccccatcccagctcctcgtaaataatctactttctggccaggcagggtggctcacgcctgtgatcccagcactttgggaggccga

SEQ ID NO: 22845 - DNA, 1030 bp, Homo sapiens
ggtcgttaatctaaaaaaagactgcaaaatcgctctggccacgagtcacagctgagggtgccactcaccgccagcaagccagggcttttcatcagtagtttgctttcattttctgccgtctcaggaccaacactcttgagctctggggaaggtcaaaggcagaacatggtggggtggcctccatgccacagagcaaggaggctggagtgccacccccatcacgccaaggtccagactgcagacctcaaacagaattactgccatgaggaccaccctgattcctcagtccactgccacctcctgcctcactcttcggtgctcctggagaaaccagaggctcagagagggcatggattcaccccagcacacacagcaagttgctgattcctgactcagagctcctcctcgatgctgccacttagagttgaggtggtgggagctgctggagccgttctgggactatctggaagcacagcccatacatccaggagtctagggggattttttttttttttgtaacagcattattgggatagaattcccaagccatacaattcatccatttaaagcagggatgtccaatcttttggcttccccgggccacactggaagaagaattgtcttgggccacacctaaaatacactaacactaatgatagctgataagctaaacacaaacaaacaaaaaaactgtcgcaaaaaaagtctcataatgtcttcagaaagtttacgagtttgcgttggattgcattcagggccgttctgggccacgtgtggcccatgagccwcgagttggacaagcttgatttgaagtgtacaattcaataaactatcgaacttttgtatattcagagttgtaaagccaccaccaaaatcaattttagaacagtttcatctccccagaaagcaaccctgtactcattggcagtcactcctcacttccttccccatcccagctcctcgtaaataatctactttctggccaggcagggtggctcacgcctgtgatcccagcactttgggaggccga

SEQ ID NO: 22846 - DNA, 746 bp, Homo sapiens
ttcaccagccagaccacaaacgtggttggagaaacacagctgtctgtaaaccactatagatgggaaattcctctggagaaaaagagaaaaaaagaaagaaattcttcctgaagaaaccatgaaaatttctcatttggctcagttgagtttccttcctcctatgagttttggttacaggtccatagtaattcttcagcccattcagaagtctttaacataactgtgattggccgggcgtggtggctcacacctgtaatcccagcactttgggaggccaaggcgggcggatcagggggtcaggagatcgagaccatcctggctaacactgtgaaaccccgtctctactaaaaatacaaaaaattagccaggtgcagtggtgggcacctgtagtcccagttactcaggaggctgaggcaggagaatggcatgaacccaggaggcggagcttgcagtgagccaagatagtgccactgcagtccggcctgggcgaagagcgagactccgtctcaaaaaaaaaaaaaamtgtggttgtgtttttggtttggattttaagtttgtttttttagagacagagtctgctctgtcatccaggctggagtgcagtgacattatcatagctgtttacagccttgaactcctgggttcaagcaattcccccacttcagtctcccgattaggagaccacaggcacatgccaccatgcctggaaaagtgtttttggtttcttgttttgttttgtagagatg

SEQ ID NO: 22847 - DNA, 735 bp, Homo sapiens
atgtcgttatgtggcatgtgactgtactcaccagaaacatctggagttcttggactgattatgatgagttccagcacctctcaagatgctctcagcctcagacctctgccagcccctccctggtggagaagccttctgggcttcaagcaccttgctcaggatgcgtgtccccttctgaaagttttagggttaagtgactcttctagctgtgtgcctgagggtcctggacatctcaggagtggggagttggcagctgaagaattcctgggagtctgagcctgggctgagtttgggatcggctcctgaaaacccttgtaaagattttacattcccgaatataaaccaataaagacagcaggctaaatcaaggccatgcccatgtcttgggcacattccgaagatggttgtggtgagtcccgcaccattaattcccttttgcgtctcattcctgcctctctggaaacaagcaggtccatgagatgcagttcagtgggttttgctgtggttcagtggggtttccctccctagacaccccaggagtgcaggtctaaggtttggaaatactttcctttctacatatgtctatacatgatccatcttaatgaattgcacatttcgtgtttgtgaattcrcctccttgataaaattgatgggtaacccctaaatcaataacttgcagcggtcattcatggatatggggcacagtagcaaaaactttgagtcaccagacatgca

SEQ ID NO: 22848 - DNA, 735 bp, Homo sapiens
atgtcgttatgtggcatgtgactgtactcaccagaaacatctggagttcttggactgattatgatgagttccagcacctctcaagatgctctcagcctcagacctctgccagcccctccctggtggagaagccttctgggcttcaagcaccttgctcaggatgcgtgtccccttctgaaagttttagggttaagtgactcttctagctgtgtgcctgagggtcctggacatctcaggagtggggagttggcagctgaagaattcctgggagtctgagcctgggctgagtttgggatcggctcctgaaaacccttgtaaagattttacattcccgaatataaaccaataaagacagcaggctaaatcaaggccatgcccatgtcttgggcacattccgaagatggttgtggtgagtcccgcaccattaattcccttttgcgtctcattcctgcctctctggaaacaagcaggtccatgagatgcagttcagtgggttttgctgtggttcagtggggtttccctccctagacaccccaggagtgcaggtctaaggtttggaaatactttcctttctacatatgtctatacatgatccatcttaatgaattgcacatttcgtgtttgtgaattcacctccttgataaaattgatgggtaaccccyaaatcaataacttgcagcggtcattcatggatatggggcacagtagcaaaaactttgagtcaccagacatgca

SEQ ID NO: 22849 - DNA, 1330 bp, Homo sapiens
tgggccctgtgtatacatgggctgtgtgtgtgcatagtgagtacatgtacatgggctgcgtgtgcagctccaaaatcttccgccctttcttccggattcaccagacacctcctccaggaagcgttccctggtctttccagagatggaagccaggctccctagaaaaatctagttcaaaactatgcttgaaggccgggtgcggtggctgacgcctataatcccagcactttgggaggctggggcaggcagatcacctgagttgaagaccagcctggccaacaggacgaaaccttgtctctactaaaattacaaaaattatctgagcatggtgccacatgcctgtaatcccagctactcaggaggctgaggcgggggaatcacttgaatctgggaggcgaaagttgcagtgagccgagatcgcaccactgcactccagcctgggcgacagagcaagactcagtctcaaacaacaacaacaacaaacaacaacaacaacaaaaaccagctatgctcaagaaaaatacacacggaatatattgccccttccaaagcctttgaggtcatttggcccaatcccctcttgttctaatggggaaactgaggttccaagaagggattgggctttctatactaacaggtcccagactcagaaactcctgccaagctggaggctaaggcccctcagggactggcaggtgctgtggagaacacaggaccggggccggagttgggctggagctgggctggagccccactgtcagggggsacccaggaaaggggctgttccactgcagcctgggagggtggctggattgggagccccctcatctgacccagtgtgggtgggtggctcagcccatgggagtctcagctcacagggtctagggacgcatgcccccctcttgttgccatgctccccaagcggctgtccaatctcttcttgggcacttacaggaacgggcactccctccttcccggggctgcctggctctgtgctgaaagctcattctctaaggggcgggagctgctctacatggtgtccgcccagtgactttgggtcccaaggtggggcccatctgctgcctcctccttctcagggtgagctgcccagtccctctgtggctccccagggcccagcctgcctgctgcccccagaaccttctccagctcatctaccattgtgaagaatagagcctgggcctcatatacgcagttactcctgttacatgcctttgttgtgatttcttctctcatcagtgatgcaccttcctcccaggccccagaactgggtgttggggcaaggtctgtggggtcccctctcgcctctgtt

SEQ ID NO: 22850 - DNA, 1314 bp, Homo sapiens
gaactgcacccggctcagtgacatgagtgagcgactgaccacactggaggccaaggtcagtcgggctggggagtctgggcctggggagctgcctggggaccttgggtggtggagggaggcatcaggcaaccactgrgtgtggccgtggaattcccagccccgggtttccaagcaggcttggacagccggtcccaggtactgggtactgttcaggccttggtggctctgggtggccttcttgggctgggaggtcccgggcagcaggctggttttgggcaggtcagaatggtgctgagctcccaggacccgggggctgggaggctggacacccagaagacagtggaaagaggagggagtctctgtccctccagggccactgttcccacctccagaatggggctgggcacagaggaaccgatgggaaaagactccgtggaggaggaactgctgggaagtgaccagcttttggcccagtctataagaacaggactccctaagtggagtcaacccagaggcagaaggaatccacaaaggacaagtaatttacctggcagtgaccccaggcagcactgggcagggagagaggccaagaagggtatgcccagtacaggtgtgttcatgggcaggtgacctgtgggagcacctggggctccatcccacgctccctctgggagacggtggttttgagaacgtttcaggggcagccaccttagggcgatgaagccaggcatctctcctgctcctcactgggtaacacttacccgagggtacctctgtctcagcaggctcatgccagctcctgtggctggagaaagcccttggcagagttgcaggtggccacaggcaaaagccaaagccaggtggggctgaagggtgcgtgtggggcgccaacagtgtctgccccgatggggacaagccccgttctcacccagagggcttggtaagcaggctctggtgtttagccagaggggctcgacctgagggaggacaggtctggagggatgaggcagcctccaaatatctacaaagcctcttgggacagcagggttggctgcactgcctggccccccaggggagagccagcaccaggaggctggaatcacctgagcctgaggcagagctctctccggggaagaactgtggtgaccagagcacgtggcattgtccagagagagtgtgtgaacagggccacgtggcagggaggaccagggacctgagacggtggggctggagccccaggcagcaagaacccctagaagagagcagggccagggtcagccatgcctccacccagaagagcacacatacacacgc

SEQ ID NO: 22851 - DNA, 511 bp, Homo sapiens
caggagttygaggctgcagtgagccatgatcacaccactgcactccagcctgggcaacagaacaagaccctctctctaaaaagataaaaataaaaataaaaaataaaaagggctcctgaagtctaaatgttccagaaacatggagagggaaacaatgatttctttgagcaatatgggtacagaaatatagctaggtaggttgaataagatctactattcggtaacacaacagggtaactacagtcaccattaattaccatacattttaaaataactgaaagaggccgggcgcggtggctcactcccataatcccagcactttgggaggccgaggcaggtggatcacctgaggtcaggagttcaagaccagcccagccaacatggcgaaaccccatctctactaaaaatacaaaaattagctgggtgtggtggtgtgtgcctgtaattccagctactagggaggctgagtcaggagaatcgcttgaacccgggaggtggaggtggcagtgag

SEQ ID NO: 22852 - DNA, 553 bp, Homo sapiens
gggttgatctaggactggggaaaggcaaacccaaagtggcaaggaaatgaagacattgagggtgctagtaagaatattgaaatgattgatcttgggcttgagaaatgctaaagaaggaaataaaaccagtataagaattcctaaatcagtggtccccaacctttttggcaccagggaccagtttcatggaagacaattttctcacggatgaggggtgggggtgtggtttcaggatgattcaagcgcattacatttattgtgcactttatttctatttacattgtactatacaatgaaataattatacaactcacmgtaatgtagaatcagtgggagccctgagcttgttttcctgcaactagatggtcccatatgggagtgataggagacagtgacagatcatcaggcattagattctcacaaggaatgcacaacctagatccctctcttgcacagttcacaatagggtttgcactcctgtgagaaactaatgctgctattgatctgacaggaggcggagctcaggcagcagtgtgtgagatgagtggctgta

SEQ ID NO: 22853 - DNA, 1706 bp, Homo sapiens
ggaccctaagataataattcacaaagattggctgtgccttcaagaaggagaaactttcatttcactgccaaacattatatgttccgcttagggaagttactggtaaagtttctgcacggtattaaacatcaaaaaaagagtcagtaataagtgacaaagatcttgacaatggaaaaagatatatgaatataatgtttataaatttatataataatgtatcataattaaatgcatttaaaatttataatcataaaatgagataatttcaatagctcttaagaacatatttgagaccaatgtctaaacttagatgattgtattagagcagtgaaaggaaatgattgatatgagtactaggaaatcctggaaatgatcactaatctactagtcttaggagttggaaaacaaatcatctccagcagaactggtgaaaaagttaaaataaccagagcctcaggatttataatcttttagttatacccaggaggtataatatttaaaatagaaactttatttagtgcttgttttttttgttgttgtttttgtctttttttttttttttttttttttgagacagagtctcgctctgttgcccaggctggagtgcagtggcacaatctcggctcactgcaagctccacctcccgggttcacgctactctcctgcctcagcctcccaagtagctgagactacaggcgcccgccatcatgcctggctaaattttaaaaaaatattttttagtagagacagggtttcactgtgttagccaggatggtctcgatctcttgacctcgtgatctgcctgcctcagcctcccaaagtgctgggattacaggcatgagccaccgcgccggccagctcttataaactaaatttgtcctaaggttacatttgtattttgaatttctttacagtaaactgcagcctaacttagtatgttaacaaactgcaacctactttaaaagtatattcttgtaactaataactgagtctcagctaatcatagcagctgagtttcagccaatcacaggctgcccactgatcagattatgtccacagaaggcaaatgctacatatgcccaagtaaggtaaatgcccagctatcaccatgcccaagtaaggtaaatgtccagctataaccaatcaagctgtttctacacatcacttcctttgtctgtctataaatactgcctggccatgttgctgggtggggctctgtcctaattttgagtactgcctgattcatgaatcattctttatacaaataaactcgggtaaatttaatttatccataatttctttcaacagccctcggatattaatccccattgaaacatactgaggactaaatttattaataatgttatcccagcagttagtatgccaattagccccactgttttattagttgatgtagacgtatgagattgtaaagttacattttataatctcaaatgacaaatttttaatgaagaatatgacattgtagaatttgaacaataaaaatacatagctaaactagcatgtataaaagtgagagcaaagaacagtgatagtagccaaattcaaacaaaaacaatgtgatgatatgatttgtgaacacctgatatataaaataccagccaacgcatatataaagttgtaaacaaaagatccaattaaatccacccygtactgcaaaacttttggtgagggtgagtaaattt

SEQ ID NO: 22854 - DNA, 281 bp, Homo sapiens
gaagaaatcagagtaatcatcttgatttaattttaggtaaaactttatctgactttattattgttttttgctttttgtataatgcatctttttttgttaaaaagaaatttttttttataacctaccaggaagatagaagggaagaaaaccttctggtcctgcacagggagatggagtaatgttgctaatatcttaatgtatgtccgtataatctttgtttcttacacttaaaaaaaaaaaaaaagtagttgtggccrggcacggtggctcacgcctgtaat

SEQ ID NO: 22855 - DNA, 468 bp, Homo sapiens
tgtcacaggacttaagcaatctttgaaaagaagtcaaaatgtgccacaaaaattcacttgattgtgccagtgggaatatttcctaacatagtcccaaacttcaaaaacagtataaagcatgcaaatggagtaaggggcggggtccatccatttcttcccaagtatatttaatctatttaacagaaaaatgttgggaaagttgtggctcttattagcatgasaaaagggcatccagtggtatctatacactagactgttcacatgttgtttttcccagggtaggggtggtattcgtacttcttattgctttatgtcaccagtctgtaacccagattgtaactttaagatgttatcttctggctgctcagataaacagcccattatgtttttatggtgggcagttctgaatcctcagggaattagaagatattggctaaagtttgtggctccctgctagactatcaaggg

SEQ ID NO: 22856 - DNA, 609 bp, Homo sapiens
tcagacgaaccaactctacttgtacaagcrtatggctttactagtctttaaacactacttatttcaacttctggcaacagcttggttattcatctaaaaagcatccattatgccttctatgtcaaacatgttgttaaacatgatgctttcgcccgtgttcactaagttaatctttacaaccaacccatgagattggttttattatcctcatttctctaatatgaaactaagagttagaggggtttccttgttcaagataaaaaactagtaagaagcagagctgggatttgaacctaagttctctgattccatgcccagtgtcctttcttgagcttttctcttgcaaactctcaattgtatcaatctgtgatactttctctttggctttctgttgacgcacagctacttctactctccaaccctttcaagaactttcttgaaatttgtctcatatggaagtctttgtcattttttctcatgctttgaacatagttgaattacagactgttttttttttttttttttttgagacacagtctcactctgtcacccaggctggagtgcaatggtgtgatctcagctcactgcaacctccacctccagggttca

SEQ ID NO: 22857 - DNA, 555 bp, Homo sapiens
gtccgtggggctcacggtgcggcgcttctgggacagcctgctgaggctgggcacgctccaccagcagccactcccccaggtgggtcccagcctctgtctcaggtgggtcagcctcagcctctatctccccactgtggtggccttcacacctcgccccagctctggcttcctagcctaccactatgtgcaccacagcctttactggctcccaccgccctcccaatcaagccccacacagtgtggcggttaagaacgcaggccttggggatcatgccttgctccctggctctgacatccctgtgggactttggaaaaatcttgcctactttgaaccgcagtttcttcatctatacaacggaggtcatgtgacccctgtttgttatrggctatcccgtaatccacacaaccacccactggggaagaaccactgttcccatgatgggaaggaaactaaaactgagagtggttatggtgacacaagagcaggcaggtccagtaagcaagagcccagtaaccagcagctgtgaccgtcaccatcaccttcccaacaccatg

SEQ ID NO: 22858 - DNA, 557 bp, Homo sapiens
gcctgcagtgggactgaacaaaacacagtggtagtagaggtcctttggggctggaggactttggagttctggcagagtcagaaaggaaagatctgcttaacactatgctgatacccctaatcgagctgaggcatctagaaaggttgtgctttaggaaagaggaccatgctcttgagcagggattggcaaagttctttagtaaagggccaggtaataaatactttaggctttgtgggacacatagctctctcacttttctttctcatcctctttcttgttctcttcctgctactagtccttctttttaagaaccattcaaaaacataaattcattcttagcttagtagtatagaaaaacaggctcacgcagtttgctgaccccttctctggagtaagacttaacacagagtcacattaagtaagcctacaaccacggccttagaaaatcctaggtgagaagagtttggaggttgaattttttcatgttttrggggctttgagaacacttcagatttttcacaaatctgtcttaacacaatgaaaataccaagcctatc

SEQ ID NO: 22859 - DNA, 1873 bp, Homo sapiens
tgtaaggcttgaactattggtggccttttygatttttattctaaaggttaagatttgtgattttgtaataatacacataaaatatttctattctgtaagattgttatgaagattaaatgaaatgatgtttatgtagacatcaatccatggctttgtctagcttaaaatacgtaaacataaatgttagctaaagctttagtataaatatacaatggggatttgaaatatacaatggattatgtctctataaaatagtgcctatattgtagtattcactgctttattattttcaattatggctatgtttcaatgattcagtattgaactaatcactacaaaaatattctcctcatgacatataaaaggcatgacaaatacaatgaattttgtacatcggtagagatgcattatacatgctcatgatgactctaggccttgcaagttataaaagttgttcaacatagccttggtgttgagtgtgttttattccatccagatgctttgaaatcaccatcagtagaatacatgtcgttgtaaaattggtattgtataacaagaacaccctatccccttgtatagtgttggtatttttatgcatttcaaaatttcaccatgagattcattaggcagtgttaacgtaccctgtgcagaggcccgttttagaagaataattcatctctgtgcagctttaactttattctcagcagtctcttgaaacaccattgccctaatttccagtcactaaaaaagacaggtagcagattaggtgctggtaataattatcaaacgcaagacacctgctgttaaactcaaactacagtctcagctacctgggcaacatttctgatataaagctgctttcttcattattctccaagaaggagacagagtaagtctccactcagctccaaaagtgacgaatttatgttgagaatagtaatttaaactgtgatcccaagctacagggactttcagggtagaaacacagaattagacattttcattgaaaaaattttcaggaactggtgtttgatattgcaaactagaaaattcgttaagtaggcattcactagaattcttctttctgtaatttacacacaatgaccagaatctgaaaagtgaacatgccgcttttgagagtctttgtttttttttctatgcaacctatgaattccatgtaaacattcaaatcaagaacatttcgcatctatatacagaccatcctccataaaattcagtcccattatgattaaggactcaggctttttgttttgtaaagttagaaataaaaggggaaggccgggcgcggtggctcatgcctgtaatcccagcactttgggaggccgaggcgggtggattacctgagatcaggagcttgagaccaacctgaccatgatgaaaccctgtctctactaaaaatataaaaattagctgggcatggtgacgggtgcctgtaatctcagctactcgggaggctgaggcagaagaatcgcttgaacccgggaggcagaggctgcaatgagcagagatcatgccattgcactctagactgggcaacaagagtgaaacttcatctcaaaaataaataaataaataaataaaaagaaataaagggggaaaagagtaaatagatatcctaaataccagactccagactttcaaatgccacaaacagaaacccttcttatttcccaacgtgggaaaagtaagtttctataaaaacatttttagatgacatgaatgtttttatgagggctgattttgtttctgactgtacaaaactggatcatacagccacaaagagggcatgatgagagaagagagggaggggaaagtagaagacagagataagatttttaatgaatggttcttt

SEQ ID NO: 22860 - DNA, 1873 bp, Homo sapiens
tgtaaggcttgaactattggtggccttttcgatttttattctaaaggttaagatttgtgattttgtaataatacacataaaatatttctattctgtaagattgttatgaagattaaatgaaatgatgtttatgtagacatcaatccatggctttgtctagcttaaaatacgtaaacataaatgttagctaaagctttagtataaatatacaatggggatttgaaatatacaatggattatgtctctataaaatagtgcctatattgtagtattcactgctttattattttcaattatggctatgtttcaatgattcagtattgaactaatcactacaaaaatattctcctcatgacatataaaaggcatgacaaatacaatgaattttgtacatcggtagagatgcattatacatgctcatgatgactctaggccttgcaagttataaaagttgttcaacatagccttggtgttgagtgtgttttattccatccagatgctttgaaatcaccatcagtagaatacatgtcgttgtaaaattggtattgtataacaagaacaccctatccccttgtatagtgttggtatttttatgcatttcaaaatttcaccatgagattcattaggcagtgttaacgtaccctgtgcagaggcccgttttagaagaataattcatctctgtgcagctttaactttattctcagcagtctcttgaaacaccattgccctaatttccagtcactaaaaaagacaggtagcagattaggtgctggtaataattatcaaacgcaagacacctgctgttaaactcaaactacagtctcagctacctgggcaacatttctgatataaagctgctttcttcattattctccaagaaggagacagagtaagtctccactcagctccaaaagtgacgaatttatgttgagaatagtaatttaaactgtgatcccaagctacagggactttcagggtagaaacacagaattagacattttcattgaaaaaattttcaggaactggtgtttgatattgcaaactagaaaattcgttaagtaggcattcactagaattcttctttctgtaatttacacacaatgaccagaatctgaaaagtgaacatgccgcttttgagagtctttgtttttttttctatgcaacctatgaattccatgtaaacattcaaatcaagaacatttcgcatctatatacagaccatcctccataaaattcagtcccattatgattaaggactcaggctttttgttttgtaaagttagaaataaaaggggaaggccgggcgcggtggctcatgcctgtaatcccagcactttgggaggccgaggcgggtggattacctgagatcaggagcttgagaccaacctgaccatgatgaaaccctgtctctactaaaaatataaaaattagctgggcatggtgacgggtgcctgtaatctcagctactcgggaggctgaggcagaagaatcgcttgaacccgggaggcagaggctgcaatgagcagagatcatgccattgcactctagactgggcaacaagagtgaaacttcatctcaaaaataaataaataaataaataaaaagaaataaagggggaaaagagtaaatagatatcctaaataccagactccagactttcaaatgccacaaacasaaacccttcttatttcccaacgtgggaaaagtaagtttctataaaaacatttttagatgacatgaatgtttttatgagggctgattttgtttctgactgtacaaaactggatcatacagccacaaagagggcatgatgagagaagagagggaggggaaagtagaagacagagataagatttttaatgaatggttcttt

SEQ ID NO: 22861 - DNA, 1875 bp, Homo sapiens
agcccattggtgtgtagttgataattaaattttgttcataccatagtgttaccggacgagggtgtccaggttcctggcgttttgaacaaagaattggacaaaacacagaaacaaagcaatgaagcaatgaagccacaaaagcagagatgtattgaaaacgaaaagtacactccacagggtgggagcagacccgagcagccactgaagggcccagttacagaatcttcgcgggtccaagtaccccctagaggttttccattggccacttggtgttcaccttatgtaaatgaagtggtggcttgcaatcagtctgattgcagagagcaaccagtcagaggctgagtgaagttacaaagttacactcccatgcaaacgtctgattggttgcaaaaagcaaccaatcagagatacttttaatttcccatctgccaatgcagaaaaatgggggtttgcaaagggagtagccacttgtccttttgtccttttgttacttaggcatggaaagttagggttttcctttcaatttcgttttaggaagtcagcgtgaaatggccttgggttccctgcctccagaccttattattctgcctcagttgcactcagggtccctgtcccatagttctgtgctgatatctgagatatcaagtgtgatattgactgaggcaaacgacaaattaccaattccaaaacgaatactaattgcataataacagtttccaagctgttagtctgctttcctaaaaaagctaatttaacacaagcacagaactggctcttgcccatgggttatattttcggttggcagattttgctttgcaaaaagattgggggaaatgaggactgttgtagaagaagcatacttggccttttgtgaagagggtacaaattgcatcaacctctcaaggcctgaaagtgtgaacacaaggacacttaataccttcaagagaggtcgattacctttcccagaggtaaaatgacctagtgctttggcttgagtgggatccttgaattttcagcccttcgaaggagagttttgtgcaggatggaggtgcttgagtgctgaggaactgaacctgggttggtaygcattgtccataggattcagggcccaggggagggcatggtcactaaatggctgatcctctctggaatgaaactttagaaagcaaaacgcaaaattttttgattactatagaatgctgaagttactggactcctcctgagattatgttcataactttttagctgaaactaacatctacaaagaccatctatcttggatgaacctattttctggtaaccagtgttaaatattttttaatcaaaaatttaaaacttgcattagaataatttctgattttcacctttttaaatagaattttttaaaatatattttttaaagatgaggtctcactacattgccctggctggtctggaacttgtgcactcaagcagtcctcccacctcagcctcccaaagtgctgggattacatgtgtgagccacagtgcccagtttgatttttgcctctgaaatatttgaagtatattttaaaatacatgctttttgtgggattacatttagaagacttctcttttttgaaacttagaaagagtggaaattattatccgcagcagtgtttttgaatattacctttgcctcatgccttaattcttgtggaacctggaagaagtagagatgcattaaaaatagtatatgtatcaaccaggcgccgtggctcattcctgtaatcccagcagtttgggacgccgaagtgggtggatcgcttgagcccaggaagtcgagaccagcttgggcaacatggtgaaaccccatctccactgaaaatacaaaaatcagccaggcatggtaacgca

SEQ ID NO: 22862 - DNA, 574 bp, Homo sapiens
tggggccacttctgctccacagagccttgtaactacacagccttcctaccactgaccccaataagcccaattacgaaraaaaaccctgaagagcctggtgcagtggctcctgcactagtcccagctactcaggaggctgagatgggaggatcacttgaacccaggagtttgaggctgtggtgagctagaatcacatggcagcactccagcctgggcaacagacagaggccccttttctttaaaataaataataaaataagaaataaaatgaaaatgaaagaaaggaaagcgctaagagagtctgtcatgaggaagggcatggagatgtcttttgagggtggacaactcatgaatccttaatttttctagagattgtgtgtgtgctcttaagtgatgttatatactttattttgttttttaaaaatatttttaaaaattttatttttaaatgttcttttaaaaactttctgtatctatttatatctattggttatttgaggattttttggcagcatatataaatatgcagaccctttgagtctgtagcctaccaagagagatagctctcgtcttc

SEQ ID NO: 22863 - DNA, 515 bp, Homo sapiens
ggggagaatgtaggaactccacacggtcagtgttagaacaaaaaaatgtgtaatgaccttataacaagaccacgttgaaagaagagagcttatttgaggaccggctgtacmaggatggtgatgaggttgaggaggatgataactatctcctaggattattgtgaaaattacataaaaagtgtttgaaaattgctagcacgccatcaggaacatgataaacactcaataaatgtatgcatttgttttctttcctcctacatattgtcttcagagtatctttttgggggctcaatatgccaaattccagtttggatagaagcttagaaagtttcaacttccttatagagtaggattttaactagctagatctttaattcttgcattcaatgaatgcacaagcaatttagctaagtaaagagtttcatgtaaccatttcctataaaaatgtgtttaaatttgtttttgaggttgcaagagcattgatgaacttttggaggggggattttgtttatttg

SEQ ID NO: 22864 - DNA, 525 bp, Homo sapiens
aatgacaacttatgatcttaaatatcaagtccaatcctgtcaaggcccccagtcacagccctgatgggttcctgtagaatgctgagcggatggagtgccagacggtcctgggatgaagacagtgatcccaagctaccaatgagagtgctcacagcttgtgacctagggcaaccagttttctgtttccccaacagacagcctctgggctatccattgagacttatcctgcatctccgaatttggtcatgtaactccgtgtttagctctctgatcttctgttcttagactctgccattttacatttaggcagaattctaggatgattatgcaaatacctttctgggtgctcctttcacttatctcasttgtatttagtacaaatgattatccatatcagaggggcttttccagagtctgagataggactcgtgttttaaatagggttggataattttacaacagttgataagtaagtgaaatgtagccaaaatcataactacacaattggtatgtttattgttagga

SEQ ID NO: 22865 - DNA, 563 bp, Homo sapiens
tgcctttcccctgccagggataggtgacttttttctgttcccatcccccagctatgatgggtttttaccaaggcaatagtgtttgttgacttcctctccctctgcctcaaggttttgttctctacaagaaatcatgaagacaggtactggtagagtttcatgtctgtcytcaagaggcagctctacctatctctgaggactgcaccttgagggacatttctcaagactcttacaaatatttcttctaagcacctggcgagatacatagagaaaaagcccgcaatggagtgtgaacttccacatatttgcagcctcctggggctctacactttcctgtaattccacattcagcctccaccagtttattaaatgttacagctaaattcttatcagcttctgactgtatttaccccaggcgaccaagtgcttgcatcccatctcacccaacaggagcaagtctatgtttagatttcataatactcagttgctctgaaacctcagctctctgttgggttcaaggagagtaatgaatctgagatttgcctggctacatttttgtttaa

SEQ ID NO: 22866 - DNA, 563 bp, Homo sapiens
tgcctttcccctgccagggataggtgacttttttctgttcccatcccccagctatgatgggtttttaccaaggcaatagtgtttgttgacttcctctccctctgcctcaaggttttgttctctacaagaaatcatgaagacaggtactggtagagtttcatgtctgtcctcaagaggcagctctacctatctctgaggactgcaccttgagggacatttctcaagactcttacaaatatttcttctaagcacctggcgagatacatagagaaaaagcccgcaatggagtgtgaacttccacatatttgcagcctcctggggctctacactttcctgtaattccacattcagcctccaccagtttattaaatrttacagctaaattcttatcagcttctgactgtatttaccccaggcgaccaagtgcttgcatcccatctcacccaacaggagcaagtctatgtttagatttcataatactcagttgctctgaaacctcagctctctgttgggttcaaggagagtaatgaatctgagatttgcctggctacatttttgtttaa

SEQ ID NO: 22867 - DNA, 563 bp, Homo sapiens
tgcctttcccctgccagggataggtgacttttttctgttcccatcccccagctatgatgggtttttaccaaggcaatagtgtttgttgacttcctctccctctgcctcaaggttttgttctctacaagaaatcatgaagacaggtactggtagagtttcatgtctgtcctcaagaggcagctctacctatctctgaggactgcaccttgagggacatttctcaagactcttacaaatatttcttctaagcacctggcgagatacatagagaaaaagcccgcaatggagtgtgaacttccacatatttgcagcctcctggggctctacactttcctgtaattccacattcagcctccaccagtttattaaatgttacagctaaattcytatcagcttctgactgtatttaccccaggcgaccaagtgcttgcatcccatctcacccaacaggagcaagtctatgtttagatttcataatactcagttgctctgaaacctcagctctctgttgggttcaaggagagtaatgaatctgagatttgcctggctacatttttgtttaa

SEQ ID NO: 22868 - DNA, 550 bp, Homo sapiens
caggtgctaaaaacgaactgttttttgttttattttggagagacaggggtctcactgtgttgcccaggctggtctcgaactcctagactcaagtgatccacccaccttggcctcccaaagtactgggattataggtgtgagccactgtgcctggtcctctaagmacatttgtaaaaatgctattatttttgcacactttctgtgttaagaactttacattcattttctcatttaatcctcacaatgaccctgtgagctagatactgttattattcccattttatagataagaaaacccaacctcagagagattaggggaaacctgtgggaatgtaaccgattttaaatcctctttaatgtatagataaaaattaaaggtgagcttaaatccctttaaatttatacatttaaaaaattgttcatctaaagtttagtactttaacaattgttcttagtaacaaattaccactaaagggttagtaacaaattaccacaccagcacagatcccccacccttaaaactgagccccagctgagccctcacattggg

SEQ ID NO: 22869 - DNA, 587 bp, Homo sapiens
tttttcttactattttcaatacctggaatcaaaattcctttttattgatgatttatgcgaagcagatcctttttacttacaactcaaattaggactcctacaggaatctgtttagtcccaaatgctaatttcaatcctttgctgaggcaaaggaaagaactgaagagatgtgaaggtcaactctgaaacatcactgaataactcaattctttcaccctttccccacacactttaagtccaaaatgagtccccagactcatttcccttgggcagatcaatctatttcacacctcgtgaccttacttaggaggmctgtgtcagaaagaagttatgattccatttgtagcatttgctcaatattacctaccttttcactcgatgaatgcctgtgagcttgtcaaacagaaaccactagtaggtattctttgaaatgtgtatctcagctgtacaattgttatttgagaaacagacctttctaataatatttgtccaatgaagttcatacgcattttgcatttttacctaaaagaaaaaataataggatggttctatatggaagctttaaactatctggtaaaagtggcaat

SEQ ID NO: 22870 - DNA, 539 bp, Homo sapiens
tggccctgtagacagcatttttattaagataatatgagtcatttaatacttgattgattttgaaaaactgaccttgtccttaaagccatttaaaatattcaggaaataaagatattttgaaactaaaagaattttcatttctgaaagagtgaaattgttgctaaattttaagcgctttagtgttattttaaggcrtgtatgcaagatttcattcactcttcgcccacaaatagttgcttcactggaaaattgttataattatcaattcatttttagcagcctaccaacttgttttaatgaatgtgaattaaaatgatgagtgaggttttggtcattaaaacaaaatgactaaagataccttaaagttgagtgggaaatccactgcttcactaaaaccgcttcacttattcacttctattcctgaaattctttaagctatataaatgcatttggttctgctactcctggtttgccacctttttgtcatttttaaggagtttcaaaaataacttgtctaataacacctacagcttgtcaga

SEQ ID NO: 22871 - DNA, 581 bp, Homo sapiens
ataagaaaacacagggctgacttcaaaaaaagttattacgtaatcaagaaagctgctaattatacaagttgggtatttcactgtgtttatcatactcagagaaaagtcgcttgaagttttcatttttttaatgtatccacatgtagaatatctagtagcttctaacatagtgtggtagctttccatgtagtctctctatcttttctttttaacctaaattcaccacataggaaggatgaattacattaaggagactgtctgtcacttacayaaatcgttgatgtcttcatactcagccttcactcaataaatgtttattgagtattcacataatgtaccgggtgctgtgcacattgctgggcagagtgatgggcataacacacacttgtccctgtccccttcccccatggagcttacatcgtaatcagtaatgtgaacaatgttgtaatgctggaataggcattgatgtgtaaatactttggcccttttcaaacaagacttgaattgaggaagacttagataaccaaatgcccagtatctgagtttatctaaacctagtgccaggattctggtgttcctta

SEQ ID NO: 22872 - DNA, 530 bp, Homo sapiens
ttgtttctgggagttagagttttacaatttatagttaaggaaactatgaaacaaactaaatattatttgtttacttcatttgtgagtaataaggtctttttaaaggaatgatcctgggcaagttccttaacctctctgagccttgcctgtataatggggataaagatattcaagtttcaggtgattgtgaagattaaataaggtttccaaagcatctggtttacatccaacacactataggcatttactaaatggtagttattattttgattattagcattttttacacaaaatgtttaagtttttaattcttatctcaatcctgtttctattatgcttaaaagatcaatttgacaaaatgtttaaatgcacattaccaagttagccttcacaattctttgaggcagttacscttattattttattattattattttattcttacaaatgataaaataatcacacacactccaaacccacactaaattggaaatactttttcttgggacatacagcttgttaacatggca

SEQ ID NO: 22873 - DNA, 618 bp, Homo sapiens
atcaatttcactgagcactcaatttttctttaaaatgatcttcaaggatgggtctaattacatagaattaactgaataacagtactgctataatgaagttaataagggtcagtataagacataggctaaaatttgtaaatatttcaaacctaaggaccctttaattagaataaaattcttagaaattataattcttagaagataaagtttgagtgaattgtttctgataagctttcatgaacacagtttagttagaggttctctttgtttcttattgttactaacctaaaacacttcctgccccctagggcccctgaaaaacagaaccccaattattaacttgcatcatcaagccacatctcacctataattcaktattttctaatttgcttttcagaacaatttttttcaagaaacagggtcttgctatatttcccaggctggagtgcagtgactgtttgtttacaggcatgatcatagtgcactatagtctcaaactcttggccttaagtgatcctctcacctccacctcccaagtggctgggactacaggcacacactgctgcacctggctttcaaaacaataatttctacagtcactgacataatattcactaa

SEQ ID NO: 22874 - DNA, 565 bp, Homo sapiens
aaaaggttcctatggaattcataaacacagaccttcccttgcccaggttggagcaagcaaacaactattggataaaggagcatgaaagaagtcccgggttggcaaggtccctacaaaaacccggaaaaagcaaagacgaagcaccagagaccctccacatgggctgtgcccactcaccgtccaaggaagacrgcccctcaagcctgttgaatccagtttctcttccagacctccagatccaagtccatacccattctcttgagtcttgcttctcaaagcagggcgctggaaccaagtgcatcagcatcacctgggaaatgcgaatttactgacccctagctcagacccactgaatcaggaactctgagggtggagcccagcaatctgtgttttaccatgctccccaggtgatcatgatgcacactcacatttgagatatttatacccattcttcctcctgaggagtaccacgaggacaagcacgtttaatacattccaataatgttggaaactactgctctggattttaatgatatcttaggcttatcgaaccctaagaaataaa

SEQ ID NO: 22875 - DNA, 400 bp, Homo sapiens
caagcaatgcttggggaagagaaaaaggggaagacatatttgaaaagttacattaatagaagagggagaatcagattgacatttggaacttttctttcktaagaagataattaccactaactcttcatcaaagaggcatcattttgaaatttttttctggctgccaggattagttaatatgataacacatacagtttctttctctctctctctctgtctctttcttccctccctccctctctttttcagtctcttgcaatcaaaaacatacttgatcaacacatccagctagggtttaaggtgtagtgtggaataggacagctgtttttctctgggatgctacttgatgcgtggaacacaaaacggagtgtggtcacttctaataagctatttgacttag

SEQ ID NO: 22876 - DNA, 575 bp, Homo sapiens
agctactccctcagtctagagtctggattggaagtctttcctgatctgtccaggaatattctctacaatctcagagagccttatctaaaaatcaaaaagactcttctcgaggtcttctttataaatgggaccatgtgtctgtcacaacaacccacccctactaagtgggctgtttactcccagacatttactcctagaatgagtggaggagcagaaagaataggagtttagggtcttaagaggrcacttattgcctgggatgatattcacttaacatctattaagttgtagcatgtgacatcgccatttttgtaagtcaaaaatggtagaacgtcggccacttcatatagttcaacctactataaaccacgatctccattcccatgaaagaaaatccagctattagtctccacctgccaggtctgctgtgcagtggtttagcatcgtggtcaaaagcttggatggcaaactcagaactggattagagttccacctctgactacttgctgtgtgtcaccttggacaagttatttgccatttacaagcctcagttcttacatctataaagttgggga

SEQ ID NO: 22877 - DNA, 658 bp, Homo sapiens
cataatctggggccctctctcctctggaaagaagattctggaaggggttgggagtgaggacaggctcagatcggagattctaatctggggccctcccttccctggaaataagattctggaaggggtaggggtgtggactgtcttagatagaaaatcctaatctgggtccctctctcccctggagataagattctggaaggggctggggtttggggccctctctcccctggcctggggcacctgtccctgttcccctgacccggccacactgtgatgacacgaacctcttgccacccccagccctggggcctggctgaggtcccttaagggtctgctttgccccccaccctcacctccaaagtgcagcaacagctttgccagcgacctctgacctctccctgaccctccactgcctcccacctcccaccctcattacatccccggccctgacctcatgtctgcggggccatgggcgagggtgagataaggcggccattgcaggctgtgctccctcctgggtaccgacgggaagggygggccaggccgccagcctcagaagagagtggcccatgactcaccaggtgggcagcgcccaggccggcgtccgggaggaaacgccacttcctctgggtgaggcaggaggctggcgggggaagct

SEQ ID NO: 22878 - DNA, 541 bp, Homo sapiens
ttttcacatctctatgcaaaatcacgtgcctgcctttttgccttctrtccattatttgagagccacttcaaatccagtatcctctccaaagccatcctctctggaacagcaggcagaagccaggaccttggtcaccctacttagatcaagtaactcaccagatgtcccaccatggtggcagaaccaggacttgaattgaggtctatgtcattccatagcctgtactcccagctgccatttacagataaggaaattagggtacagaaagcttgtatatcttgcaaaaaaacatgaagctctaaagtgccagttctggctgggcgcgttggctcacgcctgtaatcccagcactttgggaggccgaggcgggcggctcacctgaggtcaggagtttgagaccagcctggccagcatagtaaaactccatctctactaaaaataaaaaaattagccaggtatggtggcatgtgcctgtagttccagctacttgggaggctgaggcaggagaatcgcttgaacccaggaggcagaggttgcagtg

SEQ ID NO: 22879 - DNA, 951 bp, Homo sapiens
atgcacgagaaactgtttctccaaaaaacgtcacatggtacttagactgaaataaaagatgatcctgttayggactcctgtcctgctccctgcttttctcctctagccagaacagatcgggagaatgggaattcacccagaaggaggtgctgggcctcacatactcctttcaaagcctgactcatctaccctaccctcgttgcaattgttcttccattctaacctcaggaatcctagccaaagcgtatttatcaaaaccactaatgccctgacagtggataaatatttaattagatacaagtttgtttctattatatgtgtgagcacttatctctgtgtttgtcatcctagttaagtgtctgttttcacttgtgtctgctggctatgtccatgtctcttatctgtacgtctgtgaggatggatttgttcattactttggcctgagctccttcttaccctgaaccaggaaactcaccggcagggaatcaagatgggaagtaaaaagaaaatattcccctaagtcaggatcagattctatcatgcctggccacctggagaagatagttgggtgtaggggacagaagagaaggggttagatgaacagaacacaacctcatcaatgtacatgcacagagaagagcagtatgattttttttctgagacaaggtctcactctgtcacccaggctggagtgcagtgttacaaccatggctcactgcagctttgatctgtcaggcgcaagtgatcctcccacctcagcctcctgaggagctgggactacaggcacatgccaccacacccagctgtttattttattttttgcagagatggggtctcactatatagccaggactgatctcaaactcctgggttcaagcaatcctcctacctcaacctcccaaagtgctgggattacaagcgtgagtcactgcgctcagccagcagtatgct

SEQ ID NO: 22880 - DNA, 962 bp, Homo sapiens
tttttttgcaaagcatactgctggctgagcgcagtgactcacgcttgtaatcccagcactttgggaggttgaggtaggaggattgcttgaacccaggagtttgagatcagtcctggctatatagtgagaccccatctctgcaaaaaataaaataaacagctgggtgtggtggcatgtgcctgtagtcccagctcctcaggaggctgaggtgggaggatcacttgcgcctgacagatcaaagctgcagtgagccatggttgtaacactgcactccagcctgggtgacagagtgagaccttgtctcagaaaaaaaatcatactgctcttctctgtgcatgtacattgatgaggttgtgttctgttcatctaaccccttctcttctgtcccctacacccaactatcttctccaggtggccaggcatgatagaatctgatcctgacttaggggaatattttctttttacttcccatcttgattccctgccggtgagtttcctggttcagggtaagaaggagctcaggccaaagtaatgaacaaatccatcctcacagacgtacagataagagacatggacatagccagcagacacaagtgaaaacagacacttaactaggatgacaaacacagagataagtgctcacacatataatagaaacaaacttgtatctaattaaatatttatccactgtcagggcattagtggttttgataaatacgctttggctaggattcctgaggttagaatggaagaacaattgcaacgagggtagggtagatgagtcaggctttgaaaggagtatgtgaggcccagcacctccttctgggtgaattcccattctcccgatctgttctggctagaggagaaaagcagggagcaggacaggagtccrtaacaggatcatcttttatttcagtctaagtaccatgtgacgttttttggagaaacagtttctcgtgcat

SEQ ID NO: 22881 - DNA, 731 bp, Homo sapiens
tttccagaagatcctggacaaagcctgttgctgtgatggcttggtggggacgttggtgctcctgtcacatcgtcccacgccccacttctggcttactaccaagagagcagacatcagggttgaaaggcaagtcagcaaggcagctgggctccccccacyccttgtatcctggtggcccctgatgactcccagcacagcctgtctactgctgcttctcctggactcctcatcctgtcccagggacaaattctggctctccagtggggccctcggcaaggacccctgagggtctgtagttggcaaagacaatagtgttaaatacctggggtcaaacagctgtaggagaaaataagtctttctctttgtctggcctggctacacatctttctttttctttcatactgttcttttttctttctttggtcttacagactgttttcaaagcccggctgaatggtagcttgtgaggaaaaaaaaaaaaaaaacaaccatattgaaaagacaagtaaacgtccagaaatctggaaagaagaaagaaaatctcatgactgtaactctgacctcagctgactcaaataaggtgtccattactgcacgattagaaccacctacacaagacaaagtgaatttctaatcaacaggtagtaataacaaaaccccttcaaaggccaagaagcattagagtggattatccatgaagagaggattagaaaaagagagacccggaaccc

SEQ ID NO: 22882 - DNA, 731 bp, Homo sapiens
tttccagaagatcctggacaaagcctgttgctgtgatggcttggtggggacgttggtgctcctgtcacatcgtcccacgccccacttctggcttactaccaagagagcagacatcagggttgaaaggcaagtcagcaaggcagctgggctccccccaccccttgtatcctggtggcccctgatgactcccagcacagcctgtctactgctgcttctcctggactcctcatcctgtcccagggacaaattctggctctccagkggggccctcggcaaggacccctgagggtctgtagttggcaaagacaatagtgttaaatacctggggtcaaacagctgtaggagaaaataagtctttctctttgtctggcctggctacacatctttctttttctttcatactgttcttttttctttctttggtcttacagactgttttcaaagcccggctgaatggtagcttgtgaggaaaaaaaaaaaaaaaacaaccatattgaaaagacaagtaaacgtccagaaatctggaaagaagaaagaaaatctcatgactgtaactctgacctcagctgactcaaataaggtgtccattactgcacgattagaaccacctacacaagacaaagtgaatttctaatcaacaggtagtaataacaaaaccccttcaaaggccaagaagcattagagtggattatccatgaagagaggattagaaaaagagagacccggaaccc

SEQ ID NO: 22883 - DNA, 533 bp, Homo sapiens
aggcgtgagccaccgtgcctggccctatgtcatttcttaaagaagtgtggacatcagcaactaccttaaagtgatatatgtatactagagtgctgtcttcaccagaaacaaaatactgttgttttttgtttcgttttgttttaaatagggtcttactctgtcgcccaggctggagtgcagtgacataatcatagctcactgcagcttcaacctcctgagctcgagcgatcctcttgccttagcctcccaaagtgttgggattacaggcatgagacaccatgcctggccacaaaatcctgttttagtaaagaagatgacggttattgcttaagcacatgcattgatggtggagggatgatgtttgcccagsagggcgactggggactcatgatctcatgccccaaatggatcttacacatcatatgactcaacatactcgttgtacagacaagaaaacttaggcccaacatgggtttcgtttttaaatttttcttttgaaataattttaaacatactgaaaagttgcaaaattg

SEQ ID NO: 22884 - DNA, 559 bp, Homo sapiens
caaacttgaccttgataggcccccattttcccccaagtaactgtcgaactcaaatgcagtctgttttatactactcagttgtccatgtccacttgaccttattggacctttggaagttatccaagagttggtatgaacctgtgccagatggtccagaatcatggctggccacactttggcctayaggctgattgtcttctgttcttcccacttaggtgctgcaaagttgggccacagagaagcagctttccattgacagcctaaggctatcagtaaaccaagcaaaggctatcagtctaaggctatcagtaaacaaagctgtggcttgtaactattaaaaaagaatctcagccaggccctgtggctcatgcctttaattccagcactttgggaggccaaggtgggtggatcacttgagcccagaagttcaggaccatcctgggcaacatggtaagacccacatctctataaaacatacagaaattagctgagcgtggtggcatgtgcctgtggtcccagctacttgggaggctgaggtgggaggatcgcttaagcctga

SEQ ID NO: 22885 - DNA, 585 bp, Homo sapiens
ttccaaaatgttatatactgcatgatgccatccatgtaacattttttaaatgaaaaggtttttgaaatggagaataaattaatggttaccasgggttaaggaaggaggaagggatgtgggaggaaggtggatgtggctatagagggcaacagggggaacttcatgtcctccttgcggtggtgcatggacaaacctacacaggtggtgcccacgacagacaagtaaaactggagaaatctgagtaagtttggtggattgtatcaatgtcaatatcctaggtgggacaatgtactatagtttcccaaaatgttaccatgggggaaactgggtaaagtgtacacagagtctctctgtattatttcttacaactgtctgttaatcagctattatctcaataagtgttgtaattaaaaatgacacttctagaggtctatttcaaccttgatatttgttcccaaagaagataaaataagaaacagctgacttacagcttttgccacaggagcacatgctctgtcatgtatttgtagctgtaacttgcgcagaagctgttaacacaactgtttttgctcacctcctgggttt

SEQ ID NO: 22886 - DNA, 585 bp, Homo sapiens
ttccaaaatgttatatactgcatgatgccatccatgtaacattttttaaatgaaaaggtttttgaaatggagaataaattaatggttaccaggggttaaggaaggaggaagggatgtgggaggaaggtggatgtggctatagagggcaacagggggaacttcrtgtcctccttgcggtggtgcatggacaaacctacacaggtggtgcccacgacagacaagtaaaactggagaaatctgagtaagtttggtggattgtatcaatgtcaatatcctaggtgggacaatgtactatagtttcccaaaatgttaccatgggggaaactgggtaaagtgtacacagagtctctctgtattatttcttacaactgtctgttaatcagctattatctcaataagtgttgtaattaaaaatgacacttctagaggtctatttcaaccttgatatttgttcccaaagaagataaaataagaaacagctgacttacagcttttgccacaggagcacatgctctgtcatgtatttgtagctgtaacttgcgcagaagctgttaacacaactgtttttgctcacctcctgggttt

SEQ ID NO: 22887 - DNA, 585 bp, Homo sapiens
ttccaaaatgttatatactgcatgatgccatccatgtaacattttttaaatgaaaaggtttttgaaatggagaataaattaatggttaccaggggttaaggaaggaggaagggatgtgggaggaaggtggatgtggctatagagggcaacagggggaacttcatgtcctccttgcggtggtgcatggacaaacctacacaggtggtgcccacgacagacaagtaaaactggagaaatctgagtaagtttggtggattgtatcaatgtcaatatcctaggtgggacaatgtactatagtttcccaaaatgttaccatgggggaaactgggtaaagtgtacacagagtctctctgtattatttcttacaactgtctgttaatcagctattatctcaataagtgttgtaattaaaaatgacacttmtagaggtctatttcaaccttgatatttgttcccaaagaagataaaataagaaacagctgacttacagcttttgccacaggagcacatgctctgtcatgtatttgtagctgtaacttgcgcagaagctgttaacacaactgtttttgctcacctcctgggttt

SEQ ID NO: 22888 - DNA, 784 bp, Homo sapiens
gaagaaccctggtgttcctccactcatcagagccgtatcatttcctctgctgattttagtctgtgttcctccattgtaacaaattgtaactgcaagtatagcaactcttctgagttctgtgaatccttcgagagaatcaacggaagttgacggtggtcttggggaccccctgaactgcagcctgtctcttcttcccaccagatgagctccgaggaaagaaagggtgaggagaacatagcagccccacccctcttggtttcacaggcccagatcatgggactctgcccttccctgaaaggggggatactgaatgtaacagtgaagtttcaaaaatatttaaggtgacggatatcccaattacactgctttgatctttacaaattacatgaatgtgttaaattgtcacayagacttcagaaatatatacattatgtatcaataaaaaattaacacatttttataaccaaaatcaggctgttatagtgaaagtggctggaaagtaagtcagcctgggctgtggggagagccggcctgatgccttcacccagcccagtaggaggagtcactgaaaacaagtttcttttggggccttaccatttgagatgcctcagtgaagtcgagcacattacaatatgaatctgtctgctactcgccaaatgacttgtgtgttactagtttgttattattatttattcaattattatttctggtgggagttaagagggttgaaccagcatgtgactagacagagtataaacgagaagcagcacatgtgggaccaaaa

SEQ ID NO: 22889 - DNA, 769 bp, Homo sapiens
acctctctgtcagttggtgggatctgactttgaaaacttgttcgggtctagcaactgggtaaaggatgaggaccttttcactgggatgactgcccttaaccatcttcgattttgtttgattgtacatgttggtcagtacctttgatagctgtccattcattctgtccctagggttactgtgtcctgtcacctgtctccattaatgttcagactctgctgtcactgtattagtaaccacctagcttttgtgatgactgaccacaaccaccttctccattgtttggggcacctgttggcctcactgctgtctgtgaattcagttctgtgatgttctattttatcatcatcccttggctatggaggacggtcccaacaccagtgcattcttcatcactttgctgaaaggtgtgttcttcaggtcctccgccagagcagtcttccggggggttttctgggctaakagtggacccactgcagcatgcacacggtgatgcttctacatgccaaggagcaccaaagattgccagcaaaccaccacaaatctcagttcattttccagggctgctgtcacaaactaccacaaactaggtggctcaaactacagaaatgtatcatctcacaactctggaggctaaaagtgtgagatgaaggtgtcagaggcctggctccttctgagagctctgagtgaagggtttgttctgggccactctccttggcctgtggatggtggtcttctccctgcgtcttcacagcatcatccctctatgca

SEQ ID NO: 22890 - DNA, 769 bp, Homo sapiens
acctctctgtcagttggtgggatctgactttgaaaacttgttcgggtctagcaactgggtaaaggatgaggaccttttcactgggatgactgcccttaaccatcttcgattttgtttgattgtacatgttggtcagtacctttgatagctgtccattcattctgtccctagggttactgtgtcctgtcacctgtctccattaatgttcagactctgctgtcactgtattagtaaccacctagcttttgtgatgactgaccacaaccaccttctccattgtttggggcacctgttggcctcactgctgtctgtgaattcagttctgtgatgttctattttatcatcatcccttggctatggaggacggtcccaacaccagtgcattcttcatcactttgctgaaaggtgtgttcttcaggtcctccgccagagcagtcttccggggggttttctgggctaatagtggacccactgcagcatgcacacggtgatgcttctacatgccaaggagcaccaaagattgccagcaaaccaccacaaatctcagttcattttccagggctgctgtcacaaactaccacaaactaggtggctcaaactacagaaatgtatcatctcacaactctggaggctaaaagtgtgagatgaaggtgtcaraggcctggctccttctgagagctctgagtgaagggtttgttctgggccactctccttggcctgtggatggtggtcttctccctgcgtcttcacagcatcatccctctatgca

SEQ ID NO: 22891 - DNA, 720 bp, Homo sapiens
tctcaccccagcctcccaagtagctgggactacaggtatgagccaccaaacccagcttaaatatatatatatatatatwttttttttttttgtagagaagtggtttgccatgttgcccaggctggtctccaactcctgagctcaagcgatccacccatcttggtctcccagagtgctgggattacaggcgtgagccactgcacccagccccacatgtccttttgattctacttcctaaatgtctctccagtctgtcaccttctctgtaaatccactgtggtcaccttcattcaggccactggtacgtttctcctggacttttacaatagcttcccgttgggcgttttgtttccagccttgtcttctacatatatatccaaggcaatcttctaaaaatcaaatctgctcatgtcagttttttgctttaaaactctctgtgactctttgctgcctaaagtggctgtttctgaggtagggtgtgtgtcctcgaggaagcaggtaaggtaattcatgggagcgtagaagaaaaacagaacccttgtttgtatttacctttaatttgatcctttaaacacttgtattttttgtatgctttatttatttacacaatacatgtacattattcataaatataacatgtattatattgggaaaggtatgggtacctttctttttttcttcaccaaaaggatgcatcatcaaaagtgtttggagacctta

SEQ ID NO: 22892 - DNA, 1260 bp, Homo sapiens
gtggggcaccattattggtgcagctgcagatgctgaaggtacctacagccactctgatcattattaataaggttctttccagggtgtggtgaattttgtcaggtctgtgcacatctcctctatgtgccaagattatgagtaatactaaaggagaggaacttagatttactgacttgggatggaaatgggatctactgacaattgagataaaggtcagaggtgattgccaaattataatggcaatggcatttaatagttcaacaagtcatgaaaggcttctgtgcacaaacatctggcattcaagtatattcctgaaagacaatcagaataaaattggctctctcttttgttccaaagtttcttttctcagattttaaggaataggcagaagtctgccttgtgcaggctcaagatcttccttttatccctttcttggctcatcctttaatcacaaacctgtaggtgtaaatcaatacctacttgggccgtgtgtgctctcatctctccatttcgtatcctacagtttttacttacatatcttctaaaattctactcatacatattattagagaggaaagtattatgtctgtagcttcaactatccttcccccccaccatttttagagttatacctgagtgttgttttaatactgagataatttttagacatgtgcttccagatgggtgtttaatgagaagaactgagtgatcccatttattttttgctggccaaattgtttgtgcccactttcatgagtcactaatttttgaggggctaactgctaataggtaggggaggagtagttctaaagaagtgttgtcttagggcaagggtcacgtcratcagcccagcctcactttagggcctcacaaaatctaacttcaggaacacaaagagataaaagcacaaagcctgaattaagaagttctctaacaaactaaagaattacactttttgttaacaaactattaacaaaattgcttctgattacagaggctaaaaggtatttacttttgctagaagatattatcaatggaaatgttttaacattttcttgtgactaatgcacttccaaaagaactaatggtcttagaatatattttcccctttttagaggaaactgcttataatcctatttagcaggtgccagttttagaaataaagttttccttccccaagccatcaagacacatgatatctaaagttctttctaatgcctatgactctcagaggaaaactccagactactcagactgatg

SEQ ID NO: 22893 - DNA, 1260 bp, Homo sapiens
gtggggcaccattattggtgcagctgcagatgctgaaggtacctacagccactctgatcattattaataaggttctttccagggtgtggtgaattttgtcaggtctgtgcacatctcctctatgtgccaagattatgagtaatactaaaggagaggaacttagatttactgacttgggatggaaatgggatctactgacaattgagataaaggtcagaggtgattgccaaattataatggcaatggcatttaatagttcaacaagtcatgaaaggcttctgtgcacaaacatctggcattcaagtatattcctgaaagacaatcagaataaaattggctctctcttttgttccaaagtttcttttctcagattttaaggaataggcagaagtctgccttgtgcaggctcaagatcttccttttatccctttcttggctcatcctttaatcacaaacctgtaggtgtaaatcaatacctacttgggccgtgtgtgctctcatctctccatttcgtatcctacagtttttacttacatatcttctaaaattctactcatacatattattagagaggaaagtattatgtctgtagcttcaactatccttcccccccaccatttttagagttatacctgagtgttgttttaatactgagataatttttagacatgtgcttccagatgggtgtttaatgagaagaactgagtgatcccatttattttttgctggccaaattgtttgtgcccactttcatgagtcactaatttttgaggggctaactgctaataggtaggggaggagtagttctaaagaagtgttgtcttagggcaagggtcacgtcgatcagcccagcctcactttagggccwcacaaaatctaacttcaggaacacaaagagataaaagcacaaagcctgaattaagaagttctctaacaaactaaagaattacactttttgttaacaaactattaacaaaattgcttctgattacagaggctaaaaggtatttacttttgctagaagatattatcaatggaaatgttttaacattttcttgtgactaatgcacttccaaaagaactaatggtcttagaatatattttcccctttttagaggaaactgcttataatcctatttagcaggtgccagttttagaaataaagttttccttccccaagccatcaagacacatgatatctaaagttctttctaatgcctatgactctcagaggaaaactccagactactcagactgatg

SEQ ID NO: 22894 - DNA, 544 bp, Homo sapiens
agccagaaaaaaaataaaagattaatgtataactgtcagaagagttatttaggagctttatttcaaggtctgttttgaaaaaaagtctccataatgtataattaaagttattcataggattttcagcctttgaggagagaaatgttatgaatgtaaacgaaaagcctgtttcctttataaatgkagtcataaaaatgttgggtccatcccctcaatggcagaatgaagcgtggacaagattcctgtgggaaaggccacatggatgataaatgagcatcttactgggacaaaagcacagttctttgtattaaaacattctctgcattatcttaactttaacaaccactttttctaaaacacctaggtaaaacatgctgcaaaaattgcttatcaaggtcagggaaaccagaaagaaagagtccacctttcatgaaagcacttttgcaataacagaatgctattcagttcaaattcaggatattcagataaatttttattgattactatgtaatatcttaatttcattaaaaattaagcctagaag

SEQ ID NO: 22895 - DNA, 544 bp, Homo sapiens
agccagaaaaaaaataaaagattaatgtataactgtcagaagagttatttaggagctttatttcaaggtctgttttgaaaaaaagtctccataatgtataattaaagttattcataggattttcagcctttgaggagagaaatgttatgaatgtaaacgaaaagcctgtttcctttataaatgtagtcataaaaatgttgggtccrtcccctcaatggcagaatgaagcgtggacaagattcctgtgggaaaggccacatggatgataaatgagcatcttactgggacaaaagcacagttctttgtattaaaacattctctgcattatcttaactttaacaaccactttttctaaaacacctaggtaaaacatgctgcaaaaattgcttatcaaggtcagggaaaccagaaagaaagagtccacctttcatgaaagcacttttgcaataacagaatgctattcagttcaaattcaggatattcagataaatttttattgattactatgtaatatcttaatttcattaaaaattaagcctagaag

SEQ ID NO: 22896 - DNA, 544 bp, Homo sapiens
agccagaaaaaaaataaaagattaatgtataactgtcagaagagttatttaggagctttatttcaaggtctgttttgaaaaaaagtctccataatgtataattaaagttattcataggattttcagcctttgaggagagaaatgttatgaatgtaaacgaaaagcctgtttcctttataaatgtagtcataaaaatgttgggtccatcccctcaatggcagaatgaagcgtggacaagattcctgtgggaaaggccacatggatgataaatgagcatcttactgggacaaaagcacagttctttgtattaaaacaytctctgcattatcttaactttaacaaccactttttctaaaacacctaggtaaaacatgctgcaaaaattgcttatcaaggtcagggaaaccagaaagaaagagtccacctttcatgaaagcacttttgcaataacagaatgctattcagttcaaattcaggatattcagataaatttttattgattactatgtaatatcttaatttcattaaaaattaagcctagaag

SEQ ID NO: 22897 - DNA, 551 bp, Homo sapiens
atttttaaaagttatagtctgactactgataaattagttaccaaatatttagcagttaatttgtataacaaataattattatcacttaataatagaatgattgattcaaatggaggataggagacaatgaaaatattcactgaatccagtggccaatggctaatggaatcaaagcaagaatttccaaagttcaayatattataaattactcaaggccaagtgtagtggctaacgcctgtaatctcggtacctggggaggctgaggtgggcagactgcttgagcccaggagtcagaggtcagcctgggcaacatagcaaaaccacatctctacaaaaaaatacaaaaaattagctggatatggtggtgtgcacctgttgtcccagctactcaagaggctgaggtgggaggatcacttgagcccaggaggttgaggctgcagcgagccatgatcgtgccactgcactccagcctgggtgacagagtaagaccctgttgcaatcaatcaatcagtcaattaataactaattaaagatctcattagaattcttaa

SEQ ID NO: 22898 - DNA, 526 bp, Homo sapiens
gaatttcacatcttgtttgaagccaattaggaaaagaacagcagttttgagacagtaaaagcatcctcaaaatcaactaaagccacagaagaagcagctcggaaaaccaagggtaactctaaatatagattatggttataatataaccataaaaatgtaaatataaatgtaaaaattgatatacattttaaacacttatataaatacataattccccagaattacagacattatggggaagtcatcagaattcatggaggacatgaaaatagatggaagggtggctgagcctgttttatctagatgttaaggagaagtgtgactccatctggcatggaaatctacatttctatgggaaaactgtgacactttcattgacagtttctcaamgaaaactgagcagagaaaaatgaccagcagaaaatattaattaccaatcttaagaaaaatcaaatgataaattcagctgggttgaaaaggtctttaaaattccaggcaatgtttaagactaactcactcattagaa

SEQ ID NO: 22899 - DNA, 1913 bp, Homo sapiens
ctaggtggatgatggtgtcagtcacttcagtggagaacaccttaggacaaacaagtttggggcaagagaataagacgtgccatttggagcaggttgagtttgagtaagtttgtacattatccattggaagtgtgcagtgcacggctagtctggracccagaggaaaggcctcaaattatttatgaagtgtctatcataatggaccatttatggagtgactgaccataagtcgccattattctcttatatgaccattttagctgtcacatgctgggaagggattttcttccctctgcatgacatttttattcttaagcaatgctgtacaatggttgttgacctccgcttgaacaatatacagaattaagcaagattctccattccctcttgtaaatcataaacactaacctcactgaacactcccaggtagtaggtttctctcaaatataacctcatacatcccctcgcaccagttgagttgaatacttaccaacagttaacttgattggttcccagacctatttcataccagtgtagttgctgctgtaattacatcatttaaataaatattatatagagccatgaaatatggatgtgaaagtaaagatgtggtttctatgaagacaataaaaataagtttgctaaaaaaattgctgtcaaatgagtgggtaagacaagtatgatagatcaggggaaatcatcagagcttggaagaactcacttattcagattgctttgcatacatattaatttctcactccactttgaggaaagaaagctggaaactgtgcaaaaggattgtggctataattaatgtaagaaacatgttgagagattctaaccagaggacccattttcaaaaagtcttgactctccatagtaaagttaaattgtcagtgtccatttgtaattttacactgaaataaaacgtataaactaagaaccttttaaaaaatatttttctactttaaatgacttatttgattaagtaaccaatattggtcctgatctctcagttaagagagtttctatgatctgtgataaatctgtcaaatgttgtctatagcttgaacttttgaagaaacaaagtgaccacgaagagcctaattctgaagccctcataaagcacaggagatgggatcctctggttgtagctctgactttagtttgtgtttggccacaaacaagttttcctcctctctacaccagttgtttctcttggaaaatggtcattttaaggcaactgaactacatttaaaaaaaaaaaaaaggctgggcttggtggctcatgcctgtaatcccagcacttttggagtcagaggcaggtggaacacgaggtcaggagattgagacaatcctggccaacatggtgaaaacctatctctactaaaaatacaaaaattagctggacctggtggtgtgcaattgtaatcccagttacttgggaggctgaggcaggagaatcacttgaaactgagaggtgacagcgtgctggcagccctcacagccctctctcactcttggtgcctcctctgcctgggctcccactttggcggcacttgacgagcccttcagcccgccgctgcactgtgggagcccctctctgggctggccaaggctggagccggctccctcagcttgcagggaggtctggagagagaggtgccggcgggaatcggggctgcgcgtggtgcttgcgggccagtgcgagttccgggtgggtgtgggctcggcaggccccccactcagagccgccggcctgccccgccggcccctggcagtgaggggcttagcacctgggccagcagctgctgtgctcaatttctcgctaggccttagctgccttcccgtggggcagggctcgggacccgcagcccaccatgcctgagcctccccgctgctccgtgggctcc

SEQ ID NO: 22900 - DNA, 1913 bp, Homo sapiens
ctaggtggatgatggtgtcagtcacttcagtggagaacaccttaggacaaacaagtttggggcaagagaataagacgtgccatttggagcaggttgagtttgagtaagtttgtacattatccattggaagtgtgcagtgcacggctagtctgggacccagaggaaaggcctcaaattatttatgaagtgtctatcataatggaccatttatggagtgactgaccataagtcgccattattctcttatatgaccattttagctgtcacatgctgggaagggattttcttccctctgcatgacatttttattcttaagcaatgctgtacaatggttgttgacctccgcttgaacaatatacagaattaagcaagattctccattccctcttgtaaatcataaacactaacctcactgaacactcccaggtagtaggtttctctcaaatataacctcatacatcccctcgcaccagttgagttgaatacttaccaacagttaacttgattggttcccagacctatttcataccagtgtagttgctgctgtaattacatcatttaaataaatattatatagagccatgaaatatggatgtgaaagtaaagatgtggtttctatgaagacaataaaaataagtttgctaaaaaaattgctgtcaaatgagtgggtaagacaagtatgatagatcaggggaaatcatcagagcttggaagaactcacttattcagattgctttgcatacatattaatttctcactccactttgaggaaagaaagctggaaactgtgcaaaaggattgtggctataattaatgtaagaaacatgttgagagattctaaccagaggacccattttcaaaaagtcttgactctccatagtaaagttaaattgtcagtgtccatttgtaattttacactgaaataaaacgtataaactaagaaccttttaaaaaatatttttctactttaaatgacttatttgattaagtaaccaatattggtcctgatctctcagttaagagagtttctatgatctgtgataaatctgtcaaatgttgtctatagcttgaacttttgaagaaacaaagtgaccacgaagagcctaattctgaagccctcataaagcacaggagatgggatcctctggttgtagctctgactttagtttgtgtttggccacaaacaagttttcctcctctctacaccagttgtttctcttggaaaatggtcattttaaggcaactgaactacatttaaaaaaaaaaaaaaggctgggcktggtggctcatgcctgtaatcccagcacttttggagtcagaggcaggtggaacacgaggtcaggagattgagacaatcctggccaacatggtgaaaacctatctctactaaaaatacaaaaattagctggacctggtggtgtgcaattgtaatcccagttacttgggaggctgaggcaggagaatcacttgaaactgagaggtgacagcgtgctggcagccctcacagccctctctcactcttggtgcctcctctgcctgggctcccactttggcggcacttgacgagcccttcagcccgccgctgcactgtgggagcccctctctgggctggccaaggctggagccggctccctcagcttgcagggaggtctggagagagaggtgccggcgggaatcggggctgcgcgtggtgcttgcgggccagtgcgagttccgggtgggtgtgggctcggcaggccccccactcagagccgccggcctgccccgccggcccctggcagtgaggggcttagcacctgggccagcagctgctgtgctcaatttctcgctaggccttagctgccttcccgtggggcagggctcgggacccgcagcccaccatgcctgagcctccccgctgctccgtgggctcc

SEQ ID NO: 22901 - DNA, 1913 bp, Homo sapiens
ctaggtggatgatggtgtcagtcacttcagtggagaacaccttaggacaaacaagtttggggcaagagaataagacgtgccatttggagcaggttgagtttgagtaagtttgtacattatccattggaagtgtgcagtgcacggctagtctgggacccagaggaaaggcctcaaattatttatgaagtgtctatcataatggaccatttatggagtgactgaccataagtcgccattattctcttatatgaccattttagctgtcacatgctgggaagggattttcttccctctgcatgacatttttattcttaagcaatgctgtacaatggttgttgacctccgcttgaacaatatacagaattaagcaagattctccattccctcttgtaaatcataaacactaacctcactgaacactcccaggtagtaggtttctctcaaatataacctcatacatcccctcgcaccagttgagttgaatacttaccaacagttaacttgattggttcccagacctatttcataccagtgtagttgctgctgtaattacatcatttaaataaatattatatagagccatgaaatatggatgtgaaagtaaagatgtggtttctatgaagacaataaaaataagtttgctaaaaaaattgctgtcaaatgagtgggtaagacaagtatgatagatcaggggaaatcatcagagcttggaagaactcacttattcagattgctttgcatacatattaatttctcactccactttgaggaaagaaagctggaaactgtgcaaaaggattgtggctataattaatgtaagaaacatgttgagagattctaaccagaggacccattttcaaaaagtcttgactctccatagtaaagttaaattgtcagtgtccatttgtaattttacactgaaataaaacgtataaactaagaaccttttaaaaaatatttttctactttaaatgacttatttgattaagtaaccaatattggtcctgatctctcagttaagagagtttctatgatctgtgataaatctgtcaaatgttgtctatagcttgaacttttgaagaaacaaagtgaccacgaagagcctaattctgaagccctcataaagcacaggagatgggatcctctggttgtagctctgactttagtttgtgtttggccacaaacaagttttcctcctctctacaccagttgtttctcttggaaaatggtcattttaaggcaactgaactacatttaaaaaaaaaaaaaaggctgggcttggtggctcatgcctgtaatcccagcacttttggagtcagaggcrggtggaacacgaggtcaggagattgagacaatcctggccaacatggtgaaaacctatctctactaaaaatacaaaaattagctggacctggtggtgtgcaattgtaatcccagttacttgggaggctgaggcaggagaatcacttgaaactgagaggtgacagcgtgctggcagccctcacagccctctctcactcttggtgcctcctctgcctgggctcccactttggcggcacttgacgagcccttcagcccgccgctgcactgtgggagcccctctctgggctggccaaggctggagccggctccctcagcttgcagggaggtctggagagagaggtgccggcgggaatcggggctgcgcgtggtgcttgcgggccagtgcgagttccgggtgggtgtgggctcggcaggccccccactcagagccgccggcctgccccgccggcccctggcagtgaggggcttagcacctgggccagcagctgctgtgctcaatttctcgctaggccttagctgccttcccgtggggcagggctcgggacccgcagcccaccatgcctgagcctccccgctgctccgtgggctcc

SEQ ID NO: 22902 - DNA, 1913 bp, Homo sapiens
ctaggtggatgatggtgtcagtcacttcagtggagaacaccttaggacaaacaagtttggggcaagagaataagacgtgccatttggagcaggttgagtttgagtaagtttgtacattatccattggaagtgtgcagtgcacggctagtctgggacccagaggaaaggcctcaaattatttatgaagtgtctatcataatggaccatttatggagtgactgaccataagtcgccattattctcttatatgaccattttagctgtcacatgctgggaagggattttcttccctctgcatgacatttttattcttaagcaatgctgtacaatggttgttgacctccgcttgaacaatatacagaattaagcaagattctccattccctcttgtaaatcataaacactaacctcactgaacactcccaggtagtaggtttctctcaaatataacctcatacatcccctcgcaccagttgagttgaatacttaccaacagttaacttgattggttcccagacctatttcataccagtgtagttgctgctgtaattacatcatttaaataaatattatatagagccatgaaatatggatgtgaaagtaaagatgtggtttctatgaagacaataaaaataagtttgctaaaaaaattgctgtcaaatgagtgggtaagacaagtatgatagatcaggggaaatcatcagagcttggaagaactcacttattcagattgctttgcatacatattaatttctcactccactttgaggaaagaaagctggaaactgtgcaaaaggattgtggctataattaatgtaagaaacatgttgagagattctaaccagaggacccattttcaaaaagtcttgactctccatagtaaagttaaattgtcagtgtccatttgtaattttacactgaaataaaacgtataaactaagaaccttttaaaaaatatttttctactttaaatgacttatttgattaagtaaccaatattggtcctgatctctcagttaagagagtttctatgatctgtgataaatctgtcaaatgttgtctatagcttgaacttttgaagaaacaaagtgaccacgaagagcctaattctgaagccctcataaagcacaggagatgggatcctctggttgtagctctgactttagtttgtgtttggccacaaacaagttttcctcctctctacaccagttgtttctcttggaaaatggtcattttaaggcaactgaactacatttaaaaaaaaaaaaaaggctgggcttggtggctcatgcctgtaatcccagcacttttggagtcagaggcaggtggaacacgaggtcaggagattgagacaatcctggccaacatggtgaaaacctatctctactaaaaatacaaaaattagctggacctggtggtgtgcaattgtaatcccagttacttgggaggctgaggcaggagaatcacytgaaactgagaggtgacagcgtgctggcagccctcacagccctctctcactcttggtgcctcctctgcctgggctcccactttggcggcacttgacgagcccttcagcccgccgctgcactgtgggagcccctctctgggctggccaaggctggagccggctccctcagcttgcagggaggtctggagagagaggtgccggcgggaatcggggctgcgcgtggtgcttgcgggccagtgcgagttccgggtgggtgtgggctcggcaggccccccactcagagccgccggcctgccccgccggcccctggcagtgaggggcttagcacctgggccagcagctgctgtgctcaatttctcgctaggccttagctgccttcccgtggggcagggctcgggacccgcagcccaccatgcctgagcctccccgctgctccgtgggctcc

SEQ ID NO: 22903 - DNA, 1913 bp, Homo sapiens
ctaggtggatgatggtgtcagtcacttcagtggagaacaccttaggacaaacaagtttggggcaagagaataagacgtgccatttggagcaggttgagtttgagtaagtttgtacattatccattggaagtgtgcagtgcacggctagtctgggacccagaggaaaggcctcaaattatttatgaagtgtctatcataatggaccatttatggagtgactgaccataagtcgccattattctcttatatgaccattttagctgtcacatgctgggaagggattttcttccctctgcatgacatttttattcttaagcaatgctgtacaatggttgttgacctccgcttgaacaatatacagaattaagcaagattctccattccctcttgtaaatcataaacactaacctcactgaacactcccaggtagtaggtttctctcaaatataacctcatacatcccctcgcaccagttgagttgaatacttaccaacagttaacttgattggttcccagacctatttcataccagtgtagttgctgctgtaattacatcatttaaataaatattatatagagccatgaaatatggatgtgaaagtaaagatgtggtttctatgaagacaataaaaataagtttgctaaaaaaattgctgtcaaatgagtgggtaagacaagtatgatagatcaggggaaatcatcagagcttggaagaactcacttattcagattgctttgcatacatattaatttctcactccactttgaggaaagaaagctggaaactgtgcaaaaggattgtggctataattaatgtaagaaacatgttgagagattctaaccagaggacccattttcaaaaagtcttgactctccatagtaaagttaaattgtcagtgtccatttgtaattttacactgaaataaaacgtataaactaagaaccttttaaaaaatatttttctactttaaatgacttatttgattaagtaaccaatattggtcctgatctctcagttaagagagtttctatgatctgtgataaatctgtcaaatgttgtctatagcttgaacttttgaagaaacaaagtgaccacgaagagcctaattctgaagccctcataaagcacaggagatgggatcctctggttgtagctctgactttagtttgtgtttggccacaaacaagttttcctcctctctacaccagttgtttctcttggaaaatggtcattttaaggcaactgaactacatttaaaaaaaaaaaaaaggctgggcttggtggctcatgcctgtaatcccagcacttttggagtcagaggcaggtggaacacgaggtcaggagattgagacaatcctggccaacatggtgaaaacctatctctactaaaaatacaaaaattagctggacctggtggtgtgcaattgtaatcccagttacttgggaggctgaggcaggagaatcacttgaaactgagaggtgacagcgtgctggcagccctcacagccctctctcactcttggtgyctcctctgcctgggctcccactttggcggcacttgacgagcccttcagcccgccgctgcactgtgggagcccctctctgggctggccaaggctggagccggctccctcagcttgcagggaggtctggagagagaggtgccggcgggaatcggggctgcgcgtggtgcttgcgggccagtgcgagttccgggtgggtgtgggctcggcaggccccccactcagagccgccggcctgccccgccggcccctggcagtgaggggcttagcacctgggccagcagctgctgtgctcaatttctcgctaggccttagctgccttcccgtggggcagggctcgggacccgcagcccaccatgcctgagcctccccgctgctccgtgggctcc

SEQ ID NO: 22904 - DNA, 790 bp, Homo sapiens
gcactggggccgcaggtggagctgcctgccagtcccacgccatgtgcctgcactcctcagcccttgggtggttgatgggactgggtgctgtggagtgggggcrgcactcgttggggaggctcgggccacacaggagcccacggagcagcggggaggctcaggcatggcgggctgcaggtcccgagccctgccccatgggaaggcagctaaggcctggcgagaaattgagcacagcagctgctggcccaggtgctaagcccctcacttcccggggccggctgggccggccggccagccgctccgagtgtgggaccgtggagcccacgcccacccggaactcacgctggcccgcaagcactgcgcgcagcccgggttcccgcccgtgcctctccctccacacctccctgcaagctgagggagctggctccagccttggccagcccagagaggggctcccacagtgcagcagtgggctgaagggctcgtcaagtgccgccaaagtgggagcccaggcagaggaggcgccaagagcgagcgagggctatgaggactgccagcacgctgtcacctctcactacctgcttctaatatgtcttgagggcttttctcccctctttaaataagagtcttattctctatatatggttttggaggctggagttctttatcaggcatcaacaaacttttgctgtaaaaggcaaggtagtaaatatttctggttttgtgtatgacagtttctatccaactgctcaaatctgccatagcccaagagaggccacagacaatgtct

SEQ ID NO: 22905 - DNA, 790 bp, Homo sapiens
gcactggggccgcaggtggagctgcctgccagtcccacgccatgtgcctgcactcctcagcccttgggtggttgatgggactgggtgctgtggagtgggggcggcactcgttggggaggctcgggccrcacaggagcccacggagcagcggggaggctcaggcatggcgggctgcaggtcccgagccctgccccatgggaaggcagctaaggcctggcgagaaattgagcacagcagctgctggcccaggtgctaagcccctcacttcccggggccggctgggccggccggccagccgctccgagtgtgggaccgtggagcccacgcccacccggaactcacgctggcccgcaagcactgcgcgcagcccgggttcccgcccgtgcctctccctccacacctccctgcaagctgagggagctggctccagccttggccagcccagagaggggctcccacagtgcagcagtgggctgaagggctcgtcaagtgccgccaaagtgggagcccaggcagaggaggcgccaagagcgagcgagggctatgaggactgccagcacgctgtcacctctcactacctgcttctaatatgtcttgagggcttttctcccctctttaaataagagtcttattctctatatatggttttggaggctggagttctttatcaggcatcaacaaacttttgctgtaaaaggcaaggtagtaaatatttctggttttgtgtatgacagtttctatccaactgctcaaatctgccatagcccaagagaggccacagacaatgtct

SEQ ID NO: 22906 - DNA, 790 bp, Homo sapiens
gcactggggccgcaggtggagctgcctgccagtcccacgccatgtgcctgcactcctcagcccttgggtggttgatgggactgggtgctgtggagtgggggcggcactcgttggggaggctcgggccacacaggagcccacggagcagcggggaggctcaggcatggcgggctgcaggtcccgagccctgccccatgggaaggcagctaaggcctggcgagaaattgagcacagcagctgctggcccaggtgctaagcccctcacttcccggggccggctgggccggccggccagccgctccgagtgtgggaccgtggagcccacgcccacccggaactcacgctggcccgcaagcactgcgcgcagcccgggttcccgcccgtgcctctccctccacacctccctgcaagctgagggagctggctccagccttggccagcccagagaggggctcccacagtgcagcagygggctgaagggctcgtcaagtgccgccaaagtgggagcccaggcagaggaggcgccaagagcgagcgagggctatgaggactgccagcacgctgtcacctctcactacctgcttctaatatgtcttgagggcttttctcccctctttaaataagagtcttattctctatatatggttttggaggctggagttctttatcaggcatcaacaaacttttgctgtaaaaggcaaggtagtaaatatttctggttttgtgtatgacagtttctatccaactgctcaaatctgccatagcccaagagaggccacagacaatgtct

SEQ ID NO: 22907 - DNA, 790 bp, Homo sapiens
gcactggggccgcaggtggagctgcctgccagtcccacgccatgtgcctgcactcctcagcccttgggtggttgatgggactgggtgctgtggagtgggggcggcactcgttggggaggctcgggccacacaggagcccacggagcagcggggaggctcaggcatggcgggctgcaggtcccgagccctgccccatgggaaggcagctaaggcctggcgagaaattgagcacagcagctgctggcccaggtgctaagcccctcacttcccggggccggctgggccggccggccagccgctccgagtgtgggaccgtggagcccacgcccacccggaactcacgctggcccgcaagcactgcgcgcagcccgggttcccgcccgtgcctctccctccacacctccctgcaagctgagggagctggctccagccttggccagcccagagaggggctcccacagtgcagcagtgggctgaagggctcstcaagtgccgccaaagtgggagcccaggcagaggaggcgccaagagcgagcgagggctatgaggactgccagcacgctgtcacctctcactacctgcttctaatatgtcttgagggcttttctcccctctttaaataagagtcttattctctatatatggttttggaggctggagttctttatcaggcatcaacaaacttttgctgtaaaaggcaaggtagtaaatatttctggttttgtgtatgacagtttctatccaactgctcaaatctgccatagcccaagagaggccacagacaatgtct

SEQ ID NO: 22908 - DNA, 537 bp, Homo sapiens
tagccattgtcattgtttgtttctggaagagttcatgtcttccctgttcctacatgactctaattatcttatcagaggtgtccatcgcattaagacatgtccccttagaaaatcttgtcatgaccctttatcatcaggcctaactgtcacagaacctcttatggcacagacaaaataaagtttcagttgatacttacggagttttggtttctccattaaggggctcatcttgctgtttctctagagtgactgggcctattattaggcttgacctcatgagggagaccttacagaaaccagactatatccgtggatggcccatctccagacagacaggagctgttaaaaagaaataaacttcacatttggtgcactattactacataagaactactttggttctccttctgactgattagtaatacaccagagaaatgttcccacaaayaggcagtagcactcttgtctacttaactaagtgcgtgactgctttgcgtggagaaatctgaaggtaatatattctggtaaagtggactt

SEQ ID NO: 22909 - DNA, 501 bp, Homo sapiens
ctctgtgagacatgaaaaatattttctcagtaamtacatcttgacaaggagtagctttcagtggaaataaaacaacattgagaatggaatctatagtttgtggtttaacctttttcctatgagatgtttcttccaaacataaaaggctttaaaaatgcggctttgcgtacttacctaacatgtaattcatggggctgaagtctccttcttgcctgcccccaaagccccctctcccacccctcctgactcaagaggatcatttttcttgttgctgctccatcctcctcaggttcccttcttcctgactctgtttattcttgttttacaacaagctgctgtcagtaagaccttcctcagaatccatacaaatctcaatattttaaggaaaactaagctttttttccaaatataatatcaacctatttccattgtagaaaaattggaaagtgaaaaaatggaaaaaaataagtaaattattattctacaccccagaaataactg

SEQ ID NO: 22910 - DNA, 520 bp, Homo sapiens
ctttttatttgaactatctcctggccaaatcccagaaatgaataggctctcccagagtatacagtgaggtaatgtcttggtaaattgagttagaaagaatgacatttgcaaaattttacagaaattaaaactactgttataaaatccatgtgttgtccaaaaatatttataccaaaaatcttaagaaaatcttcttgtcctaagcctccttacctctttctttatcctagaacctcatttgtgactgattcttcatatctttatctgcatgcctctctgagtttctccttatgtctatgccattcccaatgtctttccagaacattctgttttttgaaaacattattcctttattaatgctactttaagttcatactgatgtactggatagcctcattttgctgaccttgcagccagcaytagcctgtgtggaaaagactcctgggtccgtgttcattcacatctcaccgcaacctcagaatatgcactttaatttatttattagcgttttagagggaaa

SEQ ID NO: 22911 - DNA, 520 bp, Homo sapiens
ctttttatttgaactatctcctggccaaatcccagaaatgaataggctctcccagagtatacagtgaggtaatgtcttggtaaattgagttagaaagaatgacatttgcaaaattttacagaaattaaaactactgttataaaatccatgtgttgtccaaaaatatttataccaaaaatcttaagaaaatcttcttgtcctaagcctccttacctctttctttatcctagaacctcatttgtgactgattcttcatatctttatctgcatgcctctctgagtttctccttatgtctatgccattcccaatgtctttccagaacattctgttttttgaaaacattattcctttattaatgctactttaagttcatactgatgtactggatagcctcattttgctgaccttgcagccagcactagcctgtgtggaaaagactcctgggtccgtgttcattcacatctcaccgcaacctcagaataygcactttaatttatttattagcgttttagagggaaa

SEQ ID NO: 22912 - DNA, 649 bp, Homo sapiens
ggaaaactgaataaataacgagcatgaagtgcttcctaaacctttaaggacctcaaaaaacaaaacaaaacaaaactttcaacaagcagatgtagaaaatttaaattatatttggcctacaagtaaaggttactccatgcttccctacctcaaatgtcctctcccatctctctggtactgagaaaatctgtgtcgcctgttataaggcagtctacacaagaccaacacgctaacccactgccacctcagggttatcaaacatttacacagtggcccagacaaaaatatcccacggaaacaaaacaaaaacaaaaacccagagagaaaaaccaccctttaaagatttggccttgggttttaaatttgcccatccctttttaacactatgtattgacaatctttccttcaatgatgccttgttctaatttctgcttttcacatccattaatggcacatgataggccaggggttgctgccatagcgtaaacggaaaaggtgcccgtaatycgggtgtgtaatgtactgggccatattctggtccccagttttcatgggtttcccaaaggctacccactggcttatgagtatttctagcccttagtggagtaaaaatattaacacctaacacttgattcccacctttaagata

SEQ ID NO: 22913 - DNA, 2283 bp, Homo sapiens
tgcgtatctagaatagtgcctggtacattgagggcactcaaacatgtttgcagaaggagggaagaatggaaagaggggtgcaaaggggagggaaggagatagttcaattaccttcccgaggcttagcagctggggggtctctaagcctccgctcgccctcaggcagagatggtgtgaggggcagctggcaggcagagtaggtgggctgggggctggtgtagggggcagggcctgctggtctgcaggcgtgctgccatccagagtcgctgagagagcagatgtgtgccaggatgctgttcccgcagccacctggacctctgcctgtactgactctccccatgtggttctctgcagacccagatgtggtgtccctggaggcagcagacagacccaacttcttccttcacgtcacagccaacgggtctctggagctggctaagtggcagggccgtgacaccttccaacagcatgcctccttcttgctgcaccgggggacacggcaggcaggcctggtggccctggagtccctggccaagcccagctccttcctctatgtgtcgggcgcggtgctggccctgcggctgtacgaacacacagaggtgttccgccggggcacactcttccgccttctgggtaggcgaccccctgccattgccctcggccctttggccctctcagtccactgctcttcccaccctgtccccacttcacccttccaattacccctaagaagcagaatcctccttctcctggcacaggggccacatgggtgccaccctgagatgagaggtggcccagcctccatgttgacagcttagggagccacggacagtgtgcttggggtccagccaatttcctgggtcctgccttctgccacaggccaattacactgtctaaaaatatagcagcctttgtggaagtgaggggaggtgtgatcctggctgcaacatgcgtagccrctggctcagttttcttgctgatgaggtcacatgtctgccccatgagttcaaagactgcacaagggggataggtctgggggccagcaacctcctctctcaatggaaggcccaagcccctggacagggatggggcaactccccgaccttccaccaacgccaaggggatccagggcctgccctgccaggtgtgtctgtccccaaaatattgttctctgcctaaaccctggagaaggcgatcataatttcttcactgttttctctgtcttgcatggggcttgggggtacctgtgtctgtgggtggatccatttgcatgtacacgtatgtaaatgtgtcttcagccagcctccttatttcatcacccaccccacccaagccagggctgggtgagctcattcttcccttcagcggtcagttatcgagtctgcccttaaacttgacatgggacagatttatcactggccatgatgacaagacttgctcatgatgggagtatttgtgtccctctccggaagacactagggcagagtggcatgagcccaggctttgaagctggacagccttgagttcaaatcctgaccctggtcctagacccttggaggagaaccctcatctccttgacttggtttcttcacctgtagaatggggatatttgtctcggaagtgtgctgtgaggactggctgtgtctcgcgggctttgccttgtgctggcacatagtaggtgctccccaaatgtaagttagacttttggaaaagcaggtttctttacagctggcagcagtgttcaggttagggcgtctggaggagctgccggtgggggatgctccctggagcctgcttcggagcctacccacacctccctgttcaggctgtgtgttcagaaactggtcacttgtgccaaggtagcctggggtctacttgtctgcctccaagccccccataggctgcagacttttccctcatttgccaaggtgctagccacagggcctcttttgagaacatctcctctgaaaacctttcactttctcagcatcatctgtgcctgggtttcctcttctctaaagtgggggtaataatagcgcctacttcctaggacgatgatgaggttgaatgagtaaatccgtgtgagatattttgggtagcgcccagtgctgtttaagagttagcccagccgccagggcagtgagggtggtgctcacacgacctgcactctcaggcccttcaggggccctctgggaacagagagggctgagtcgggggaataacacctcccttgcaagctctctggggctaggtgcccaggaacgctttgggctagaggggaag

SEQ ID NO: 22914 - DNA, 1155 bp, Homo sapiens
ggatccccaggtcaccaagaaccacagctatttgatacaccaagaccctttgtgatgattgagtgtaaccctctggtttggggaccacatggtttcccagccaggcactgaaagagttgatgacagatgacaagcatcttgatttctatccaaggaaggaaaactatgtggaaccctgtggtcactgtgtgttcccataggagagggacagtggcattgaagtgaggctccaggagccattagcaggctagggtcctctctccttcacccagaaaagggcagggctccagttaaagttactggcctcacacttggccaccaaggaagaaggaagcatcctaggaagagccactggtcaccagacactgcctctctggtggctcagtcccaactggggcttcccaggagttcacagcttccaggactccctggtgccctggagaacatggcaggctactccgtctcttggagggagggctgcagcttcctctcaactgcatgctcaactgctgtgagctcccagctcctcatgcctgtccactggcagacctgagcttctgagactgctcctgcttccctgtaagaagttttgctgcacctcagctcttggacccccttctctccaccccaccctctcacaggctgtgggggcattcctcctcccagactggggacctcaggtagcctttctttcccttttccctcctgcctcagagggagacacagatatttcatggagtacctgtttcctgagcacttgggggattctcagggctccatccccgcctggccccatcaccccaggccctctgggtaggtctgtgctctctgactccaccccctgtactctccaagaccagctcctcstctcccccactaatactgggttttgcaaccccctcttctctacccttctctacctgctgattcaagatccttgggggaagaggagggaacactcactgcttgggagctgctgaatcctctgaccaggggatgctgaagaaggtgactaaggtggtttccaagaccctggcctggaatattcccactgcccttctctgtgagttattctcctctacggctcctgcatcttcagaacaaacaacagcagagcacgtgactgctggaaacgcccagatggctccagtcaca

SEQ ID NO: 22915 - DNA, 1869 bp, Homo sapiens
ggagtctcgctctgtcgcccaggctggagtgcagtggcgggatctcggctcactgcaagctccgcctcccgggttcacgccattctcctgcctcagcctcccaagtagctgggactacaggcgcccgccactacgcccggctaattttttgtatttttagtagagacggggtttcaccgttttagccgggatggtctcgatctcctgacctcgtgatccgcccgcctcggcctcccaaagtgctgggattacaggcgtgagccaccgcgcccggcctgaacaaagggttctgatgttaaaatgcatgcaaaagcataccaagtttcctcctaattttattattctaccattctaagatggagagtggtggctgctatggtttggatatgtgtccccacccaaatctcattttagttgtaatcccccatgttggagatagggcctggtaagaggtgattggatcatagtggtggatccttcgtgaacggtttagcaccacccctttggtgctgttctcatgatagagttctcacgagatctggttctttaacagtgtgtgatagctcccctctctccctccctcctgccctggccatgtgaagtgctgctcctcctttcaccttcagccaccattctaagttttcccaaggcctccccagaagccaagyagatgccaccatgcttcctgcacagcctccagcaacatgagcccaattaaacctcgtttctttataaattacccagcattaggtatttctttacagcaatgtgagaatggactcatacagtggcctaaatcacatttttggacagaacaaacttcataaagggactatggctttggtaataatatccaacaagccccctaaccaataaactcaccttctttggggttcctcttacctggggcactttcccagtctacatctctgttggaattgctcccaccacctactcccagtctgtagatgtgggctaaggcagccatgtttgaaccatgtggctttagtcatttcaataacagccattgggatcaaaggtaacccttatcctaatacaggaaaatcaggtccctcttcctcccacttatgcaaaccatgttaagtaccctaatccattaggaaatgtgcttattctggttggagacagcctgtgaacaaatggtacctctgtctgaattacaaaaaggacctcttgtggtggaaggcgtggagaagcagagcatgggttgtatttcaggtcccacttgcccccttggctaggcactgtcacacaggacacagcccgcatatccatcagcagtacccctgcaatagcttagcccagggattggcaaacgagggtctgtgggccaaattcagcctgtcccgtttccacaagtaagtttactagaacagagccatgcccatttgtttactattatttgtggctactttggtgctataagagcagagttgaatagttgctacagagactatacggtttgcaaagcctaaaatatttattaactggccttggcttagcccatgtctgatattcattttcttcaggtccatactccaaaataatgaaatgagtctactgctgagtacagaatatagcaccaactattggagctgaaagggtgctactgactacttggtcggcatttgcttttaaataaaatgcaatgctggatcctatggattctaagaatatatggatcctatggattctaagaatatatggaattttgtttctatttaagagaaatggatggggaggaaggaaggaggagagaggaagtgggaaagcggaaaggggaggggggaagagagggagagggagagagaaaacaaacactagcccatccgaagaacttttcaaaac

SEQ ID NO: 22916 - DNA, 1109 bp, Homo sapiens
ccctggagagatgggatgtccctttatgactgagtttccctgaactcagtggggtgctgtgggctctctggatgccattatgatgaggctggagatgctccttgcttggctaaatcctcacatgttaatatttggcccgcctgttccgcagtgattgatattaagggatgagagtttttcctgaattttttcccgcatttttcaagcagaggtcacaatgacctgctgagaaggcaagaatggctatagcaatttagaagaaacatgacaatcacctcttgcttggtagaaacaggcaagggagtgatagccccaaaggaggagagagactggttattctaaagagtgcaatggagtcacaaagtatgaatgagcaggagagtagttggggatgagagatgtggagtaggacttatcgttactttacagtttgtggtttgttaatctgaactcttcttctctgccccaaagggaatctttcatctgtcatagtggttaagagcagagccttggtgtcagatgtacttgggtaagagctctgccacttagaagtatgccttggtcagcttgcctggcctctctaaaccttggtttcctcattattaaagataataattcctgttatatrcattaatgaaaaataaacatcagatcacctataatggtacctgccaaataattcaatgacactaaagagtggctagtgatagtagtggtagttggaatagtggccgaggttatggtattggtgttgaggatggtggtaacggcagtagaagcagaaaaggctgtaatacttgcaggctccagcgttttcaccgtatgattcaacggtcctccaagggcaccacagcagatgtactggcttggagagaaaccagagtttgttggcctcaccgctctactgcctcctcaaaagtatacttttcccaccacttcttccttcttttaatggagccagatttacaaatggaaaaaataaaacgggcctatatttctgacacctgcctcacctgtgatcctgagacttggcagcaaagatttcccaagggccatggcagaaactagtctataagtcttcctctttggggacccttgttccctttcct

SEQ ID NO: 22917 - DNA, 522 bp, Homo sapiens
caccataatccccttatttaagatgtgtgagctataaaaataccaaaataaataggaatttcttttctttttttctttttttttttttttttgttgaaatggagtttcactcttgttgcccagggtggagtgcaatggcgcgatctcggctcactgcaacctctgcctccagggttcaagtgattctcctgcctcagcctcccgagaagctgggattacaggcgtgtaccaccacagttggctaatttttgtatttttagtagagacagggtttcaccatgttggccaggctggtcttgaactcctgacctcrtgatctgcccacctcgccctctcaaagtgctgagattaaaggcgtgagccactgcacctggccccagaaataggatttcattgttatattactcttccttacatcgctcttcttgtcattaaaaataatttctctaataattttaaaaagattaagaaaataagtctttatcaaaatagtgactcagtttttcatttttatcaattagc

SEQ ID NO: 22918 - DNA, 506 bp, Homo sapiens
gctcttaactttttagttgtaaattattctaaaaactacacgccatccctaaatacaagggtatacctaagcaatcagagtatgattacacaagaactattaggaaaaacccaccttcctaaaagacagcaactttattgaggactagagagccacacatcatgtggctttgcaaatgttctacataagtaaactctactgccaccttgctattaaaaaccaggagatcttcaggatatagcccttctgagtctcaaagcatatttaagagacttactgtgtctggtgacttaaatgaacttccatcatggctgggatgaggtgaagtggtttctgcagtatwtgcagattctggacttggtacaggagaaattcgacccaaggtttgtgcaaatttagcttccttcttatttgaaataagataactgatatctttgctgagaaattcttcaactcgctagaagagaacaaagtatttttatttataaatttgttttaagaaacac

SEQ ID NO: 22919 - DNA, 506 bp, Homo sapiens
gctcttaactttttagttgtaaattattctaaaaactacacgccatccctaaatacaagggtatacctaagcaatcagagtatgattacacaagaactattaggaaaaacccaccttcctaaaagacagcaactttattgaggactagagagccacacatcatgtggctttgcaaatgttctacataagtaaactctactgccaccttgctattaaaaaccaggagatcttcaggatatagcccttctgagtctcaaagcatatttaagagacttactgtgtctggtgacttaaatgaacttccatcatggctgggatgaggtgaagtggtttctgcagtatatgcagattctggacttggtacaggagaaattcgacccaaggtttgtgcaaatttagcttccttyttatttgaaataagataactgatatctttgctgagaaattcttcaactcgctagaagagaacaaagtatttttatttataaatttgttttaagaaacac

SEQ ID NO: 22920 - DNA, 938 bp, Homo sapiens
tgttagaggtgggggctgggaggtgaccagtgccccaggggagtgcaggatctgcctygcacctctgcctactgcagtgaggacatttggggaggctcatcctgggcactgaagcacattgggcagcatccctggcctccactcactccacgccaggagcagccccaaggtgggaccaccacgaatgcccccaggcatggccaagcgctgcccccatgagagcctgggcccaggccagcagctgtgtccacccttgtaccctccctcctgtcgtctgggaaatggactgtcacccccactgtgggaggcaaggcagaggggtggggggcaaagacagatccgggcactaacacagctcccaagggaccaccgggccccagttgggtgccgtgttgtttcccaggctcttcccttgggacaaatgcgctgtgtcacaaatgccagcagcaactagggcagcgggtgtggggcgtcggacacgttacactctctgcatttctgcaaacctaagattattctaaaatacaacgtttattaaaaaaacatgcgatcttgccaataggccaattccatgagaacaaaagattttttttcccacctacaagtctttttagagaaacaaacggaactatttccagatgaggcggggtgtctgggaggggctgtgggtggtctggggctggtgactggtgaggttgggtggccctctgggggtccgggaggcactttccgttttgcttctgttggagatgttcccgtcggatgctgaagaacaagcctgccggctgggccactccgacctgggctgtggcacccgtgtggccctcggccctcctggcctgagaaaggggagtgagaaggagccactgtcctgatatgggcaaaactcggggtcactggtctcatgctccaaggccccgtgagcaggccaggtgggg

SEQ ID NO: 22921 - DNA, 938 bp, Homo sapiens
tgttagaggtgggggctgggaggtgaccagtgccccaggggagtgcaggatctgccttgcacctctgcctactgcagtgaggacatttggggaggctcatcctgggcactgaagcacattgggcagcatccctggcctccactcactccacgccaggagcagccccaaggtgggaccaccacgaatgcccccaggcatggccaagcgctgcccccaygagagcctgggcccaggccagcagctgtgtccacccttgtaccctccctcctgtcgtctgggaaatggactgtcacccccactgtgggaggcaaggcagaggggtggggggcaaagacagatccgggcactaacacagctcccaagggaccaccgggccccagttgggtgccgtgttgtttcccaggctcttcccttgggacaaatgcgctgtgtcacaaatgccagcagcaactagggcagcgggtgtggggcgtcggacacgttacactctctgcatttctgcaaacctaagattattctaaaatacaacgtttattaaaaaaacatgcgatcttgccaataggccaattccatgagaacaaaagattttttttcccacctacaagtctttttagagaaacaaacggaactatttccagatgaggcggggtgtctgggaggggctgtgggtggtctggggctggtgactggtgaggttgggtggccctctgggggtccgggaggcactttccgttttgcttctgttggagatgttcccgtcggatgctgaagaacaagcctgccggctgggccactccgacctgggctgtggcacccgtgtggccctcggccctcctggcctgagaaaggggagtgagaaggagccactgtcctgatatgggcaaaactcggggtcactggtctcatgctccaaggccccgtgagcaggccaggtgggg

SEQ ID NO: 22922 - DNA, 938 bp, Homo sapiens
tgttagaggtgggggctgggaggtgaccagtgccccaggggagtgcaggatctgccttgcacctctgcctactgcagtgaggacatttggggaggctcatcctgggcactgaagcacattgggcagcatccctggcctccactcactccacgccaggagcagccccaaggtgggaccaccacgaatgcccccaggcatggccaagcgctgcccccatgagagcctgggcccaggccagcagctgtgtccacccttgtaccctccctcctgtcgtctgggaaatggactgtcacccccactgtgggaggcaaggcagaggggyggggggcaaagacagatccgggcactaacacagctcccaagggaccaccgggccccagttgggtgccgtgttgtttcccaggctcttcccttgggacaaatgcgctgtgtcacaaatgccagcagcaactagggcagcgggtgtggggcgtcggacacgttacactctctgcatttctgcaaacctaagattattctaaaatacaacgtttattaaaaaaacatgcgatcttgccaataggccaattccatgagaacaaaagattttttttcccacctacaagtctttttagagaaacaaacggaactatttccagatgaggcggggtgtctgggaggggctgtgggtggtctggggctggtgactggtgaggttgggtggccctctgggggtccgggaggcactttccgttttgcttctgttggagatgttcccgtcggatgctgaagaacaagcctgccggctgggccactccgacctgggctgtggcacccgtgtggccctcggccctcctggcctgagaaaggggagtgagaaggagccactgtcctgatatgggcaaaactcggggtcactggtctcatgctccaaggccccgtgagcaggccaggtgggg

SEQ ID NO: 22923 - DNA, 938 bp, Homo sapiens
tgttagaggtgggggctgggaggtgaccagtgccccaggggagtgcaggatctgccttgcacctctgcctactgcagtgaggacatttggggaggctcatcctgggcactgaagcacattgggcagcatccctggcctccactcactccacgccaggagcagccccaaggtgggaccaccacgaatgcccccaggcatggccaagcgctgcccccatgagagcctgggcccaggccagcagctgtgtccacccttgtaccctccctcctgtcgtctgggaaatggactgtcacccccactgtgggaggcaaggcagaggggtggggggcaaagacagatccgggcactaacacagctcccaagggaccaccrggccccagttgggtgccgtgttgtttcccaggctcttcccttgggacaaatgcgctgtgtcacaaatgccagcagcaactagggcagcgggtgtggggcgtcggacacgttacactctctgcatttctgcaaacctaagattattctaaaatacaacgtttattaaaaaaacatgcgatcttgccaataggccaattccatgagaacaaaagattttttttcccacctacaagtctttttagagaaacaaacggaactatttccagatgaggcggggtgtctgggaggggctgtgggtggtctggggctggtgactggtgaggttgggtggccctctgggggtccgggaggcactttccgttttgcttctgttggagatgttcccgtcggatgctgaagaacaagcctgccggctgggccactccgacctgggctgtggcacccgtgtggccctcggccctcctggcctgagaaaggggagtgagaaggagccactgtcctgatatgggcaaaactcggggtcactggtctcatgctccaaggccccgtgagcaggccaggtgggg

SEQ ID NO: 22924 - DNA, 938 bp, Homo sapiens
tgttagaggtgggggctgggaggtgaccagtgccccaggggagtgcaggatctgccttgcacctctgcctactgcagtgaggacatttggggaggctcatcctgggcactgaagcacattgggcagcatccctggcctccactcactccacgccaggagcagccccaaggtgggaccaccacgaatgcccccaggcatggccaagcgctgcccccatgagagcctgggcccaggccagcagctgtgtccacccttgtaccctccctcctgtcgtctgggaaatggactgtcacccccactgtgggaggcaaggcagaggggtggggggcaaagacagatccgggcactaacacagctcccaagggaccaccgggccccagttgggtgccgtgttgtttcccaggctcttcccttgggacaaatgcgctgtgtcacaaatgccagcagcaactagggcagcgggtgtggggcgtcggacacgttacactctctgcatttctgcaaacctaagattattctaaaatacaacgtttattaaaaaaacatgcgatcttgccaataggccaattccatgagaacaaaagattttttttcccacctacaagtctttttagagaaacaaacggaactatttccagatgaggcrgggtgtctgggaggggctgtgggtggtctggggctggtgactggtgaggttgggtggccctctgggggtccgggaggcactttccgttttgcttctgttggagatgttcccgtcggatgctgaagaacaagcctgccggctgggccactccgacctgggctgtggcacccgtgtggccctcggccctcctggcctgagaaaggggagtgagaaggagccactgtcctgatatgggcaaaactcggggtcactggtctcatgctccaaggccccgtgagcaggccaggtgggg

SEQ ID NO: 22925 - DNA, 938 bp, Homo sapiens
tgttagaggtgggggctgggaggtgaccagtgccccaggggagtgcaggatctgccttgcacctctgcctactgcagtgaggacatttggggaggctcatcctgggcactgaagcacattgggcagcatccctggcctccactcactccacgccaggagcagccccaaggtgggaccaccacgaatgcccccaggcatggccaagcgctgcccccatgagagcctgggcccaggccagcagctgtgtccacccttgtaccctccctcctgtcgtctgggaaatggactgtcacccccactgtgggaggcaaggcagaggggtggggggcaaagacagatccgggcactaacacagctcccaagggaccaccgggccccagttgggtgccgtgttgtttcccaggctcttcccttgggacaaatgcgctgtgtcacaaatgccagcagcaactagggcagcgggtgtggggcgtcggacacgttacactctctgcatttctgcaaacctaagattattctaaaatacaacgtttattaaaaaaacatgcgatcttgccaataggccaattccatgagaacaaaagattttttttcccacctacaagtctttttagagaaacaaacggaactatttccagatgaggcggggtgtctgggaggggctgtgggtggtctggggctggtgactggtgaggttgggtggccctctgggggtccgggaggcactttccgttttgcttctgttggagatgttcccgtcggatgctgaagaacaagcctgccggctgggccactccracctgggctgtggcacccgtgtggccctcggccctcctggcctgagaaaggggagtgagaaggagccactgtcctgatatgggcaaaactcggggtcactggtctcatgctccaaggccccgtgagcaggccaggtgggg

SEQ ID NO: 22926 - DNA, 340 bp, Homo sapiens
agtgcatgcccggcacatagtagggacctagtaaatgctgtttttgtttttttcttgtataaagatgcactttgaaaaagaaaaaaaaaaacccttacagatgtgcctcagaattatacagatgtacatttactgacagtgacacttttttaaaactgtacttcctgttttaaagaaatgtgcaggttcgaagctgggcgcagtggctcatgcctgtaatcccagcactttggcaggtcgaggcaggcgaatcacaargtcaggaattcgagaccagcctggctaacttggtgaaaccccgtctctactaaaaatacaaaaaattagccaggcgtagtgg

SEQ ID NO: 22927 - DNA, 573 bp, Homo sapiens
ctttgatgaagagtgaatactgatggagaratatgataggacaaaaagggtgtgatctagtgtagataaactggggaatttagcaaggcctgtttgttcaggttcctctctgtgacccttcatcttcagagatgagcatgttcctttcttccagggatcgggaggccctcacatgagtgtcttctgacctgcttcttgggaatgttggaaaagctttcctaagctgtatgccctgcatcggggagaagcatatgtgtgggtgaggaggggaggtcagagagactttcctgcttctgtttttttaatatgccaaggtgccgtattttgagtagtgtgtcctgaatcccatcatccttttcaatgtaacttttcattaaatgcagtgttctaggataagggttagcaaatgacttctaaaaaaacaccagatagtaaccatctttgtctttgcagcccataaagtatctgttgcaactactcaactctgttgttgcagcacaaaagcaatagtagaaaatacatagaccaagaagagtggctatgttccaataaaacattttttgtagatagtaa

SEQ ID NO: 22928 - DNA, 569 bp, Homo sapiens
tatcctccaaacgcagcaaaatattacacaaggtccagggcaaggcaggatggccacctcgctcactcatcacagctgtcctctgacctgagcagggccgttctgtctcagacctggagaccccgcactcagggcgttcaggaactccccgacccaccaggagcctctcctggtgtctcccagggattgtcaatagttccattttccttgaagaacttgttttcaggtatgcacttctctaaacacgtawgcattattttttctattttaaatttaaccacgttgttttatttttaatcacatctacactttgtaaatttggaaacggagtgattttccatgttcagtaatgatagcaagcttccttttaaaatacgttttactttttatcttcttttttttttttttttgagatggggtctccctgtgtcgcccaggttggagtgcggtggccgatctcggctcactgtaacctccgcctcccgggttcaagtgattctcctgcctcagcctcctaagtagcaggactacaggcacacgccatcacgcctggctgatttgtgtatttt

SEQ ID NO: 22929 - DNA, 569 bp, Homo sapiens
tatcctccaaacgcagcaaaatattacacaaggtccagggcaaggcaggatggccacctcgctcactcatcacagctgtcctctgacctgagcagggccgttctgtctcagacctggagaccccgcactcagggcgttcaggaactccccgacccaccaggagcctctcctggtgtctcccagggattgtcaatagttccattttccttgaagaacttgttttcaggtatgcacttctctaaacacgtatgcattattttttctattttaaatttaaccacgttgttttatttttaatcacatctacaytttgtaaatttggaaacggagtgattttccatgttcagtaatgatagcaagcttccttttaaaatacgttttactttttatcttcttttttttttttttttgagatggggtctccctgtgtcgcccaggttggagtgcggtggccgatctcggctcactgtaacctccgcctcccgggttcaagtgattctcctgcctcagcctcctaagtagcaggactacaggcacacgccatcacgcctggctgatttgtgtatttt

SEQ ID NO: 22930 - DNA, 569 bp, Homo sapiens
tatcctccaaacgcagcaaaatattacacaaggtccagggcaaggcaggatggccacctcgctcactcatcacagctgtcctctgacctgagcagggccgttctgtctcagacctggagaccccgcactcagggcgttcaggaactccccgacccaccaggagcctctcctggtgtctcccagggattgtcaatagttccattttccttgaagaacttgttttcaggtatgcacttctctaaacacgtatgcattattttttctattttaaatttaaccacgttgttttatttttaatcacatctacactttgtaaatttggaaacggrgtgattttccatgttcagtaatgatagcaagcttccttttaaaatacgttttactttttatcttcttttttttttttttttgagatggggtctccctgtgtcgcccaggttggagtgcggtggccgatctcggctcactgtaacctccgcctcccgggttcaagtgattctcctgcctcagcctcctaagtagcaggactacaggcacacgccatcacgcctggctgatttgtgtatttt

SEQ ID NO: 22931 - DNA, 759 bp, Homo sapiens
agaattgactacagaccgaacagcctgtgtttatggataactgagcttcacacctctcactgaaggtgagaaagtcctattgaagatgacaaagcccttatcacagtgcctggtacaaggtgggtacccaaatgtgtgtccctataagacagcagcaaagaaactgttactcctcaaaaactctcatctccactgaatgggtataggamatagaatcttcctgtacttaagcaacttttaaatagcactttatacactctcaaaagatcaattacatcagagtagctatggcttgtgaaagtaaaaaagggaagtgagcaatatcttaagaatacctggcagataagaaatgcagctgttatgattgcctaactgaccacctgtttcctgttgaaggagccagttgtactagtggagagattttaaaaggaattaaaatacattcttcaaatttacatcaaaatggatatcatactatctactgtttcatgattaagaacacatacaaagcccttcttttatcatgcctatagttcctggtgttcctgaaaagttatagtgagactcaactatgtactgaaagaaaggagaggtagaaatcatactcagcagcaaatgggatgcctgaatctgaatcccagctctgcagtttactaaccatgtgactgtagaaaatgttccaatctctcttatttttctcatctcttaaatggtgatactaataatagttacatcctagggtgttgtgagaacgaaatg

SEQ ID NO: 22932 - DNA, 552 bp, Homo sapiens
tttttctttccatgatgagcatttactctttcaacagccaaagatcatttccacgttcttctggtaatgaaactgagcaggtgtcccacagagctgatgttcgtggtttctttgaataaacatagaagttggccctcctagttttaaaacctgagaaagttgcatttgtcttatctgagttcctttccaaggaaaccagccatcaggcctcccaratagtagcaaggagctgaaagtcaccagatcactgcatttggacaatcagatgcccgacactttatctgttaagtttgcctaactgaccacttgcttcccattgaccagctgctcttctttacccctccctaattcctgttttcccacacatggttacatttcttccctgctatatcagctcctaattttagtcagtcagggagatggatttgagacctcctggcctcttggctgcagcactctattaaaggcttcatctttggcaatacttgtttcagtgataggctttctgtgaagcaagaaacaggatctagaccgaacatctggtgttttggt

SEQ ID NO: 22933 - DNA, 552 bp, Homo sapiens
tttttctttccatgatgagcatttactctttcaacagccaaagatcatttccacgttcttctggtaatgaaactgagcaggtgtcccacagagctgatgttcgtggtttctttgaataaacatagaagttggccctcctagttttaaaacctgagaaagttgcatttgtcttatctgagttcctttccaaggaaaccagccatcaggcctcccaaatagtagcaaggagctgaaagtcaccagatcactgcatttggacaatcagatgcccgacactttatctgttaagtttgcctaactgaccacttgcttcccattgaccagctgctcttctttacccctccctaattcctgttttcccacacatggttacatttcttccctgctatatmagctcctaattttagtcagtcagggagatggatttgagacctcctggcctcttggctgcagcactctattaaaggcttcatctttggcaatacttgtttcagtgataggctttctgtgaagcaagaaacaggatctagaccgaacatctggtgttttggt

SEQ ID NO: 22934 - DNA, 873 bp, Homo sapiens
gatccttgtaaaatacttaggaaaagtgagattcctagacagagaagattctaaatctgcacattgctgaaaaaccagatgcgatatattgaaaagcatttactttgggtgttttatgtaagtgagctagtgccacagaattgaggaaaaaaagcctaaaacacaagaaccaccaccaccacaacaaaatctaacttgagatgaacaaaaaggaaagaatgtttcaagggtaagataaatttcctggagtgcaacagtggtgagctgatatgatatgactttttttaatgcaaattacttccaattcacttgacatatgagggaacaatttgaacatgtgtctgcttgagcatagcataaaatttgagccaactttctatgtaccaatgtgaaattttgcctctgagaaacactaggtaaatgcaataaaatctgcacccaggtcaattgatctatgtaagaatacacgcagaaaatcaatcatctcccagccacctcagttcacagtgtggtataagctcacccatcctggtgttacaaatttccatcagatttcagacaacttcaggacaactaaaaaacagcaaacatttcttccagtgcccacttccatgagtaaacttcaggttttgagtaaacttcaggtttttcaaggcaaaatgtcatatttattacagtatctatgcatttcttaacaatgaccatgtgcaaaactatgctacccttttccttgggttcttattttttattatttattatcatatttattactttattttgaatttttaaaaggaaaagtctcactgtgttccctaagctggagtgcagtgataagatcttagctcmctgcagcctcaagctcctgggctcaag

SEQ ID NO: 22935 - DNA, 931 bp, Homo sapiens
agcactggccaaaggagagacagctctcattttataaacatccatatctcctgctccaccaacttcctaaatgccttcttaaatttttgtgcaggctcctaagaaataatatcagccagcacctgctgcmaaggggcatcccaggatgtgtgactgaatcctgtggcaacactgcgaggttggcatcattacccccacaccctccccaaccgaggaaagagctggaacctggggagatgaatgacttgatgtcccacagccaactggcctgcaggcccagggtgagagctctccttctgaaaggctttcctgccacctggagctgagatttgccttgcctgcttcttaaagcaatagctcctcttaccactccttcaaaatacctctcaaatccaaccgcttgtcatcacagccctgctcttaccctaatctaagctactcacacctcttggtcaaagactactatagcctcctctctggtctctctgctttctggtcatcagctcattccagtgcctggttttgtccctggaagtcccatgtcccaggaaacccctccatctctggtaaatccagatgactggtcacattctctgctgcccacttgccctcatccctgcaatctgttctccgagaagcatcagtgtcatttttaaaatgtaaagcgcattgtctcatgctgcttgggactccccatgatccttccaacaaaacctggattctttaacagggtcacaatgatcttgctgatatggaccctggtcaaagctgaagcaaggatggctagcccagggcagggatgtgtgctggagttgaaggccctccctacaaaggccacctgcaagggccactaccacttcggaatttgtgaaggcctgcatcgctccagtgcccccagacttgtacccgctgacatatctctatctttctg

SEQ ID NO: 22936 - DNA, 931 bp, Homo sapiens
agcactggccaaaggagagacagctctcattttataaacatccatatctcctgctccaccaacttcctaaatgccttcttaaatttttgtgcaggctcctaagaaataatatcagccagcacctgctgcaaaggggcatcccaggatgtgtgactgaatcctgtggcaacactgcgaggttggcatcattacccccacaccctccccaaccgaggaaagagctggaacctggggagatgaatgacttgatgtcccacagccaactggcctgcaggcccagggtgagagctctccttctgaaaggctttcctgccacctggagctgagatttgccttgcctgcttcttaaagcaatagctcctcttaccactccttcaaaatacctctcaaatccaaccgcttgtcatcacagccctgctcttaccctaatctaagctactcacacctcttggtcaaagactactatagcctcctctctggtctctctgctttctggtcatcagctcattccagtgcctggttttgtccctggaagtcccatgtcccaggaaacccctccatctctggtaaatccagatgactggtcacattctctgctgcccacttgccctcatccctgcaatctgttctccgagaagcatcagtgtcatttttaaaatgtaaagcgcattgtctcatgctgcttgggactccccatgatccttccaacaaaacctggattctttaacagggtsacaatgatcttgctgatatggaccctggtcaaagctgaagcaaggatggctagcccagggcagggatgtgtgctggagttgaaggccctccctacaaaggccacctgcaagggccactaccacttcggaatttgtgaaggcctgcatcgctccagtgcccccagacttgtacccgctgacatatctctatctttctg

SEQ ID NO: 22937 - DNA, 931 bp, Homo sapiens
agcactggccaaaggagagacagctctcattttataaacatccatatctcctgctccaccaacttcctaaatgccttcttaaatttttgtgcaggctcctaagaaataatatcagccagcacctgctgcaaaggggcatcccaggatgtgtgactgaatcctgtggcaacactgcgaggttggcatcattacccccacaccctccccaaccgaggaaagagctggaacctggggagatgaatgacttgatgtcccacagccaactggcctgcaggcccagggtgagagctctccttctgaaaggctttcctgccacctggagctgagatttgccttgcctgcttcttaaagcaatagctcctcttaccactccttcaaaatacctctcaaatccaaccgcttgtcatcacagccctgctcttaccctaatctaagctactcacacctcttggtcaaagactactatagcctcctctctggtctctctgctttctggtcatcagctcattccagtgcctggttttgtccctggaagtcccatgtcccaggaaacccctccatctctggtaaatccagatgactggtcacattctctgctgcccacttgccctcatccctgcaatctgttctccgagaagcatcagtgtcatttttaaaatgtaaagcgcattgtctcatgctgcttgggactccccatgatccttccaacaaaacctggattctttaacagggtcacaatgatcttgmtgatatggaccctggtcaaagctgaagcaaggatggctagcccagggcagggatgtgtgctggagttgaaggccctccctacaaaggccacctgcaagggccactaccacttcggaatttgtgaaggcctgcatcgctccagtgcccccagacttgtacccgctgacatatctctatctttctg

SEQ ID NO: 22938 - DNA, 931 bp, Homo sapiens
agcactggccaaaggagagacagctctcattttataaacatccatatctcctgctccaccaacttcctaaatgccttcttaaatttttgtgcaggctcctaagaaataatatcagccagcacctgctgcaaaggggcatcccaggatgtgtgactgaatcctgtggcaacactgcgaggttggcatcattacccccacaccctccccaaccgaggaaagagctggaacctggggagatgaatgacttgatgtcccacagccaactggcctgcaggcccagggtgagagctctccttctgaaaggctttcctgccacctggagctgagatttgccttgcctgcttcttaaagcaatagctcctcttaccactccttcaaaatacctctcaaatccaaccgcttgtcatcacagccctgctcttaccctaatctaagctactcacacctcttggtcaaagactactatagcctcctctctggtctctctgctttctggtcatcagctcattccagtgcctggttttgtccctggaagtcccatgtcccaggaaacccctccatctctggtaaatccagatgactggtcacattctctgctgcccacttgccctcatccctgcaatctgttctccgagaagcatcagtgtcatttttaaaatgtaaagcgcattgtctcatgctgcttgggactccccatgatccttccaacaaaacctggattctttaacagggtcacaatgatcttgctgatatggaccctggtcaaagctgaagcaaggatggctagcccagggcagggatgtgtgctggagttgaaggccctccctacaaaggccacctgcaagggccactaccacttcrgaatttgtgaaggcctgcatcgctccagtgcccccagacttgtacccgctgacatatctctatctttctg

SEQ ID NO: 22939 - DNA, 510 bp, Homo sapiens
cattccagcctgggtaacagagcgagattctgtctcaaaaataaaataaaataaaataaataatagaacaaccttcccaagggagttgaaggatgtccctgtgctgccaaggcagtggcactggaagcagcaatatcaggcacagttttcttatcatttttttcatgagcactgactcctatatatggtaccaaaaatttcatagaggacctaaacctagaatcagccacgacctggcaggttcctaataagcatggtgcatacttttagactactggcccartgatgtttcttgtacccaggggtgatatgcaggagcacccccagcatgcccaatgtccaggatcccatcatctgccagctttccaggtatgacattgtccatcccatgtttggctcactcccagatcacccacagaggaagaggcagcttttggatgcacactgcatcattttattcagcaacccagtcatggctatggaggattggtattcaccagccaattctca

SEQ ID NO: 22940 - DNA, 583 bp, Homo sapiens
gcgagactgtctcaaaaaaaaattgtttttataagatggtgtcccactatgttacccaggctggcttgaactcctgggcttaagcaatactactactgcctcagcctccaagtagctgggattacaggcatgtacttctacaaccaccggctcatctgtggtgcttttgaatctaatattcaccagccygaatttctaagaatggagaatagggtccctaaggtctcaaaagggcttcagcagactcaagtttgggatctagcatctactaaaacaagttttaactattgcacttttctaagagagtcatatactatataattgcaagggaaaagataaaacaatatgacttgaaattttgtgttgtggcctggcatcttggggtgggacttggccaggccagctatgagcaactgtcccagattgcatcatctctaagagttttcagagcctcaggtcatgtgtactctaaatggggctccatgcccagcactggcattcttgtggaagtttggagacatggcaccagctgcattcctgggttgcagagtaacacaggaggtagcttcatctcagggtatca

SEQ ID NO: 22941 - DNA, 958 bp, Homo sapiens
aaataaaaaccccaaactcttcttatattgagaaggaagcttaagtgtttatttatctctaattttaatatacaacttgaaaaattccctgaggtactgcctactataaatttatagaagcataattaataatagtagagccaagaattaataatggggctacaaacttaattaacagcaacagttaccaaatgagtggcactttaatagctccaagagtcacttgaaagctttacactgcagctcagcttctgtgctgtgtgccctcagtaaaatggctctccatccaaatgaaactcacttctgatagccaagaggcataatcagagctacatttaaacatcagacttgcatttaaaaatcccccccaccccgattaactcacagttgacttgcctactcactggtttactatcaatgaggatgggagatcagacagattaggatcaaggctgcagctctaaccacattaagtgtggaggcagaaaatcatatttattcaaaggattccctcaaactgaaaactcaagagtmtggtggaaatgccaccgttagagggtgggggttaggggaaggacacatggactctagtacctccccaatgtgacctgggttttatgttgaaacactccgccatccatagtgagctttaagcgtgtgtgtgtgtgtagattcatgttaggacaccctcaacagttactagttaatatatgaagcaccctaagcaggaagtaccaagacagtggtgttagtgagcatttgaaagatcccaaatggtgtttatattcccagaggtggcctcataaaagcttctaactctcccatctgaatctgcaacagatagttcattaattagcataaagggatattagaaattattttcaatggtcaaatgaaggctatgagagatttgagggatggctagaaacctcaaaatttccatgaaaagggtgctggg

SEQ ID NO: 22942 - DNA, 584 bp, Homo sapiens
aggagaatggtctcttagccagaaaggaagggacaggggaaggggaagaggctctcccaggatgggcaagagaaagatggagcacagcagctgctcagttgctccttgaaggaccccaccctgagagcctgaaggcagctgctgtcagcccccaggaggcctacagaccagagcccagaatagacaccaggctgcttggggcagtctaatcccatggagggttttaacactaatgctgcagagcccatgtgtctttccaccatgccactgccatccatgcaacaatcaacacagaaggaaagggtcaaaagttgcttttggagctttgcatttgcacatgggtgtttctaagwcagatgctaattaatgcttgggggggctgccaaaaccttgtttctgaaatattttctagaccctttaaattcatcagtatagacacaatgacgataaacatttttatagtagactttcacacaagacaaagatcaaaggcatgtgtaatcgatgataaaaggaagtgtttcgagtgataaaaaagtcattctcaagtatatcttggtgttgattttatttttaatagctca

SEQ ID NO: 22943 - DNA, 559 bp, Homo sapiens
aggcaggagaatcgcttgaactcaggaggcagaggttgcagtgagccaagatcgtgccactgcactccagcctggrtgacagagcgagactccatctaaaaaaaaaaaaaaaaaaaaaaaaagtcagaggtttcatgaagaactaaataaataaaatacgtgataagttgagagacagaatttcaaacttggtgaaaggcagtgggggagatatttgagaacgtgtccatcctggcatccctccagcccacttcctgagttttgccctctactcatgagcccagacatgacaaagggcattctgacagagaaaggctcaccctgcctctgagaagatgcaatgtcaggaccactgtcctcttctgcttcccatacctcagcatcctccttaccctggggctcccagcgatggctggaaggttggagaaaggaggtggaacggaatgctcccttaacactcaccttgcccctgtcactttgagtccatgcctttcctgccatgttcaatagcctgctcccctccaggtgccacaatgacccaaccaagcccacagtgaca

SEQ ID NO: 22944 - DNA, 540 bp, Homo sapiens
cgggaaagtgtttaaaaagaatgccctccttgttcagcatgaacggattcacactcaagtgaagccctatgaatgcacagagtgtgggaaaacctttagcaagagcactcatcttcttcagcaccwcatcatccacactggggagaagccctataagtgcatggagtgtgggaaggcttttaaccgcaggtcacacctcacacggcaccagcggattcacagtggagagaagccttataagtgcagtgaatgtggaaaggccttcacccaccgctccacttttgtcttgcatcacaggagccacactggagaaaaaccctttgtgtgcaaagagtgtggcaaagcctttcgagataggccaggtttcattcgacactacatcatccacacgggagagaagccctatgagtgcattgagtgtgggaaggccttcaaccgccggtcatacctcacgtggcaccaacagattcacactggagtgaaaccctttgaatgcaacgagtgtggaaaagctttttgcgagagtgcagacctcattca

SEQ ID NO: 22945 - DNA, 619 bp, Homo sapiens
tctccaggtctcagttccctcatctgttaagtaaggaaattaggtgcaataacctttaaaaaaatttttttaattttttaaaattattttaattttatttatttatttattttcacagagacgaggtctcactttgttgcccaggctggtctcaaactcctgggcccaagcgaccctcctgcctcagcctcccaaagtgctgggattatagccatgagacattgtgctcggcctttttttttattttatttttttaatagacagggtctcactctgtggcccaggctggagtgcagtggcacaatcatggctcactgcagcctcaatctcccacctcagccttctgagtagctggaactacaggtgtataccrccactcccagctcatttttttaaactgtatttttatagagacaggatctcactatgttgtccaggctggtctcgaactcctggcttcaagtgatcctgccacctcagcctcccaaagtactgggattataggcctgagccactgcacctggccccaatcatcttaaaaaggattctaccagctcagccatcccgtgcaagtataatgaacattcatatgtagataccaagaacactctgtacatcc

SEQ ID NO: 22946 - DNA, 550 bp, Homo sapiens
ctttcaactttaggtcactcatgtagactaaggctcttatgttcctgagaacactgaacaataagtgagaaatagcctaacagtcctgcttcagtcttccaggtctaaaagcagacacagtctgatctctgttactccatttactatggggtgcttgtttctttacttctcattcgtcagagtcttcattttggtttctacactttctatgagaggcttctggagaaatgccacatcattccaaactcttcattagttttccctctgcaaacgttgcagagaataggatgtgtcctaagaatgatgtgagatgggaaatctgaagcacaaagcagaaagctctggacaggtgtgctttcagagagaaaaaaaaaaaaaaagaaaaccrttgctgatacataccttcttgtcactaggcagacttagcttcttatgtaacttctgttcaaatatatctacttgctacagcgaagaggctgagccaaatgattttgtgagtccctagtcttttgaggtttctgacattgactttgcagataatgatattgcc

SEQ ID NO: 22947 - DNA, 560 bp, Homo sapiens
ggcccatgctcaccactcccacagcctcatcaagcccaacctgcagcttcatttaaattaactcccatggagagacttgcagttttctaagactctgaactgccttcatcagataatttacatttgactacattaatgtgaaatcttctcttccttatcccctctttttacttgtcatttgtgtcttagagatggtacctcatcatcttccttatatgttagttgctgcttgactctcaaattcgacaggcagaagttggatctccttttgcttaccatcaccagtactatcagggagccttccaaacagcaggtactcgattacgggttgggaaataataattaaaaaataatgaaaacaataagcaggaaatctaatttgtwatttattttctcatgcagtttgaataagcaaagcaaatacaggtttatataatttaatattacaagcaataagcaaaaagattaggaaaaaaaacaaattaactactctacttttgtttcactattttgtgatctcaactattttgctgtggggttctttcacatttccatgaaaa

SEQ ID NO: 22948 - DNA, 595 bp, Homo sapiens
tgcctgcctcagcctcccaaagtgctgggattacaggcatgagccaccatacctggctttttttttttttttttttttttttgagacagtcttgctctgtctccctgggctggagtgcagtggcacaatcgtggcttactgcaacctctgcctcccaggttcaagtgattctcctgcctcagcctcccaagtagctgggattacagatgcaygccaccacgcctcgctaatttttgtatttttagtggagacgggtttcgccatgttggccaggctggtctcgaactcctgacctcagatgatccacctgcctcggcctcccaaagtgctgggattgcaggcatgagccaccacgcccagcctgtcatttttaaatggatgctggacgttgtaaatgacagatggtagaagctggtgctgatgtttcttcacagggctgtgttttcttttggcagggtccagcgtaacagcagcccagtgagaccctaccagggttttgttttggagtgatgacggcttccgttctgtcctccccacaggagtgttgccctagctcctggtgggtggcccttctggtgtcttcattagaagccca

SEQ ID NO: 22949 - DNA, 623 bp, Homo sapiens
tccccttaatgtctttgtttatttaatagctgcattgtacaagtrggaatggtgtgtatttctgtctcctggcagtggtggttgactttaaaaaaaatgttttaatcccagcactctgggaggccaaggtgggaggatcgcttgaggccaggagtccaagagcaacctaggcaacatggcgagatcctatctctacaaaaaaatttttttgaaatttaaaaatattttaatgcactttattttttagagcaactttaggtttatagcaaaacttagtggaaagtacagagatttcccatatactccctgccttcatacacagcatagcctccccgactatcaacatcccacaccacgtggtacatttgttatagtccattgacacatcattatcgcccttcgtccgcagtgtacactagggttcactcttggtgttgcactttctatgggagttgttgacgttttacaccagtagttgtcctgcggaagcctatccaaatagctcggggcaaggctggtgatgctaatttatttccaaataacctgttttggagaaggggtttaagattgagcagaagtgcaaaagaaagaaataaaggcatggaggaaagaaaagagagaaa

SEQ ID NO: 22950 - DNA, 623 bp, Homo sapiens
tccccttaatgtctttgtttatttaatagctgcattgtacaagtgggaatggtgtgtatttctgtctcctggcagtggtggttgactttaaaaaaaatgttttaatcccagcactctgggaggccaaggtgggaggatcgcttgaggccaggagtccaagagcaacctaggcaacatggygagatcctatctctacaaaaaaatttttttgaaatttaaaaatattttaatgcactttattttttagagcaactttaggtttatagcaaaacttagtggaaagtacagagatttcccatatactccctgccttcatacacagcatagcctccccgactatcaacatcccacaccacgtggtacatttgttatagtccattgacacatcattatcgcccttcgtccgcagtgtacactagggttcactcttggtgttgcactttctatgggagttgttgacgttttacaccagtagttgtcctgcggaagcctatccaaatagctcggggcaaggctggtgatgctaatttatttccaaataacctgttttggagaaggggtttaagattgagcagaagtgcaaaagaaagaaataaaggcatggaggaaagaaaagagagaaa

SEQ ID NO: 22951 - DNA, 1176 bp, Homo sapiens
caagaaggtcccccacagtagctttttaagctttggagtcacaagtgtgcatttaaattctgactccatcattgggagtccccatttctgactcctcatggggaaagaggccggttttacaaatatctcttttaagagccaaggaaacgccatcagtgttctttccatatatcatcaacttaaatttgcaaagacttctttatccctgaagcagtcaccactggccgacaggctgcagtaaccaagtctggtgcagataaacagagcccatcctgggagctggagtgcatggatgtcggagggtcatgttttccaaactgtggaagaaaaaacaaaaagctatgttcttccaggaggtatttagaacggagcttgagtttgggattcagatgcctgggcctgtgtagttcacttgtggggcaccccagcaggggcctcctaatggaaaatgcatcctgagagaaggagttaattataagcttagctacacctcagaatttcagggtcagagtgggaaagtgggtctaaataggccagaatctgtcactaggagctgctctcaagccagcttccatggcgtcatggagcttaagggagaaaaggcgctctgagtaaagagaatgagcagtttcagtaacattagagggacacattgtactaagcatccttgctctgggcttcatctaacaaacaatatattatacttcattaccaggcaacctgggcaccatttggactgcagggcatcagaggcagcaatgataggaaaagaaggtgcccagtggaagacagtgccccagggactccaagaaacactgagaggaggggttgggcagatccgagacccttgcttagtacacagggaaaggagctgcgaaatatgaatgttgcctataaatgtgacaggcttctggggaagttggggtttcttacattttagagagaggagggtgatccttggccagctccttgtctcacagcttaagagaactcgctggaaggagccttcacctcctcaaatcctgctgtgtttgtacccataagattagcatacaagttcctttgcatttgcatgatgtgttcactttcattttctcacaaacygtaaggtttttgtaaggttgttgtaagtttattggagcagatactacatccccattttagaggaggaaacag

SEQ ID NO: 22952 - DNA, 566 bp, Homo sapiens
ggtttaaagcttcaagcattggccaggcgcagtggctcacgcctataatsccagcactttgggaggccaaggagggtggatcacctgaggtcaggagtttaagaccagcctgaccaacatggcgaaacctcgtctctactaaaaatacaaaaattagccgggcgtgatggcgtgcacctgtaatcccagctactcaggaggctgaggcaggagaattgcttaaacccgggaagcagagtttgtggtaagcccagattgtgacactgcactccagcctgagcaacagagactccatctcaaaaaaaaaaaaaaaaaaaaaaaagcttcaagcatcatgcttagctcagagtgaatgctcagtgaatgttggctgtcatagttagctctagttcaggcttcagactccagaccccctactctctcagtttttatttggcagtggtatcattcatctttgaactcccaaggtagacagtcacccacccttggggaacttcccgagagctgaaggatgggccagaggtctcctgcacgggatgtgccttctcaatatcctctcagggcca

SEQ ID NO: 22953 - DNA, 566 bp, Homo sapiens
ggtttaaagcttcaagcattggccaggcgcagtggctcacgcctataatgccagcactttgggaggccaaggmgggtggatcacctgaggtcaggagtttaagaccagcctgaccaacatggcgaaacctcgtctctactaaaaatacaaaaattagccgggcgtgatggcgtgcacctgtaatcccagctactcaggaggctgaggcaggagaattgcttaaacccgggaagcagagtttgtggtaagcccagattgtgacactgcactccagcctgagcaacagagactccatctcaaaaaaaaaaaaaaaaaaaaaaaagcttcaagcatcatgcttagctcagagtgaatgctcagtgaatgttggctgtcatagttagctctagttcaggcttcagactccagaccccctactctctcagtttttatttggcagtggtatcattcatctttgaactcccaaggtagacagtcacccacccttggggaacttcccgagagctgaaggatgggccagaggtctcctgcacgggatgtgccttctcaatatcctctcagggcca

SEQ ID NO: 22954 - DNA, 566 bp, Homo sapiens
ggtttaaagcttcaagcattggccaggcgcagtggctcacgcctataatgccagcactttgggaggccaaggagggtggatcacctgaggtcaggagtttaagaccagcctgaccaacatggcgaaacctcgtctctactaaaaatacaaaaattagccgggcgtgatggcgtgcacctgtaatcccagctactcaggaggctgaggcaggagaattgcttaaacccgggaagcagagtttgtggtaagcccagattgtgacactgcactccagcctgagcaacagagactccatctcaaaaaaaaaaaaaaaaaaaaaaaagcttcaagcatcatgcttagctcrgagtgaatgctcagtgaatgttggctgtcatagttagctctagttcaggcttcagactccagaccccctactctctcagtttttatttggcagtggtatcattcatctttgaactcccaaggtagacagtcacccacccttggggaacttcccgagagctgaaggatgggccagaggtctcctgcacgggatgtgccttctcaatatcctctcagggcca

SEQ ID NO: 22955 - DNA, 566 bp, Homo sapiens
ggtttaaagcttcaagcattggccaggcgcagtggctcacgcctataatgccagcactttgggaggccaaggagggtggatcacctgaggtcaggagtttaagaccagcctgaccaacatggcgaaacctcgtctctactaaaaatacaaaaattagccgggcgtgatggcgtgcacctgtaatcccagctactcaggaggctgaggcaggagaattgcttaaacccgggaagcagagtttgtggtaagcccagattgtgacactgcactccagcctgagcaacagagactccatctcaaaaaaaaaaaaaaaaaaaaaaaagcttcaagcatcatgcttagctcagagtgaatgctcagtgaatgttggctgtcatmgttagctctagttcaggcttcagactccagaccccctactctctcagtttttatttggcagtggtatcattcatctttgaactcccaaggtagacagtcacccacccttggggaacttcccgagagctgaaggatgggccagaggtctcctgcacgggatgtgccttctcaatatcctctcagggcca

SEQ ID NO: 22956 - DNA, 404 bp, Homo sapiens
tgcaggcaggttgtataagccacgttagctgctctaaagcctccatttcctcatctagaaaatggggacagggaggccctccctaacgggttgttctgaggatgaagggaggatgtggtcaagttcctggcccaatgttttgcaaatagtaggtgctcgattattggcactggtattaggatcagggccaagagtagaaccttcaactccctgtcagcygggagagactgagatggatcacttatctgcacatggaacccggcgttgctgctggtgtgagccaagggggctcagggaagcctgttgttgagctgtgtctgatctgtggcttcctgtgcctggggcctgactcagcacattacctggttcctgagtcacggcacagaggggagtgctgggattac

SEQ ID NO: 22957 - DNA, 545 bp, Homo sapiens
cacccagagcctagcackctgtacagtcagaatccaaacttgtccttatctacttcctctacaaccacataacatcacctgggtatcaggaaccatacagacactttttttttttttgggagatggagtctcgctctgtcacccaggctggagtgcagtggtatggtctcagctcactgcaacctccacctcccaggttcaagcgagtctcctgcctcagcctcccaagtagctggattacaggtgcctccaccacacccagctaattttttgtatttatagtagagacggggtttcaccattttggccaaggtggtctcgaactcctgaccttgtgatccgcccacctcggccttccaaagtgctggcattacaggcgtcagccaccatgcccggctcagatgccttttgggaagagacgaggaaaagacaagtgggttattagtaggcttcagctaatactgtttgtcaaaagcagggaatgatccaatgtctatgcccaggtaaggtatgggacactctaaagttaaatctatacttaaaaa

SEQ ID NO: 22958 - DNA, 545 bp, Homo sapiens
cacccagagcctagcacgctgtacagtcagaatccaaacttgtccttatctacttcctctacaaccacataacatcacctgggtatcaggaaccatacagacactttttttttttttgggagatggagtctcgctctgtcacccaggctggagtgcagtggtatggtctcagctcactgcaacctccacctcccaggttcaagcgagtctcctgcctcagcctcccaagtagctggattacaggtgcctccaccacacccagctaattttttgtatttwtagtagagacggggtttcaccattttggccaaggtggtctcgaactcctgaccttgtgatccgcccacctcggccttccaaagtgctggcattacaggcgtcagccaccatgcccggctcagatgccttttgggaagagacgaggaaaagacaagtgggttattagtaggcttcagctaatactgtttgtcaaaagcagggaatgatccaatgtctatgcccaggtaaggtatgggacactctaaagttaaatctatacttaaaaa

SEQ ID NO: 22959 - DNA, 543 bp, Homo sapiens
atcagtagctttcaccaatcaaaagaacttttagaagatataattgaagacaaaatcctatttataatagcaaacaacagcaaaagcaaggaatgaacttagtcaatgtgcactgcctgtaggagatggcctcgtgatccgcccgccttggcctcccaaagtgctgggattacaggagtgagccaccgygcccaaaaaaataaattttgtaatgtttcacttaacaaaagagatacattctgagaaatgtatcattaagtgatttcataattagttgatttcgttgtcacgcaaacatcatagaatgcacttacacaaacctagatggtacagcctactacacacccaggctttatggtagagcctattgcccttggcattagagactatttttataaacttcaataataaataagaactgccccttagagctgctctcccctccattctaaacctggtgcaacttacgaggaaagcttgagttaggaaacaggagttgggcataagcactttgatttctgcatcccgaaggggaagtttcca

SEQ ID NO: 22960 - DNA, 590 bp, Homo sapiens
cgaagctcagctccagccagagagagttcaggtaaaagaacagaataataagaagggcaaatgaatttccagagttccttcatcccagagtaggatgctcagccttgccaggcagctgcactcagcytcccgccctctctgagcaggggggttggaatgtgtctgcggagggcagcgaggaaggagcctgctggaattccttccctgtggcacatctgggaggggtattccccctggtgatacttgggaaatcatgctggcctcgccagtccttttttccactgttcttttggtctcggagcacccgccaaacatctgacactgttcaggatcgattgcacataaaatgaagaatgggtatttaaaaaacaggtttttttgtgtgtttttccccctgttgtcatctaagaagcaggtttttaggttctttgattctctcccagaataacaaccatatggggcctccacttacactgagcagcctgtgccttgtgccagggactggtttgtttccattgtcagcaaaccttgactggctccaaacattttcacttcaggtggtttctgaaagagggaaagactgaggggaa

SEQ ID NO: 22961 - DNA, 1040 bp, Homo sapiens
tgggtagataaatttgtgaaatgctgagttggacattattcactaaygggctgattagtttttactgtaccactgtgcactttgattttgtaaaagcaagggatagagtggattgtgatttgcccactaaaaccctttttaaaaagtagaacagttactaatatgtgatttggaaaatattgccttaattattactctgagtggatcttcacctagtttcttacaagattgcttaagataagtgggttgagatggacagtgctgaggagtgtcataggtttttattgttttcccttattacaccttttattatatgatgaaaatgtgtaataaaaattcaagaatattatttttagtcttgcttaaatggattatctcactttggtgcaaggtggactgtaaacagacctaccttgacatacatagggccaacattttttagaagaaggtctaagtaagatctgtttcaaaagtattcttgatgaagtcccaaatgaatcatgtgttggaaagaagtgagattttagctttggaaatggagggcaaaagttaaaaatcattttctgacatgaaagtgtccttatagattagagcattgaaatttttatgcagtccacttaaatctgccatgatgaattgcccctgaataaatcacagataagtaaatgaattagccatgttattttctgagggatagtggccaaaaaacagctctttattttagcatgtttgatatattgagctaatgtctgacagtaatttcacacagcatcagttgctgcttgagcctattcctaaaatgtgctgcgaatatcagtagagaggcaagtgattatatttttatttgataagtagaagtggtagatgcaggaggcagatgagggggagggtgtccggagaatctgtgacctgcctgtgcactgggagaatggggtggggtcacgggaagtttgcatcttgtgcagtggggaggagcctggcctcttcagcttgtgtgtggtggcctggtattcagtctgtgagttgggagcccgctggaa

SEQ ID NO: 22962 - DNA, 1040 bp, Homo sapiens
tgggtagataaatttgtgaaatgctgagttggacattattcactaacgggctgattagtttttactgtaccactgtgcactttgattttgtaaaagcaagggatagagtggattgtgatttgcccactaaamccctttttaaaaagtagaacagttactaatatgtgatttggaaaatattgccttaattattactctgagtggatcttcacctagtttcttacaagattgcttaagataagtgggttgagatggacagtgctgaggagtgtcataggtttttattgttttcccttattacaccttttattatatgatgaaaatgtgtaataaaaattcaagaatattatttttagtcttgcttaaatggattatctcactttggtgcaaggtggactgtaaacagacctaccttgacatacatagggccaacattttttagaagaaggtctaagtaagatctgtttcaaaagtattcttgatgaagtcccaaatgaatcatgtgttggaaagaagtgagattttagctttggaaatggagggcaaaagttaaaaatcattttctgacatgaaagtgtccttatagattagagcattgaaatttttatgcagtccacttaaatctgccatgatgaattgcccctgaataaatcacagataagtaaatgaattagccatgttattttctgagggatagtggccaaaaaacagctctttattttagcatgtttgatatattgagctaatgtctgacagtaatttcacacagcatcagttgctgcttgagcctattcctaaaatgtgctgcgaatatcagtagagaggcaagtgattatatttttatttgataagtagaagtggtagatgcaggaggcagatgagggggagggtgtccggagaatctgtgacctgcctgtgcactgggagaatggggtggggtcacgggaagtttgcatcttgtgcagtggggaggagcctggcctcttcagcttgtgtgtggtggcctggtattcagtctgtgagttgggagcccgctggaa

SEQ ID NO: 22963 - DNA, 1040 bp, Homo sapiens
tgggtagataaatttgtgaaatgctgagttggacattattcactaacgggctgattagtttttactgtaccactgtgcactttgattttgtaaaagcaagggatagagtggattgtgatttgcccactaaaaccctttttaaaaagtagaacagttactaatatgtgatttggaaaatattgccttaattattactctgagtggatcttcacctagtttcttacaagattgcttaagataagtgggttgagatggacagtgctgaggagtgtcataggtttttattgttttcccttattacamcttttattatatgatgaaaatgtgtaataaaaattcaagaatattatttttagtcttgcttaaatggattatctcactttggtgcaaggtggactgtaaacagacctaccttgacatacatagggccaacattttttagaagaaggtctaagtaagatctgtttcaaaagtattcttgatgaagtcccaaatgaatcatgtgttggaaagaagtgagattttagctttggaaatggagggcaaaagttaaaaatcattttctgacatgaaagtgtccttatagattagagcattgaaatttttatgcagtccacttaaatctgccatgatgaattgcccctgaataaatcacagataagtaaatgaattagccatgttattttctgagggatagtggccaaaaaacagctctttattttagcatgtttgatatattgagctaatgtctgacagtaatttcacacagcatcagttgctgcttgagcctattcctaaaatgtgctgcgaatatcagtagagaggcaagtgattatatttttatttgataagtagaagtggtagatgcaggaggcagatgagggggagggtgtccggagaatctgtgacctgcctgtgcactgggagaatggggtggggtcacgggaagtttgcatcttgtgcagtggggaggagcctggcctcttcagcttgtgtgtggtggcctggtattcagtctgtgagttgggagcccgctggaa

SEQ ID NO: 22964 - DNA, 1040 bp, Homo sapiens
tgggtagataaatttgtgaaatgctgagttggacattattcactaacgggctgattagtttttactgtaccactgtgcactttgattttgtaaaagcaagggatagagtggattgtgatttgcccactaaaaccctttttaaaaagtagaacagttactaatatgtgatttggaaaatattgccttaattattactctgagtggatcttcacctagtttcttacaagattgcttaagataagtgggttgagatggacagtgctgaggagtgtcataggtttttattgttttcccttattacaccttttattatatgmtgaaaatgtgtaataaaaattcaagaatattatttttagtcttgcttaaatggattatctcactttggtgcaaggtggactgtaaacagacctaccttgacatacatagggccaacattttttagaagaaggtctaagtaagatctgtttcaaaagtattcttgatgaagtcccaaatgaatcatgtgttggaaagaagtgagattttagctttggaaatggagggcaaaagttaaaaatcattttctgacatgaaagtgtccttatagattagagcattgaaatttttatgcagtccacttaaatctgccatgatgaattgcccctgaataaatcacagataagtaaatgaattagccatgttattttctgagggatagtggccaaaaaacagctctttattttagcatgtttgatatattgagctaatgtctgacagtaatttcacacagcatcagttgctgcttgagcctattcctaaaatgtgctgcgaatatcagtagagaggcaagtgattatatttttatttgataagtagaagtggtagatgcaggaggcagatgagggggagggtgtccggagaatctgtgacctgcctgtgcactgggagaatggggtggggtcacgggaagtttgcatcttgtgcagtggggaggagcctggcctcttcagcttgtgtgtggtggcctggtattcagtctgtgagttgggagcccgctggaa

SEQ ID NO: 22965 - DNA, 1040 bp, Homo sapiens
tgggtagataaatttgtgaaatgctgagttggacattattcactaacgggctgattagtttttactgtaccactgtgcactttgattttgtaaaagcaagggatagagtggattgtgatttgcccactaaaaccctttttaaaaagtagaacagttactaatatgtgatttggaaaatattgccttaattattactctgagtggatcttcacctagtttcttacaagattgcttaagataagtgggttgagatggacagtgctgaggagtgtcataggtttttattgttttcccttattacaccttttattatatgaygaaaatgtgtaataaaaattcaagaatattatttttagtcttgcttaaatggattatctcactttggtgcaaggtggactgtaaacagacctaccttgacatacatagggccaacattttttagaagaaggtctaagtaagatctgtttcaaaagtattcttgatgaagtcccaaatgaatcatgtgttggaaagaagtgagattttagctttggaaatggagggcaaaagttaaaaatcattttctgacatgaaagtgtccttatagattagagcattgaaatttttatgcagtccacttaaatctgccatgatgaattgcccctgaataaatcacagataagtaaatgaattagccatgttattttctgagggatagtggccaaaaaacagctctttattttagcatgtttgatatattgagctaatgtctgacagtaatttcacacagcatcagttgctgcttgagcctattcctaaaatgtgctgcgaatatcagtagagaggcaagtgattatatttttatttgataagtagaagtggtagatgcaggaggcagatgagggggagggtgtccggagaatctgtgacctgcctgtgcactgggagaatggggtggggtcacgggaagtttgcatcttgtgcagtggggaggagcctggcctcttcagcttgtgtgtggtggcctggtattcagtctgtgagttgggagcccgctggaa

SEQ ID NO: 22966 - DNA, 596 bp, Homo sapiens
agcccttaagagagatgcacccgggcatccacatatgaggggaaggagatgcgtaagtgtgaaagccagatgtgagctcttccaactctgtctctatccagagagcccttcagaccctcagccccttccctttaccactcctggcctcacagaaattgtgcaatgaactgaaattagatacatttgaaagctgggttattttttcccactgaaaagtaccatacagatattagggacagttaaaataattatcattcagtgcctcgtttcccaaaaccatgccagttactgatcaccgtcatgcctatcttcaccccatcagagcaaacctaaagctgccaaggagaaaaagtgaaatgggaggaaaaagggaggcatggaaagctgagctgaatacttgtgtgtttattgtgcaagagtgtataatcaaagcatttttccttcccctgcatgccacagctggtctttgcagccaaatttctttgataacatcaaacggtrtatcagatcatttgtacacattattctgacagtaaattcctaagcttctgatttaagaatggtttgaggaaaaggcaagttcttttctgcttcac

SEQ ID NO: 22967 - DNA, 514 bp, Homo sapiens
tattcacattgtgttacttttttcaaatggcatttaatgtctagtgtatcattttagcttcacaatgacagtataatattgtttaagagcttttgctctgaagctagactgccttgagttcaaatgctgactctgaacatgaacctctataagcttcaattttctcagctatgaagtttgagctaataagaggatttacttcttaaggatgttgatgatgaaaatcaatgaaggacatgcagagagtttaaataactataaaaagatattggctctggttgctgatgcaatcaggaaacaaaacacatagtcagcatctagaattcactctatcaaccatgcatactgcctgtcctatcccaggggtttgtgaggatttagcaaaacttagccyactgtctggtgtgcagcatttaatgtccagtagctaagaggaagacagagaagttagaggaaaagaagatggaagataccagctactactactagattcgaggattgtttttacaaattt

SEQ ID NO: 22968 - DNA, 997 bp, Homo sapiens
gatcctcagtaaacctattgaagtacaagttggaggcaggagtgtggtttgctcagatgtggagcaacaagtggtgggtaccatctttaggaaattcccagtttccttgatacttaggtggtatgtatgattcttctatgatcactgtttgtgaggtaggcaaggtaatttctaaaatcaagtcgtataccactactctagccttcagtattttaccagataaacytaactgtgctgttccacggagctatttaaaatgcttattttttttttttttttttttttttttttgctgggtgcagtggtgcatgcctgaagtcgcagctttgcagtccccggagttctgggctgtagtgcactatgcctatctttgtccatgctaagttcagcatcagtgtggtgacctcccggtaacaggggaccaccagattgcctaaagaatgggatattctgtccagggcagaaaaacagaacaggtcaaaacttttgtgctgattgtagttggagcacatctgtgaatagcaccctaggcatagtgagccctgtctgtttaaagacaagtaaaataaaacgttgttttagtttctgtcaccaaaagtggtgagtggtgaatggtgagctgatatatagaaatgtcacataccagatgggcatggtgactcatgcctgtaatcccagtattttgggagaccatggtaggaggatcacttgaggccaggagctggagactagcttgggcaatatagtgagacccctgtctctacaaaggaaaaagaaatgttacatacctattttatttcttggttactaggatatgaaattaagagccagagagaacagatgatcatttgccctcatttgcaagcctgttaaaccctgaaagtttacaatttttatcatttacaattaaaatcaacatcttcctagcccttggtaaagatatagcaagatattgtcattcattcactacaaataaaatgaatatttctgtccaggg

SEQ ID NO: 22969 - DNA, 997 bp, Homo sapiens
gatcctcagtaaacctattgaagtacaagttggaggcaggagtgtggtttgctcagatgtggagcaacaagtggtgggtaccatctttaggaaattcccagtttccttgatacttaggtggtatgtatgattcttctatgatcactgtttgtgaggtaggcaaggtaatttctaaaatcaagtcgtataccactactctagccttcagtattttaccagataaacctaactgtgctgttccacggagctatttaaaatgcttrttttttttttttttttttttttttttttgctgggtgcagtggtgcatgcctgaagtcgcagctttgcagtccccggagttctgggctgtagtgcactatgcctatctttgtccatgctaagttcagcatcagtgtggtgacctcccggtaacaggggaccaccagattgcctaaagaatgggatattctgtccagggcagaaaaacagaacaggtcaaaacttttgtgctgattgtagttggagcacatctgtgaatagcaccctaggcatagtgagccctgtctgtttaaagacaagtaaaataaaacgttgttttagtttctgtcaccaaaagtggtgagtggtgaatggtgagctgatatatagaaatgtcacataccagatgggcatggtgactcatgcctgtaatcccagtattttgggagaccatggtaggaggatcacttgaggccaggagctggagactagcttgggcaatatagtgagacccctgtctctacaaaggaaaaagaaatgttacatacctattttatttcttggttactaggatatgaaattaagagccagagagaacagatgatcatttgccctcatttgcaagcctgttaaaccctgaaagtttacaatttttatcatttacaattaaaatcaacatcttcctagcccttggtaaagatatagcaagatattgtcattcattcactacaaataaaatgaatatttctgtccaggg

SEQ ID NO: 22970 - DNA, 997 bp, Homo sapiens
gatcctcagtaaacctattgaagtacaagttggaggcaggagtgtggtttgctcagatgtggagcaacaagtggtgggtaccatctttaggaaattcccagtttccttgatacttaggtggtatgtatgattcttctatgatcactgtttgtgaggtaggcaaggtaatttctaaaatcaagtcgtataccactactctagccttcagtattttaccagataaacctaactgtgctgttccacggagctatttaaaatgcttatttttttttttttttkttttttttttttgctgggtgcagtggtgcatgcctgaagtcgcagctttgcagtccccggagttctgggctgtagtgcactatgcctatctttgtccatgctaagttcagcatcagtgtggtgacctcccggtaacaggggaccaccagattgcctaaagaatgggatattctgtccagggcagaaaaacagaacaggtcaaaacttttgtgctgattgtagttggagcacatctgtgaatagcaccctaggcatagtgagccctgtctgtttaaagacaagtaaaataaaacgttgttttagtttctgtcaccaaaagtggtgagtggtgaatggtgagctgatatatagaaatgtcacataccagatgggcatggtgactcatgcctgtaatcccagtattttgggagaccatggtaggaggatcacttgaggccaggagctggagactagcttgggcaatatagtgagacccctgtctctacaaaggaaaaagaaatgttacatacctattttatttcttggttactaggatatgaaattaagagccagagagaacagatgatcatttgccctcatttgcaagcctgttaaaccctgaaagtttacaatttttatcatttacaattaaaatcaacatcttcctagcccttggtaaagatatagcaagatattgtcattcattcactacaaataaaatgaatatttctgtccaggg

SEQ ID NO: 22971 - DNA, 583 bp, Homo sapiens
taggaagtatatttaataaacttacatttttattgatatcttgtaaaagtaaatattttaaatatttgaaatggattgaaattgtagacagcccacagagtgggagaaaatctttgcaatctgtacatctgacaaaggactaatattcagaatctacaatgaactcaaacaaatcagcaagaaaaaactcccgtgaaaaagtgggctaaagacatgaatagacagttctcaaaagaagatatacaaatggccaacaaacatatgaaaaaatgctcaatatcactaattatcagggaaatgcaaatcaaaaccacaatrtgataccaccttactcctgcaagaatgtccctaatcaaaaaatcaaaaaataatagttgttgtcatggatgtagtgaaaagggaacacttctacactgctggtcggaatgtaaactactacaaccactgtggaaaacagtgtggagattccttaaagaactaaaagtagatcagttatttgatccagcaatccctgtcctgggtctctatgcagaggaaaagaagtcatatatgaaaagatacttgcatacacatgcttatagca

SEQ ID NO: 22972 - DNA, 583 bp, Homo sapiens
taggaagtatatttaataaacttacatttttattgatatcttgtaaaagtaaatattttaaatatttgaaatggattgaaattgtagacagcccacagagtgggagaaaatctttgcaatctgtacatctgacaaaggactaatattcagaatctacaatgaactcaaacaaatcagcaagaaaaaactcccgtgaaaaagtgggctaaagacatgaatagacagttctcaaaagaagatatacaaatggccaacaaacatatgaaaaaatgctcaatatcactaattatcagggaaatgcaaatcaaaaccacaatgtgataccaccttactcctgcaagaatgtccctaatcaaaaaatcaaaaaataatagttgttgtcatggatgtagtgaaaagggaacacttctacactgctggtcggaatgtaaactastacaaccactgtggaaaacagtgtggagattccttaaagaactaaaagtagatcagttatttgatccagcaatccctgtcctgggtctctatgcagaggaaaagaagtcatatatgaaaagatacttgcatacacatgcttatagca

SEQ ID NO: 22973 - DNA, 608 bp, Homo sapiens
tgagygtgactttttcagttatttatttatttatttatttatttttagagacagggtctcactctgtcactcagactggaatgcagtggcgtgatcttggcttactgcagcctcaaccttccaggctcaagtgatcctcccacttcagcctcccaagtagctgggaccacaggcatacatcaccatacccagctaattttgtttattttttgtaaagatggagtctggctatgttgcccagatgagtctcagactcctgatccaagcgatcctcctgcctcagcctcccaaagtgctgggatttcaggcatgagccaccacgcctggcctaaatgtgactttttctgatgagttagagagctttctctgatcactgtagttctctgtatttcatttctatgagagagacagtatagtatgttcctgagagcaagcagacctgagttctagttctggctttcccgttaatgggatcatcgtgtgacgctgcactctccttctcagccttggtctgcacttctgaagggggaaaaggatggccctgatgatctccaggtgcccatggacattgaaataatataatttaatttcactcacataccattctt

SEQ ID NO: 22974 - DNA, 608 bp, Homo sapiens
tgagcgtgactttttcagttatttatttatttatttatttatttttagagacagggtctcactctgtcactcagactggaatgcagtggcgtgatcttggcttactgcagcctcaaccttccaggctcaagtgatcctcccacttcagcctcccaagtagctgggaccacaggcatacatcaccatacccagctaattttgtttattttttgtaaagatggagtctggctatgttgcccrgatgagtctcagactcctgatccaagcgatcctcctgcctcagcctcccaaagtgctgggatttcaggcatgagccaccacgcctggcctaaatgtgactttttctgatgagttagagagctttctctgatcactgtagttctctgtatttcatttctatgagagagacagtatagtatgttcctgagagcaagcagacctgagttctagttctggctttcccgttaatgggatcatcgtgtgacgctgcactctccttctcagccttggtctgcacttctgaagggggaaaaggatggccctgatgatctccaggtgcccatggacattgaaataatataatttaatttcactcacataccattctt

SEQ ID NO: 22975 - DNA, 558 bp, Homo sapiens
gggctgatagagcaggtcaagaatccaagcaactggccttttgcaagaagtcagcaaatcgctatggccgccaactatagcaaggggctggggccccacgcctattcctccagtcacaacctgcatgtcacactgtttgaccaggcaggacctgaggtcaggccagcttgtaaggcaggtgaaggcctccctctgtgctgaccatgactgcttctccccaagtcatccccaggcctctccttggcaggacaggcagggctatgttccctcccacctcgcagctggwtttcctccatcttggagctttcctgacccactccacacagtgagttcaagctgtccttgggatgacccctagtcccggctacgaccaatatgaactcacagttgagagacaaaaccaagaagcgctggcctttctgaccacttgtttgtgtcgagatggagtgtctgacccacaaaccggccccctggtgcgtctggcaggcaggcccctgctggcccggccacacctgggagcagggaagtgctcactgcggtgagtcactgtttccacct

SEQ ID NO: 22976 - DNA, 545 bp, Homo sapiens
tacctatttatacatattatataataaaatatgtaatataaaatgtatagtaatgaaaaacatatacatattttccatatacgtatatggaaaawgaggtaacataaaacatcaggacacttacatataataaaattgacatatgttatatatgtatgtagtgtctgctagtcttaccctctctataaatacacactttttgtcactgccccttccttcccatgcagagctcccatggccaaatctccctatttccccaagtgtgtgtcactcgctgtcctctgttctgtgtcccatgcgctgtgcccacagcctcctagtgttttatgtgttctctttttctatatatatatggaaaaagcatatacatacttctctctttatatttatatacaatatataataatctaaaaatatagagtatataacaatttaaaatatatacatatttccatatctatgaaaaaaggtaacacataaacactaggccatttatacataaaattcacatatgtaatataaatgccaattttatcatatacaaa

SEQ ID NO: 22977 - DNA, 531 bp, Homo sapiens
tgctcctcctgccaggctccatccttccaaagatagccaggtgcttgctctcttccttccagtgtctgctcaaatggcagctcatcaggaaggccttccctggctacgttacataaaaagcaacttgctgggctccctcacccccagctgacttaaccagcctaactgttcaccatcggactrtcctgaactcactggtgtatgtgtgatgcctcttgcaataggatgtgagctccatgagggcagggactgtattgtgttcactcccgtatctccagcacttggaaaacagtaggcactcggtcaggatttgttgatgagatggtcttttgctttacataccttgacggaatacaaccttcacaaggcactggtcaacaccattacaatgcctccagcctgtctcagagactcacccacagttatgctatcctctccaataccatatgaattctgtctccacctgtccaggaggggcttctggggaatattgtctagaatctgatctgtttttttgatattcttgattga

SEQ ID NO: 22978 - DNA, 583 bp, Homo sapiens
tgcaaactccacctcccatgttcaggcaattctctgcctcagcctcccaagcagctgggattacaggcgtctgccagcaggcccggctaatttttgtatttttagtagagacggggtttcaccattttggccaggctggtcctgaactcctgacctcgtgatccacccgcctcggcctcccaaagtgctgggattacaggtgtgagccaccacatccagcctctctgcctctatctctattcatctttcttggagatagaggcagaaaaagggagaaagacaggcaggcaaacatgcatctttgtggaaagagtacatttaggaaaagccagcaaagtctctaaagtggtgtgaaacatgaggcatcatcctgctctattgaccagcagaaagtcacggtaggagtttacagagtcatttataattctctttctagcaattttgtgtagctaaataatcacaaaaactttccgctttttttttttttwaaaaaaaaagaaaaatatttaaatatgtagctgatttcacaaaaacggtaaagaaaatctctaggggtcaaacgtgaaggaaaaagtaaaaacca

SEQ ID NO: 22979 - DNA, 775 bp, Homo sapiens
ggcctcagtgctgttcttgtaaaagtgaatgagttatcacaagatatggttgtttaaaagtgtgtagcacctcctccctccctctctctctcttgccatgctctggccatataagacttgactgctttccttttgtattccaccatgagtcaaagctccctgaggcctccctagaagcagatgctgccatgcttcgtgtacaacctggggaactgtgagccaattaaacctcccttctttataaattacccagtctcagatatttctttacagcagtgtgagaacagactaatacaacgtacttcagattaagcttattggtcttaatgctctactgctagaaattgccaccttgccaggactcgyctatggttcgtatttcacaacttgcatcttccagcctaaatactcagttccccaagggggctttgagattctgcttcctgagcctgggagctagacagaatgacgtattgattagaaaggacagatatccaagccctacctgtttcatgtattacccacacccaaaacagtaactgcaaatctaaagaattgatgaaaaatgtaattcagaaactttctctccagttttttatatatttcagttttacatatttagaatcgggccctccatgatcaaaaaagggaaagtgccttcttggtaccaggaaagtccaacccccaaggatactgcaaaacagcaaccagttgctccaatccccacacgaccccagctttggatggatggaagatgcaggtgcaggttgaaaaa

SEQ ID NO: 22980 - DNA, 775 bp, Homo sapiens
ggcctcagtgctgttcttgtaaaagtgaatgagttatcacaagatatggttgtttaaaagtgtgtagcacctcctccctccctctctctctcttgccatgctctggccatataagacttgactgctttccttttgtattccaccatgagtcaaagctccctgaggcctccctagaagcagatgctgccatgcttcgtgtacaacctggggaactgtgagccaattaaacctcccttctttataaattacccagtctcagatatttctttacagcagtgtgagaacagactaatacaacgtacttcagattaagcttattggtcttaatgctctactgctagaaattgccaccttgccaggactcgtctatggttcgtatttcacaacttgcatcttccagcctaaatactcagttccccaagggggctttgagattctgcttcctgagcctgggagctagacagaatgaygtattgattagaaaggacagatatccaagccctacctgtttcatgtattacccacacccaaaacagtaactgcaaatctaaagaattgatgaaaaatgtaattcagaaactttctctccagttttttatatatttcagttttacatatttagaatcgggccctccatgatcaaaaaagggaaagtgccttcttggtaccaggaaagtccaacccccaaggatactgcaaaacagcaaccagttgctccaatccccacacgaccccagctttggatggatggaagatgcaggtgcaggttgaaaaa

SEQ ID NO: 22981 - DNA, 1175 bp, Homo sapiens
ggtgtctgcggcggctccggggttgcctgagtgacagctaaggccggccggatctctgggggcctgacttccacccaagacgccactagcttggtgaggggccccagagctctccaccgcagctcagccctccgcagccctgaccctccctctccaggttccccgcgctctgctcccctcttggcactgttgccctatccttccccatcccactgctttccatcgcctggaacctactcctcgtccccttggaagttttgtttgcagcagttcccagtactgcgctgcacgccacgcccccgtttgtctggagcaaaccgaattcctctgcagcagcttggacttctacctactcaactgtctgctgcgggtcttggagcaaagctctttctcgtatcagtctgttttttgtttgtttgttttcttttcttttcttattttgattgttttcccttggatttgtataagatgatacagtcctccagggcctagaaaggaacaacctcttacgaaaaaaaaaaaaaccaatgcataaatcaaaggcaaaattaaaatttaaaaaaaattcaactccgattccaagtccctatgcccaatttttaatgtagtgtgtatttccttaatgttgtttgtacttttgtgtgtgtgtgtgtgtgtgtgtgtgtgtgygcgcgcgcgcatgcacgctcgcaaagaggttaaatgtcctttcataaactgcggtttcctctttcccttgcctcccctgaccctatatcctcttcgtgcgctccccggagagcaggtcaggaagggatacaaaccgccttgctgtctaatggagggaggtggcccgtggaagctgcatgaggtggttttttgttctaatcctatttgttccttattttttggcttccttgcctccacaggttgcctcaccatgtgggcggtagcttgggagcttcttaccagcccctgcaagctgtggaggcagctttctgggacctctgcgggtgctaacaagggcccaccgcaggctcaaggtccacggtgcaggaaacttaccaggcatttctgcgtccccatgcaggaacttcgcagcctttctgtgctctatttgaccacggaagtggaagtcagcttccactttttcagcttccaaggggcacctagtggttctaactctgggcttgcat

SEQ ID NO: 22982 - DNA, 530 bp, Homo sapiens
agcccctccccgctcctcctcctcagcactcatcactctaagctgcagtgtctgtttactgattgctcagtttattgtctgtctccctgctagaatgcaagttccatgaggggaagggctttgtccattttgctatagccccagtgtctggaacagtgcccrgcacaccgcaggtgttcttgtttgttggaggagtgaatatgccagctcagacctaaagtggcagggctgaaagccctgtgtctcagttacgtgcacgtgtggttctaccccacttgagaccttcttgtttaaccactcaaccattcattcatttgcgcagcacgcacctcctgagcagccaccaaggccagcacaaaggagatttccatgggccaggaacaagtcaaagagggggggtatctagaaggaaggaggtggggaaacagagcacatggttgctggcacacctgggaggggcgctaggataccatggagaagccggagggctcctcaaggagataaggactggcaacagacttcacctgctt

SEQ ID NO: 22983 - DNA, 1346 bp, Homo sapiens
acaagaaaaaaaatataaaagaagaaactaagaaggaaataacctgttttaattgagacacagagggcaaataccacatttaatggtaaaaacagaacggaaaggtatttttcattggtgagagaaatattggtttgtcttcttgtctgtttttttctcatcctctctcacagataggaatgtggaagatgaggagagagggaaggaagaaaacaaggaaaggaaggtaacagcagaattgttacatgatgtggacagccgccaaactcaatagttctgagataaataactgtgcaaggtttagaggcaatacccaatgtttgaacctcagagttacacaatccacccaatacagggataagctatgtggcagagaatctcatctgagaaagataaaggatatgtctcaggaacgcttaatcaacaggtttgtccttcacatttatttatcacctacttggtgccaagcatttacaatatcctagggagacaaacagaaaatgttatctttttttacatggcattggattcacatggcatgtcattttcatattgcgtagagtggtgagtgattaggcctgtcaaagagaatcaggttcaggttctgcctccgatgccaactatgtggaggatgctacaccaagcactgaagctcagaaggagaacagttttggcagggcaagaaataagctatgttctacctgttatgtttgtggtaagtgaggaagattcaaacagagatgtctttttggtagctggatataggcatttggagtttggagagaggatagcaatttggggatcctcaatgcagcatgtagagaggaggagatggcccctggacagcatacagaaaagaatgggccaaagtttcacggggtgggcagaagaagctgccccgggaatgaagacgaagaaggaatatgcagagattggggtaaaaccaagacagaatgcttgtgaaatgtgcccaggaatgatcctctccactacttaaaatttgcttaaaatgagctgtttcagtacatccctgtgcasctgtgagcagctgtcctggttaataacatattcccatgtcccaaaggacacaaaccttggaagatgtgtttcccaataacttttcaaccttttactgagcagaacacatgaattttgcccttcctcatttggaaccatgtggaaaggggaaccacgaatggggatctgcttttggtttggattggggcttgctatggtttggataatgggattttttgtccccatcaaatctcatgttgaaatttgctccccactgtggtggtgtcagaaggtggggcctaggggaaggtgtttgagttataggcgta

SEQ ID NO: 22984 - DNA, 1794 bp, Homo sapiens
cttgagcccaggagtttgagaccagcctgggcaacatagtgagaccccatctcsaaaaaaataattagctaggtgtggtggcgtgcacctgtactcccagctacttgagaggccgaggtgggaggatcacttgagcccaggaggatgaggctgcagtgagctatgattgcaccaatgcactccaaccctggtgacagagcaagaccctgtccgcctacacccgccaaaaatacagagctatgatctcgagagcattttatttgagcaaaagataatttataaagcaaaatcaacaacatgagcctcctctgagagaaagctggaggccagccccatcatgttttgaaatttccctgatttataatcctcggtaaacacaaagggtgcatcctcacccggaacaaaactctcctggtcagacggtgaacaccccagagtgaggcctgtgggccacacgagcctgctgaaggggttaaccggcagtggtgccaagcaggaagccccgagacctgcccctccacagcgcctgcttgcaggggcccaagggcctcccctgcacagcctggcctgggggcactgacacatttttggcaaacagatcttggccggacagaaggtccaatccttccagccacttcacttaaaggaaaatcttctatttaagatccagactcagcctaacaatcacgaagatggctctgtttatgatccgcgactatgcaccttcagccacagcggcccagtgtgtgcagcttggcgaccttgagtttgtaaggatgagtaagaccttgtggcatttgcgtgactcaataaccaacaggtaattaaatatgaatgaagaagaaaggtagatgtaaccacataactcttttgattgtagatttagctgcgatgtcggcggcacttgcgaattccctccccactctgaggagctggacggaggctccatcccactgagggctgggcatgggcctgcctggccctgaaggcacccacggggccactcccaccagggtgtggatgaaacctgttttcttttctcttcccaattcatactctttagcagcgaagaaaaaacaatatatatgtgaactaagaaaaggactataaatcatgctaccataaggacacatgcacacatatgtttattgtggcactattcacaatagtaaagacttggaaccaacccaaatgtccatcaatgatagactggattaagaaaatgtggcacatatacaccatggaatactatgcagccataaaaaaggatgagttcatgttctttgcagggacatggatgaagctggaaaccatcattctcagcaaaatatcacaaagacagaaaatcaaacaccacatgttctcactcatcggtgggaagtgaacaatgagaacacttggacacaaggcggggaccatcacacaccacagcctgtcaggggctgggggccagggggaggggtagcattaggagaaatacctaatgtaaatgacgagttggtgggtgcagcaatccaacatggcacatgtatacatatgtaacaaacctgcacgttgtgcacatgtaccctagaacttaaagtataattaaaaaaaaaaaaagaaaaaaaattccaggtacaaaggggaagtcatttatttttgtgccatgctgccttgcatttttggaatgcctgtccctggagatggagctcacatctttccggaaagctctgaaggtccctgcgtctcagtatagctgctctgtagctttttagctgtctggcccctcttaggtgttgagaaagttattaa

SEQ ID NO: 22985 - DNA, 1794 bp, Homo sapiens
cttgagcccaggagtttgagaccagcctgggcaacatagtgagaccccatctccaaaaaaataattagctaggtgtggtggcgtgcacctgtactcccagctacttgagaggcygaggtgggaggatcacttgagcccaggaggatgaggctgcagtgagctatgattgcaccaatgcactccaaccctggtgacagagcaagaccctgtccgcctacacccgccaaaaatacagagctatgatctcgagagcattttatttgagcaaaagataatttataaagcaaaatcaacaacatgagcctcctctgagagaaagctggaggccagccccatcatgttttgaaatttccctgatttataatcctcggtaaacacaaagggtgcatcctcacccggaacaaaactctcctggtcagacggtgaacaccccagagtgaggcctgtgggccacacgagcctgctgaaggggttaaccggcagtggtgccaagcaggaagccccgagacctgcccctccacagcgcctgcttgcaggggcccaagggcctcccctgcacagcctggcctgggggcactgacacatttttggcaaacagatcttggccggacagaaggtccaatccttccagccacttcacttaaaggaaaatcttctatttaagatccagactcagcctaacaatcacgaagatggctctgtttatgatccgcgactatgcaccttcagccacagcggcccagtgtgtgcagcttggcgaccttgagtttgtaaggatgagtaagaccttgtggcatttgcgtgactcaataaccaacaggtaattaaatatgaatgaagaagaaaggtagatgtaaccacataactcttttgattgtagatttagctgcgatgtcggcggcacttgcgaattccctccccactctgaggagctggacggaggctccatcccactgagggctgggcatgggcctgcctggccctgaaggcacccacggggccactcccaccagggtgtggatgaaacctgttttcttttctcttcccaattcatactctttagcagcgaagaaaaaacaatatatatgtgaactaagaaaaggactataaatcatgctaccataaggacacatgcacacatatgtttattgtggcactattcacaatagtaaagacttggaaccaacccaaatgtccatcaatgatagactggattaagaaaatgtggcacatatacaccatggaatactatgcagccataaaaaaggatgagttcatgttctttgcagggacatggatgaagctggaaaccatcattctcagcaaaatatcacaaagacagaaaatcaaacaccacatgttctcactcatcggtgggaagtgaacaatgagaacacttggacacaaggcggggaccatcacacaccacagcctgtcaggggctgggggccagggggaggggtagcattaggagaaatacctaatgtaaatgacgagttggtgggtgcagcaatccaacatggcacatgtatacatatgtaacaaacctgcacgttgtgcacatgtaccctagaacttaaagtataattaaaaaaaaaaaaagaaaaaaaattccaggtacaaaggggaagtcatttatttttgtgccatgctgccttgcatttttggaatgcctgtccctggagatggagctcacatctttccggaaagctctgaaggtccctgcgtctcagtatagctgctctgtagctttttagctgtctggcccctcttaggtgttgagaaagttattaa

SEQ ID NO: 22986 - DNA, 1878 bp, Homo sapiens
aactatgaacaagacaaacttggaatttacaatctagcgcaaaaggggcaaagttaacagagtaactatgctgacaaggaagatactgagataatgaataatggtgggaaagggcaactccagatactgtgttctaagaaagactctttgggaggtgacatctaaaaagagaactgaaactgaaaaaaaaaaatgtttatatgtttgagtcatcttttggtctcccaaagcacctagcattatgcctttcatgtagcaggtacttaatatagctcaccttggcttcaatttcttcattcctgcaatgaacttccaagattccttccaaatataaaatgtttttgtctaagggaaggaaacctatatatcaataaaatcgatatatagttgggatgaggatggtagaactaaaaatgagtttaaaaatgactgcaagaccctaactctctaaagcagaaccaagaggaaaagcatgggagtataccaaaacaacttaattgttacttgaaatgacttgcattttacacaatatataaacagaaatcgttaattcactcagccttaagaaacaacacgtaaagcagatggaagacaggttgcgacctgtgcaagacgacacttaaaagctcaatactgattctcctcgcgactctcagggcgaggggccgagaacgtcccccgcttctcttgctgccacggcaatggtcccaaactgaggagacaggagagagatcatgtttctcttgcggttcagtatcgagatgaggtcagccagcagccctgcgagggtttgtgagaatcattccatccgtgcgctcaatcagaagagaactgatcctttcaatgggtaccccaaggaraaaactacagtaagccacgtcctccagaaacatctcctcctcgaccctcagcctcgcccaaatagagataaggaaggcacagggcgacccccctgtccttttacccagaatgagtccctccctagtgccctcctccacacgcctggtacagagcggggaaactgggcacctccggagctgctgtgaagaaccggtgagctgaagacggcgatggatctcaagaaaaaaaataaaagggaaaggagaagagcccaagaaagaaatgtatgttcgaggggcagagacagagtggatgttcccagtagagcaaagaaggaggctgcaggcaaagatctctaagccggctcttaccgtctgtgggagacgccatcttccaacccatgtcacgtgacgtggccaaccgtcggcgggaaaacgaggttccataagccacgcccccaaagagaaaccctatccccaactcgcagcccagtctcattccctcgcctcatagggcaatctttgcctagccccgcccctaagtatagccacgccccttacgcggatgttgaggtggagcgactgcaaaattcttgaagggtcttatttacttttttcagtgggggggtggggcctcggttccgcccttggccaatcggagttccaggttaggggggcgtcttccccgtgtgctcggtagggagtgtccaagtcaggggcgtcttctctacctccgcctacgtcattggctgaggtggcagagggcgagagcattttcgctcctaaccaatcacttatccccaggacgggggtgtgaggagaggaatcaggtgttcggaccagtgattggctggagaaaatagtcctccccaccaatgaggaagcctggcaggatggagggcgaggcctggcagctgtagtgcttctgggcagtagaggcgcggggtgcggagctagggcggccgagagccatggcggcgctattggcggcggcggcagtgcgagcccggatcctgcaggcgagtgagggtggtgccaa

SEQ ID NO: 22987 - DNA, 612 bp, Homo sapiens
ttgtagcaacctggatggagttggagaccatcattctaagtgaaggtaactcaggaatggaaaaccaaacatcatatgttatcacttataagtgggagctaagctatgaaggtgcaaaggcataagaatgatacaatggattttgaggacttgggaaagggtgggacggggttgagggataaaagactacayattgagtgtagtgtacactgctcaggtgatgagtccaccaaaatctcagaaatcaccattaaagaacttatacatgtaaccaaacaccacctgttttccacaaacctattgaaataaagataatacaaaataaaaaatattaaaaaagaaaattaacccatcagtttccttcatttgaaaatggagcaagctggatagacaccatttttgttttcaattgtctctcaggtatgtgctttctaaagatctttgataataaaaactcacactaaatttcagccccatttctcacctgtattattaacgattaacaggctggtaagaggcgtcttcgggatttgttccagagaaaggaaatacatactgggtgaaaactcccaacaatgagtttcacgagttactttatacattatcttctct

SEQ ID NO: 22988 - DNA, 612 bp, Homo sapiens
ttgtagcaacctggatggagttggagaccatcattctaagtgaaggtaactcaggaatggaaaaccaaacatcatatgttatcacttataagtgggagctaagctatgaaggtgcaaaggcataagaatgatacaatggattttgaggacttgggaaagggtgggacggggttgagggataaaagactacacattgagtrtagtgtacactgctcaggtgatgagtccaccaaaatctcagaaatcaccattaaagaacttatacatgtaaccaaacaccacctgttttccacaaacctattgaaataaagataatacaaaataaaaaatattaaaaaagaaaattaacccatcagtttccttcatttgaaaatggagcaagctggatagacaccatttttgttttcaattgtctctcaggtatgtgctttctaaagatctttgataataaaaactcacactaaatttcagccccatttctcacctgtattattaacgattaacaggctggtaagaggcgtcttcgggatttgttccagagaaaggaaatacatactgggtgaaaactcccaacaatgagtttcacgagttactttatacattatcttctct

SEQ ID NO: 22989 - DNA, 564 bp, Homo sapiens
ggttgtacaaggaagtatttctaagaaaatattagccatgcctttaactctatcaaaaatgaaattctggttcttattaaaaagaaataggcgcactgcacttacaattcttaatttaacccttgaaagagtttattcatatcctaccatgttccaaagtcaatgaggtaagttactaaataaatctacacactgatctacttacaattttatagaagagattcactaaagtttaccaataaaaacaaatacccaataaaatattttattcaagaacaaaattaaatgtgccctttgcaaggaagatgacaaaaaatttatatgttccaagagtgatgaaggaaaaggtatggcttaattctaccacctccatagataactgtcattctagycacagagtcaaagaatcagactattacgtaagattctacacacagtcttcctttaattataataactaaaaccttctgaattttactttaaattaaagaaatgtaatttcacatacctaattacctaagcctaaaatcatgtactagaacaagggctcatttcacttattat

SEQ ID NO: 22990 - DNA, 606 bp, Homo sapiens
cccacctcattctcaagtggctgcaattacaggcaaccagcctgacttaaaacagtatcttaaggtagatggtgattagcacatgtagtatgcttaacatttaatattataataagacatcacagcggctgtctcatgattaaggctgtgttcccttgttggtgaggaaattaattatgacttgataaatagaacatgttttaagaagtggctatatagctctggataaaacgaacaaaagaattagaattcctgcggggaatatatacaagactttatttagtcaagtaaaaaaaaatcactaatgtttaactgaagaaagagaaattgaataatatagttctatttcaacatgtgggttcacagatttattctaaccttccaagtaaagttgttccactagtaaagttgttctggagtatwttttttttaaaaaaaacacttaaaatgttccacttctttcatgaggctaagtcaactctgatatcaaaccaaggggaaagaaatgaaattataggtgagtttacttagttatatacaaaaggaaattattagcctctgctgatggagaacagaggctgtgaataaatggagatccataacatg

SEQ ID NO: 22991 - DNA, 605 bp, Homo sapiens
tttgtagtctcagcactttgggaagcttaggcaggagggtgacttgaggccaggagtttcagaccagcctgtgcaacacagcaagacccatctctacaaaagaaaaaaaamcccacaaaaaagtagccaggcatggtggtgctggcctgtagtcccagctacttgaagtgggtgctgaggtgggatacagtgagctatgtgatgcactccagttggggcaacagagcaagaccccatctcaagaaaaaaataaaagtctatcactaggccagggggtatgtatcctcaccaattttgagtggaatagacacagccaattcaattggttctgggactttagggtgatttatcttctcagactttactggtacattgggagtgggtctcttgaccacccctcaggataggtgctggcttctaccattccagcaagatccttgtgttgggttttcattaatttttttttttttttttgtcagtgaagatatgtctccaagaatagttttttcaaggtaagccctcatatatctaataatatcattctgttgtcttcacatatggaaagaaacttagctatgcataaaattcttgagacacaacctttt

SEQ ID NO: 22992 - DNA, 566 bp, Homo sapiens
gggtgggaggagggagaggatcaggaagacaactcgtgggtactaggcttaatacctcggtgatgaaataatccatacaaccaattcccatgacgcaagttgacctatgtaacaaatctgcacttgtacccctgaacttaaaacaaaagttaaaaaaaaaaaaaargaatcacattcagagactttctcttaagtctttagcatgaatgaattctgcttttccttttagtgctctgtttttatttttgttttgttgtttctccataggtgccattatttatttcatggtagagcttactgcagagacggtaattgttcttagccccaacagctgttcactgaggtgctggtttcatgcttccccgagatgtacagctggatggaagcttgatggccatgtttctaatttaatttctgatatccaactgattctcctattttgtgatatttctaaactgagttgaaaagtttttctagactgcaggttacagagttaggctacaggctgtcaaagtttgttatttggctagcacagtatttttgatctgtttcattttattcttaaa

SEQ ID NO: 22993 - DNA, 566 bp, Homo sapiens
gggtgggaggagggagaggatcaggaagacaactcgtgggtactaggcttaatacctcggtgatgaaataatccatacaaccaattcccatgacgcaagttgacctatgtaacaaatctgcacttgtacccctgaacttaaaacaaaagttaaaaaaaaaaaaaaggaatcacattcagagactttctcttaagtctttagcatgaatgaattctgcttttccttttagtgctctgtttttatttttgttttgttgtttctccataggtgccattatttatttcatggtagagcttactgcagasacggtaattgttcttagccccaacagctgttcactgaggtgctggtttcatgcttccccgagatgtacagctggatggaagcttgatggccatgtttctaatttaatttctgatatccaactgattctcctattttgtgatatttctaaactgagttgaaaagtttttctagactgcaggttacagagttaggctacaggctgtcaaagtttgttatttggctagcacagtatttttgatctgtttcattttattcttaaa

SEQ ID NO: 22994 - DNA, 541 bp, Homo sapiens
ctcacttccttttccacttctctgccatgctgtgacatggcagaggcctcactggaagctgaccagatatagtgggcagatctttgactcctaggmctccagaattgtaagccaaagtaaacctctcttctttataaattactcagtgtcctgttctggtgactctcccttatgcctgtctattctgttatgaccacagaaaacagactaagaaaattcttatggatagaagatgcattcttaccttaaatctttagaaacctatgagggtttcttacgcttcatagaagcatatgagggttttttgtttttctgttttttaccttattaagtcaggaacttgcaccttttcacgtaaaggaagcactttacagcttctctttggcatatccaagttgcctgcgtcactattcttgtgctttgggaccactgtcaagtaaaataagggttactggaatgcaagcaccgtgataccacgacagtccatctgataaccacggcggcttctaagtgactgatgggcagggagtgcatggtgtgg

SEQ ID NO: 22995 - DNA, 592 bp, Homo sapiens
ctattcagttattctcttccctactcaccttctttctacagagatttaaagaattcatccatctgtcccatcaattaattcattcactcaatgacttgttaaataatttgttatttcagctgggcacggtggctcacacctgtaatcccagcactctgggaggccgaggcaggcggatcacagggtcaggagatcaagaccatcctggccaacatggtgaaaccccgtctctactaaaaacacaaaaattagccgggagtggctgcgcgtactccagctactcaggaggctgaggcaggagaattgcttgaacccaggaggcagaggctgcagtgagctgagattgcgtcactgcacyccagcctgggcgacagagcaagactccgtctcaaaaaataaaaataaaaataaattgttatttcatataattcatcattcattcaatcatttatttattcacttgtgcatttattcatacattcagtcattcattcaacagatatttgagctcttaatatgtgccaggttccaggctagccccaggaatacaatgatgtctacagactgaactctagactttagagtgtgagag

SEQ ID NO: 22996 - DNA, 552 bp, Homo sapiens
aataaaaattttaaaaagaataaaaagaatatgaaagccaagttgtatatgcacattaaggataatcatgtaaaatactgtgtacacataatgattaattttagttgtgaatttggaatgatataaaatctcaattatttaatgtttgttagactcccttttcccttttaaagctgcttaagaggtctggtgtggtggctcatgtctgtaatcccagcactctgggaggccaaggcgggcagatcacctgaggtcaggagtttgagaccagcctggccaacatggmgaaaccccatctctactaaaaaatacaaaaattagctgggcgtggtggcaggcatctgtaatcccagctattcagaaggctgaggcaggagaatcacttgaacccgggaggcagaggtggcagtaagccaagattgtgccactgcacagagcaagactctatctcaaaaaaaaaaaaaaaaaaggttgcttaagatttttctattttttagagttggggtcttgcgttgctgcccaagctggacttgaactcatggcttcaagcca

SEQ ID NO: 22997 - DNA, 552 bp, Homo sapiens
aataaaaattttaaaaagaataaaaagaatatgaaagccaagttgtatatgcacattaaggataatcatgtaaaatactgtgtacacataatgattaattttagttgtgaatttggaatgatataaaatctcaattatttaatgtttgttagactcccttttcccttttaaagctgcttaagaggtctggtgtggtggctcatgtctgtaatcccagcactctgggaggccaaggcgggcagatcacctgaggtcaggagtttgagaccagcctggccaacatggcgaaaccccatctctactaaaaaatacaaaaattagctgggcgtggtggcaggcatctgtaatcccagctaytcagaaggctgaggcaggagaatcacttgaacccgggaggcagaggtggcagtaagccaagattgtgccactgcacagagcaagactctatctcaaaaaaaaaaaaaaaaaaggttgcttaagatttttctattttttagagttggggtcttgcgttgctgcccaagctggacttgaactcatggcttcaagcca

SEQ ID NO: 22998 - DNA, 552 bp, Homo sapiens
aataaaaattttaaaaagaataaaaagaatatgaaagccaagttgtatatgcacattaaggataatcatgtaaaatactgtgtacacataatgattaattttagttgtgaatttggaatgatataaaatctcaattatttaatgtttgttagactcccttttcccttttaaagctgcttaagaggtctggtgtggtggctcatgtctgtaatcccagcactctgggaggccaaggcgggcagatcacctgaggtcaggagtttgagaccagcctggccaacatggcgaaaccccatctctactaaaaaatacaaaaattagctgggcgtggtggcaggcatctgtaatcccagctattcagaaggctgaggcaggagaatcacttgaacccgggaggcagaggtggcagtaagccragattgtgccactgcacagagcaagactctatctcaaaaaaaaaaaaaaaaaaggttgcttaagatttttctattttttagagttggggtcttgcgttgctgcccaagctggacttgaactcatggcttcaagcca

SEQ ID NO: 22999 - DNA, 552 bp, Homo sapiens
aataaaaattttaaaaagaataaaaagaatatgaaagccaagttgtatatgcacattaaggataatcatgtaaaatactgtgtacacataatgattaattttagttgtgaatttggaatgatataaaatctcaattatttaatgtttgttagactcccttttcccttttaaagctgcttaagaggtctggtgtggtggctcatgtctgtaatcccagcactctgggaggccaaggcgggcagatcacctgaggtcaggagtttgagaccagcctggccaacatggcgaaaccccatctctactaaaaaatacaaaaattagctgggcgtggtggcaggcatctgtaatcccagctattcagaaggctgaggcaggagaatcacttgaacccgggaggcagaggtggcagtaagccaagattgtgccactgcacagagcaagactctatctcaaaaaaaaaaaaaaaaaaggttgcttaagatttttctattttttagagttggggtcttgcgttgctgcccaagctggacttgaactcatggyttcaagcca

SEQ ID NO: 23000 - DNA, 535 bp, Homo sapiens
tagccgggcgtggtggcggttgcctgtagtcctggctgctcgggtggctgaggcaggagaatggcgtgaacccgggaggcggagcttgcagtgagccgagatcgcgccactgcactccagcctgggcgacagagcaagactctgtctcaaaaacaaacaaacaaacaacaamaacaaaagttaataaaaataataaagttgctcattttttaaaaatgtcttcaataatgaaaaagataatcagcctctacataacaaaaaaaaaagaacagtttgacaccaggctggccagtctggtgggaccccatctctactaaaaatacaaaaaattagctgggtgtggtggtgtacgactgcaatcccagctactcgggaagctgagccaggagaatcacttgaacccaggaggcagaggttgcagtgagccaagatagtgccactgcactccagcctaggcaacagagtgagactccgtcccaaaaaaaaaaaagccactaagtttacagtactatgtcaaaacagcaacaggaaactc

SEQ ID NO: 23001 - DNA, 535 bp, Homo sapiens
tagccgggcgtggtggcggttgcctgtagtcctggctgctcgggtggctgaggcaggagaatggcgtgaacccgggaggcggagcttgcagtgagccgagatcgcgccactgcactccagcctgggcgacagagcaagactctgtctcaaaaacaaacaaacaaacaacaacaamaaaagttaataaaaataataaagttgctcattttttaaaaatgtcttcaataatgaaaaagataatcagcctctacataacaaaaaaaaaagaacagtttgacaccaggctggccagtctggtgggaccccatctctactaaaaatacaaaaaattagctgggtgtggtggtgtacgactgcaatcccagctactcgggaagctgagccaggagaatcacttgaacccaggaggcagaggttgcagtgagccaagatagtgccactgcactccagcctaggcaacagagtgagactccgtcccaaaaaaaaaaaagccactaagtttacagtactatgtcaaaacagcaacaggaaactc

SEQ ID NO: 23002 - DNA, 541 bp, Homo sapiens
tgcttttttcttttaaattttttcttyttttttttttgagacagggtctcattttgttgcccaggctggaatccagtggcatgatctcggttcactgcagcctcgacctccccaactcaggagatcctcccacctcagcctcccaagtagctgggactagagacaggtgtgcactaccacacctggctaattttttctattttttttttgtagagatggggttttgccatgttgcccaggctggtctcctgagctcaacagatccacccgcctcggccacccaaagtgctgggattacaggcatgagccactgcaccggccaaaaaaatcatgctaatacagtgattcaaatcagtgatagtaggggctttctggattccgttttatagatacaataagaatattaatataatcataaaataggaaaaatgaatacatagaataaggcaaggctaagaaatcactgaaactcctcctgctcaagaatgaagattatcaatatatggtcaaataaatataacgcaaatttttccctaaaaaa

SEQ ID NO: 23003 - DNA, 507 bp, Homo sapiens
tggattcatgtttctaactctctaaaggacatgtcctcctgaatatacctccaaaatctcaacataaataggtgcaaattggaactaatcatcctcccccaagccttgctcttcctgtgcgatctcagtaaatggcactacataatttcccaaacaagatatgagtcatactagagtcctccctctcyctctacatattcaaatggtcaccagacacaccaattctccaaaataataaaataataaaggttctttctattttaagtatgactaagttaaatatgccccacccctaatttttttcttaggcataagcagagcccaaaaaaaaggaaagaatacctgctcttgttaggttaagaagaataaaagaagtgctatcacttggctgtagatcttgcaacaagctagaagactctgaagtggacaaaaactccggggatttctgtacagtctgagctctcgtctcctctccgtctggacccacattcacccgaaggcttctca

SEQ ID NO: 23004 - DNA, 539 bp, Homo sapiens
tgggctattctttctttacctctttctgtacttgcaaatgttctaaaatagtcatataactttttaatgatcaaagggttttttttgtttttgtttttgagacagagtttcattcttgttgcccaggctggagtgcaatggcgtgatctcggctcactgcaacctccgcctcccgggttcaagtgattcttctgcctcagccttccaagtagctgggattacaggcacccaccaccaagcccggctaatttttttttttgtatttagtagagacgsggcttcaccatgttggccaggctggtctcgaactcctgacctcaggtgatctacctgccttggccttccaaagtgctgggattacaggcgtgagccactgcacctggccaaagttttttttttcttcttttttttagtattaacaactttgaccaggaaaaacaaaccctgcttttcctttacagtctctcgtcaggtcttcgccacaaatctctgtccagaggatcgtggctgaggcaccatggaatgctgctgttctactg

SEQ ID NO: 23005 - DNA, 539 bp, Homo sapiens
tgggctattctttctttacctctttctgtacttgcaaatgttctaaaatagtcatataactttttaatgatcaaagggttttttttgtttttgtttttgagacagagtttcattcttgttgcccaggctggagtgcaatggcgtgatctcggctcactgcaacctccgcctcccgggttcaagtgattcttctgcctcagccttccaagtagctgggattacaggcacccaccaccaagcccggctaatttttttttttgtatttagtagagacgcggcttcaccatgttggccaggctggtctcgaactcctgacctcaggtgatcyacctgccttggccttccaaagtgctgggattacaggcgtgagccactgcacctggccaaagttttttttttcttcttttttttagtattaacaactttgaccaggaaaaacaaaccctgcttttcctttacagtctctcgtcaggtcttcgccacaaatctctgtccagaggatcgtggctgaggcaccatggaatgctgctgttctactg

SEQ ID NO: 23006 - DNA, 539 bp, Homo sapiens
tgggctattctttctttacctctttctgtacttgcaaatgttctaaaatagtcatataactttttaatgatcaaagggttttttttgtttttgtttttgagacagagtttcattcttgttgcccaggctggagtgcaatggcgtgatctcggctcactgcaacctccgcctcccgggttcaagtgattcttctgcctcagccttccaagtagctgggattacaggcacccaccaccaagcccggctaatttttttttttgtatttagtagagacgcggcttcaccatgttggccaggctggtctcgaactcctgacctcaggtgatctacctgccttggccttccaaagtgctgggattacaggcgtgagccactgcacctggccaaagttttttttttcttcttttttttagtattaacaactttgaccaggaaaaacaaaccctgcttttcctttacagtctctcgtcaggtcttcgccrcaaatctctgtccagaggatcgtggctgaggcaccatggaatgctgctgttctactg

SEQ ID NO: 23007 - DNA, 1499 bp, Homo sapiens
tcctttgagcccaggatagggaggttgcagtgagccatgatcatgccactgcactgccrcctgggtgacagagtgagaccctatctgtaaaaaataaaaaataaaaaaattctttaaagtaaaaaaaattaattaattaatttgaaagggagactatattgttctgataaacggaaaaccagagtcctttttagaaggcattgtacaatttaaaaagaattattgaaaataaaacaatacatgagtatctatatcctcccaaattaagtgggttgctgtccgtggcaccaatactatatttcgaatgcacagaccaggtgcggtggctcatgcctgtaatcccagcactttgggaggctgaggcgcgtggatcacctgaggtcaggagttcaagaccagcctggccaacatggcgaaaacccatctctacaaaaaatgagccgggcgtggtggcgggtgcctgtaatcccagctactcaggaggctgaggcaggagaatcgcttgaacccgggaggcagagtttgcagtgaacggagatcgcaccattgcattccagcctggacgacagagcgagactccatcaaagaaagaaaagaaaagaaaagaaaggaaaggaaaggaagaaggaaggaaggaaggaaagaaagggagggaggcaagaaagggagagagggagggaaggagggacagaaggaaggaaggaaagaaagaaaacaaaatcaaatgtgcagccctggaggataatctctgagtccttgggctggtcatggtttgggccgagccaaccctgccaaccccctctcccaccatttgccctcttcacacatcctcagctacagccatgaccgactcctcatgcgtttccatccaagcagcatctttttcacctcccagcttttgcctctgccgtcgtctccactcagaatgccaaaggcaagtggaaatgtcattttcccctgaagctgacccctctaggaagtaaacacttggaacttttttctttttcctgcagccttggtgcaagtgatcctcctacctcagcctccccattagctgcagctacagacatgtgtcaccatacccgactcataaaaaagaaatgttctgggctggcacggtggctcacgcctgtaatttcagcactttgggaggccaaggtgggcggatcccttaaggtcaggagttcgaaaccagcctggccaatatggtgaaacaccctctctaccaaaaaaaaaaaaaaaaaaaaaagaaagaaagaaagaaaaaaatacatatatatatatatatatatatatatatatatatatatatatataattagctgggtgtggtgatgcacgcctgtaatcccagctacccaggaggctgaggcaggagaatcacttgaacctgagagatggaggttgcagtgagccgagattgtgccattacactccagcctggccacagagtgagactctgtctgaaaaaaaaaatctactaatttttgtatttttaa

SEQ ID NO: 23008 - DNA, 1499 bp, Homo sapiens
tcctttgagcccaggatagggaggttgcagtgagccatgatcatgccactgcactgccgcctgggtgacagagtgagaccctatctgtaaaaaataaaaaataaaaaaattctttaaagtaaaaaaaattaattaattaatttgaaagggagactatattgttctgataaacggaaaaccagagtcctttttagaaggcattgtacaatttaaaaagaattattgaaaataaaacaatacatgagtatctatatcctcccaaattaagtgggttgctgtccgtggcaccaatactatatttcgaatgcacagaccaggtgcggtggctcatgcctgtaatcccagcactttgggaggctgaggcgcgtggatcacctgaggtcaggagttcaagaccagcctggccaacatggcgaaaacccatctctacaaaaaatgagccgggcgtggtggcgggtgcctgtaatcccagctactcaggaggctgaggcaggagaatcgcttgaacccgggaggcagagtttgcagtgaackgagatcgcaccattgcattccagcctggacgacagagcgagactccatcaaagaaagaaaagaaaagaaaagaaaggaaaggaaaggaagaaggaaggaaggaaggaaagaaagggagggaggcaagaaagggagagagggagggaaggagggacagaaggaaggaaggaaagaaagaaaacaaaatcaaatgtgcagccctggaggataatctctgagtccttgggctggtcatggtttgggccgagccaaccctgccaaccccctctcccaccatttgccctcttcacacatcctcagctacagccatgaccgactcctcatgcgtttccatccaagcagcatctttttcacctcccagcttttgcctctgccgtcgtctccactcagaatgccaaaggcaagtggaaatgtcattttcccctgaagctgacccctctaggaagtaaacacttggaacttttttctttttcctgcagccttggtgcaagtgatcctcctacctcagcctccccattagctgcagctacagacatgtgtcaccatacccgactcataaaaaagaaatgttctgggctggcacggtggctcacgcctgtaatttcagcactttgggaggccaaggtgggcggatcccttaaggtcaggagttcgaaaccagcctggccaatatggtgaaacaccctctctaccaaaaaaaaaaaaaaaaaaaaaagaaagaaagaaagaaaaaaatacatatatatatatatatatatatatatatatatatatatatatataattagctgggtgtggtgatgcacgcctgtaatcccagctacccaggaggctgaggcaggagaatcacttgaacctgagagatggaggttgcagtgagccgagattgtgccattacactccagcctggccacagagtgagactctgtctgaaaaaaaaaatctactaatttttgtatttttaa

SEQ ID NO: 23009 - DNA, 1499 bp, Homo sapiens
tcctttgagcccaggatagggaggttgcagtgagccatgatcatgccactgcactgccgcctgggtgacagagtgagaccctatctgtaaaaaataaaaaataaaaaaattctttaaagtaaaaaaaattaattaattaatttgaaagggagactatattgttctgataaacggaaaaccagagtcctttttagaaggcattgtacaatttaaaaagaattattgaaaataaaacaatacatgagtatctatatcctcccaaattaagtgggttgctgtccgtggcaccaatactatatttcgaatgcacagaccaggtgcggtggctcatgcctgtaatcccagcactttgggaggctgaggcgcgtggatcacctgaggtcaggagttcaagaccagcctggccaacatggcgaaaacccatctctacaaaaaatgagccgggcgtggtggcgggtgcctgtaatcccagctactcaggaggctgaggcaggagaatcgcttgaacccgggaggcagagtttgcagtgaacggagatcgcaccattgcattccagcctggacgacagagcgagactccatcaaagaaagaaaagaaaagaaaagaaaggaaaggaaaggaagaaggaaggaaggaaggaaagaaagggagggaggcaagaaagggagagagggagggaaggagggacagaaggaaggaaggaaagaaagaaaacaaaatcaaatgtgcagccctggaggataatctctgagtccttgggctggtcatggtttgggccgagccaaccctgccaaccccctctcccaccatttgccctcttcacacatcctcagctacagccatgaccgactcctcatgcgtttccatccaagcagcatctttttcacctcccagcttttgcctctgccgtcgtctccactcagaatgccaaaggcaagtggaaatgtcattttcccctgaagctgacccctctaggaagtaaacacttggaacttttttctttttcctgcagccttggtgcaagtgatcctcctacctcagcctccccattagctgcagctacagacatgtgtcaccatacccgactcataaaaaagaaatgttctgggcyggcacggtggctcacgcctgtaatttcagcactttgggaggccaaggtgggcggatcccttaaggtcaggagttcgaaaccagcctggccaatatggtgaaacaccctctctaccaaaaaaaaaaaaaaaaaaaaaagaaagaaagaaagaaaaaaatacatatatatatatatatatatatatatatatatatatatatatataattagctgggtgtggtgatgcacgcctgtaatcccagctacccaggaggctgaggcaggagaatcacttgaacctgagagatggaggttgcagtgagccgagattgtgccattacactccagcctggccacagagtgagactctgtctgaaaaaaaaaatctactaatttttgtatttttaa

SEQ ID NO: 23010 - DNA, 505 bp, Homo sapiens
ccgaaggctcccagggccctcgggcagcagcccttgctgaccagtgcagccaggtcgtggctgcctccagctggtgggtctgccttyccctctgaccgcctcagtgccttctggaggactgtggctctctctcctgcccagtggctgtggtgccttcctacttctgtgtgggcagactgatttccctctctacctttacttgtggctgaggcgaagctcctgctcttgcaagataagaggtggggctgaggcgctgcagtgcagctcaggtggggctcaggaagcaccccacccaccccagagcactctgcatcctaataagcacatgctcgagtcactggaatctggtgctgctggcagtgccagaaccctcccctagcacctcgaggggacagccagcatgctcctcgggtggaggatccaggaattcttggagccaacattgcacaaatgggcaggagcctctcaaggcccccacagcctgggctccctgcctggggaagtg

SEQ ID NO: 23011 - DNA, 531 bp, Homo sapiens
ctgtaatcccagctactcaggaggctgaggcaggagaatcgcttgaacctgagaggcggagcttgcagtaaaccgagattgtgccactgcactccagcctgagtgacagagacagactcctctgtctcaaaaaaaaaaaaaaaaaaaaattagctcagcgtggtggtgcacacctgtaatcccagttacttgggargctgaggcacgagattgaacccaggaggtgaaggttgcagtgagcccagattgtgccactgtattccagcctgggtgacagagcaagactctgtctcaaaaacaaaaaaatagtctcctgggtcaggtccccagaaatcctgatttagcagatctggagggggacctagaaatctgccttttaactagcaagtctaataccccttaagaagcaaaagcctggaggaatgaactttcccttgagttccaaatgcagcctctgctggggacagttattctgggtagacacagccccctggactcatgtcccagctagaaatcagtccaattatgaat

SEQ ID NO: 23012 - DNA, 531 bp, Homo sapiens
ctgtaatcccagctactcaggaggctgaggcaggagaatcgcttgaacctgagaggcggagcttgcagtaaaccgagattgtgccactgcactccagcctgagtgacagagacagactcctctgtctcaaaaaaaaaaaaaaaaaaaaattagctcagcgtggtggtgcacacctgtaatcccagttacttgggaggctgaggcacgagattgaacccaggaggtgaaggttgcagtgagcccagattgtgccactgtattccagcctgggtgacagagcaagactctgtctcaaaaacaaaaaaatagtctcctgggtcaggtccccagaaatcctgatttagcagatctggagggggacctagaaatctgcmttttaactagcaagtctaataccccttaagaagcaaaagcctggaggaatgaactttcccttgagttccaaatgcagcctctgctggggacagttattctgggtagacacagccccctggactcatgtcccagctagaaatcagtccaattatgaat

SEQ ID NO: 23013 - DNA, 546 bp, Homo sapiens
ttgaaagaaggcagcccgaggggccaggcgcggtggctcacgcctgtagtcccagcactttgagaggccgaagtaggcggatcacctgaggtcaggagtttgaaaccagccttgaccaacatcgtgaaaccccctctctacaaaaattagctgggaattgtggcatctgccttactagggaggctgaagcaggagaatcacttgaacccaggaggcggaggttgcagtgagccaagatcacgccattgcactccaacctgggcaacaagagtgaaactccatctcaaaacaaaaaagaaggcagcctgaggaacgctaagctccagattctgtgaggcaccctctgggcaggcaagtccaaagctgccaggagaggggttgggatggagctggagaggggtgggccygtgctgatggtgcaggaagaatgtggccagtggcagcgctcctgccaggctcaccgcactcaccgcacagcagccctggctggctcagggcacagagccaaagtggagtctgacagtggcccagccccaggaggccaca

SEQ ID NO: 23014 - DNA, 579 bp, Homo sapiens
tgagcaggctgtgctccaggaggaagtgttccctatccccaccctctcattccttttttgtactaaggctttaaagtattcaaccagaaaatcaatagattttttttctctacaggttaatacacgtggacttacataaattactatttgtaatgttttaaataatgcttatgcattacataaagcttaggaaataaagaacaggaatggaacaacatttcttcataatctatccacacagtcataactacygttattaacattttgctattgttttatcttatttatatttcgtaatgttcatgttatatgttcaattgaaaaacatgctattctttttcagttacagttatagcattatcattttcctattattataaattcattttcataatttttgaaaataatattatgtcatacatgtatcatatttatttaaaccatcaccatatgtgtggacattcaggattttgctataataagtaattctgcaattgacgaatgtacatgtaattattgttttaattttagtgtctttagtaagattgatttttataagttaaattagtaatggttaaa

SEQ ID NO: 23015 - DNA, 526 bp, Homo sapiens
tgtgcccaagagtacaaggcctgcatgaaaacacatgattttataattttttgaaaatgaagtttcagcagattctgtttgaccttgagcacatgtagcccttctctcctttcctgtcctaccatcaaacactctgcttaatatttgcatgtatcaaatactgtgtctcacagtatctattcattcacctctactcctggtctgcctgctggttgttctctcctggaatttaagattaccctccttattggtgtgaaattaaattaaataagtcaaacttcaaataatttaaacttaaagctattaggactttaattattctgagccttgagaggaatgtggctatgcaatctgagttgtgyggcatgcacctacaacttctgcatttttgctgtttcctgtaaacaattaagaagactgagccatggcagaggtaagacccctcagatcattacctctccttaaggaatagcaaataatcttccttagaacatagcaacctataaccaatcaaatcactgtggtg

SEQ ID NO: 23016 - DNA, 521 bp, Homo sapiens
ggctcattggcacagaggctggtgaccaggcattgaggagtgacccaagaacccatgggggctgggaaagctgtgggaggattggtttcctgagaagaggcagggtggtytagattagaggcctttgacctttctgccccttcactccctcagcattttaaggggttttaagggaacctccctttggcctgaacagaggccatgaagccaggctttgctgccacataggagaggttggagccctggccccaccacatactagccgggtggtttctaacctttctgaggctcagtttccttatctgtcaaatgggaatgatactaatacctacattcagggcttttgtaaagatggcccaagtgaatgcatttgaaatgcttagcacattatcttgcacacagcaggggctcaggaaacattagctgttattattattagtttggctggctgagagtaggacggggcataggatctgtgccacccactttcagggtaaaaagtcacaattacaaagtggaaa

SEQ ID NO: 23017 - DNA, 802 bp, Homo sapiens
cccctgctgcaaatgggtttaataataatctttcttgcaatgggggttggggggacaatgttgggaggattacacgagatcacatttgtaaggtgcctggaacacagtaggtgtacaagcaatgccaggcccwcctccccaggcttccctatgcctcgtgggtggaagctctggagtgaggaggaaccgaaacagaataaaaaggagggtgctgccaaccacagaggttattatgctccctggtgatgctagaaggcagggagagagccgtgataataagattctcaccccgttttctgtgtgacggcaaataacagagacatgagaaaagagcatccgtcagaagtcacagagaaggcagacaaggcaaggagatcaaaggaataaatccaccgcaatctgaaaaacagcctgcctgctttcatctgtcggggaggtgacacaaggacccacactccagccaaaaacacacttttttccacccatgctgcatgaagcggggctgagggcatggcagcttccaaaacacacccccttcaaggataataaatcttctccttggtctagccacatctcgccaggaccttgatccccactctaggctagactctagaaatataccgctgccaaggagatttatccatttaaaaaggtcagagaattattgccactgaagcttgggctcagagcaggtgtaaatactcccgaggtcccacgagtgctttatcacactcaggagtgaggacctgggggatgttctgccttggggaagttccttcccaggcagaccatgtaactgccc

SEQ ID NO: 23018 - DNA, 553 bp, Homo sapiens
gtgttgctcaggctggtctcagattcctggcctcatgcgatccccscaccttaacccccgaagtactggaattacaggcatgagccaccatgtccagatagttagatgagttttgataaatgtatatatgcatattcagtgtttgaacatctgtttttgttatgttttgttttgtttttgagatggagtccccgtctgtcaccaggctggagtgcaactcccacctcctgggttcaagcgattctcctgtttcagcctcctgagtagctgggactacaggtgcctgccaccacacctggctaatttttgtaattttggtagagatggggtctcaccatgttggccaggatggtctcgatctcttgagtttgtcatccgccccacttagcctcccaaagtgctgggattacaggcatgagccaacgcacttggcctgaacatctgttttaatttttacttttgagggcaaataccagcactgtgggaggacgaggtgggccgattgcttgagcccagtagttcaagaccaccctgggcaacgtggcaaaaccct

SEQ ID NO: 23019 - DNA, 553 bp, Homo sapiens
gtgttgctcaggctggtctcagattcctggcctcatgcgatccccgcaccttaacccccgaagtactggaattacaggcatgagccaccatgtccagatagttagatgagttttgataaatgtatatatgcatattcagtgtttgaacatctgtttttgttatgttttgttttgtttttgagatggagtccccstctgtcaccaggctggagtgcaactcccacctcctgggttcaagcgattctcctgtttcagcctcctgagtagctgggactacaggtgcctgccaccacacctggctaatttttgtaattttggtagagatggggtctcaccatgttggccaggatggtctcgatctcttgagtttgtcatccgccccacttagcctcccaaagtgctgggattacaggcatgagccaacgcacttggcctgaacatctgttttaatttttacttttgagggcaaataccagcactgtgggaggacgaggtgggccgattgcttgagcccagtagttcaagaccaccctgggcaacgtggcaaaaccct

SEQ ID NO: 23020 - DNA, 590 bp, Homo sapiens
gaggaaataaagggaagtaaacaacagatgtgaaaggctttctccgaagtcctccttgtcaaggtccaggaaagattaactgagaggctgacacctttaaaggtcttgcagagaaacatttaccagaagctgccacccaccccctttgagggctgccacctgagaggctccagctgtgtaccaagactgcctctgctaaccaggcctcttctcctcttctctctctcccgtatcctttttgccatgatccaagcccctattttctgtatattcaagagggctaaaagcatcaaccatcttgacatttgtttgagtctttatattttgtatgactcccragcccatatgaatgctaataaaatgtttacacctttttcccctggtaatctgtgcattacatttatcttacagactcaaattaccaaaacttcaggaacaaagttaaatgttccttcaaaatataagactaggaaatcagagttgggagagaaattagagttcatctatcctctcacctcctttttcatatggaaatttatgactcagagagggggagtaactttcttaaaatcatgcagcaaaagacaagg

SEQ ID NO: 23021 - DNA, 590 bp, Homo sapiens
gaggaaataaagggaagtaaacaacagatgtgaaaggctttctccgaagtcctccttgtcaaggtccaggaaagattaactgagaggctgacacctttaaaggtcttgcagagaaacatttaccagaagctgccacccaccccctttgagggctgccacctgagaggctccagctgtgtaccaagactgcctctgctaaccaggcctcttctcctcttctctctctcccgtatcctttttgccatgatccaagcccctattttctgtatattcaagagggctaaaagcatcaaccatcttgacatttgtttgagtctttatattttgtatgactcccaagcccatatgaatgctaataaaatgtttacacctttttcccctggtaatctgtgcattacatttatcttacagactcaaattaccaaaacttcaggaacaaagttaaatgttccttcaaaatataagactaggaaatcagagttgggagagaaattagagttcrtctatcctctcacctcctttttcatatggaaatttatgactcagagagggggagtaactttcttaaaatcatgcagcaaaagacaagg

SEQ ID NO: 23022 - DNA, 917 bp, Homo sapiens
ttcatgtgcacacacacccaatagaatatataaaagggattcactaaaacatcagaagtagatttggggagattttaatgctttggtctggttgagtttttaacaatgagaatataatatgttcacacacagagrtacacacaagatattgtaaatttgtagaaagacagtggtaaataccatttagtggtacttacccaataattttatattggaaagcagtaaaattgatagtgaatatataattctcataaattccatgaaacaagttatagtgtactaaaatatgtataaagctaaaactgaaatacaagaagaaattcataagaaaaaattatattaggataattctttaataaacaaattgtcttcatcaggtcaaacagccaaaaaatagagaaaaagctaaataattgtattaatgtaattactaatctggataatgactcttcattatatcattacaacataattaaattaatttaataaatacattgacgatacatatgaaaacagaaacatactctatttttcagcgcccatgaaacatgtacaaaaattgatttagaattggaccacatagaaagttgcagttatgctcttgactacagccctatcaaaaagtctaaaaattttctaatgaaaactggcaaattaaaagtccatcaagaataaaaatgagcaaaaatagcctgggcgaagttgttgctttgggaagctgaggcgggaggattgctcgaggccaggaactcgagaccagcctgagccacacagcaagactgtctccacaaaaatcaaaaaattatcagagtgtggtggtacacacctatagtcctagctacttgggagcctgaggcaagaggatcactagaaccaagaagtttgaggctaccgtgagctatgatcatgccaccaca

SEQ ID NO: 23023 - DNA, 917 bp, Homo sapiens
ttcatgtgcacacacacccaatagaatatataaaagggattcactaaaacatcagaagtagatttggggagattttaatgctttggtctggttgagtttttaacaatgagaatataatatgttcacacacagagatacacacaagatattgtaaatttgtagaaagacagtggtaaataccatttagtggtacttacccaataattttatattggaaagcagtaaaattgatagtgaatatataattctcataaattccatgaaacaagttatagtgtactaaaatatgtataaagctaaaactgaaatacaagaagaaattcataagaaaaaattatattaggataattctttaataaacaaattgtcttcatcaggtcaaacagccaaaaaatagagaaaaagctaaataattgtattaatgtaattactaatctggataatgactcttcattatatcattacaacataattaaattaatttaataaatacattgacgatacatatgaaaacagaaacatactctatttttcagcgcccatgaaacatgtacaaaaattgatttagaattggaccacatagaaagttgcagttatgctcttgactacagccctatcaaaaagtctaaaaattttctaatgaaaactggcaaattaaaagtccatcaagaataaaaatgagcaaaaatagcctgggcgaagttgttgctttgggaagctgaggcgggaggattgctcgaggccaggaactcgagaccagcctgagccacacagcaagactgtctccacaaaaatcaaaaaattatcagagtktggtggtacacacctatagtcctagctacttgggagcctgaggcaagaggatcactagaaccaagaagtttgaggctaccgtgagctatgatcatgccaccaca

SEQ ID NO: 23024 - DNA, 917 bp, Homo sapiens
ttcatgtgcacacacacccaatagaatatataaaagggattcactaaaacatcagaagtagatttggggagattttaatgctttggtctggttgagtttttaacaatgagaatataatatgttcacacacagagatacacacaagatattgtaaatttgtagaaagacagtggtaaataccatttagtggtacttacccaataattttatattggaaagcagtaaaattgatagtgaatatataattctcataaattccatgaaacaagttatagtgtactaaaatatgtataaagctaaaactgaaatacaagaagaaattcataagaaaaaattatattaggataattctttaataaacaaattgtcttcatcaggtcaaacagccaaaaaatagagaaaaagctaaataattgtattaatgtaattactaatctggataatgactcttcattatatcattacaacataattaaattaatttaataaatacattgacgatacatatgaaaacagaaacatactctatttttcagcgcccatgaaacatgtacaaaaattgatttagaattggaccacatagaaagttgcagttatgctcttgactacagccctatcaaaaagtctaaaaattttctaatgaaaactggcaaattaaaagtccatcaagaataaaaatgagcaaaaatagcctgggcgaagttgttgctttgggaagctgaggcgggaggattgctcgaggccaggaactcgagaccagcctgagccacacagcaagactgtctccacaaaaatcaaaaaattatcagagtgkggtggtacacacctatagtcctagctacttgggagcctgaggcaagaggatcactagaaccaagaagtttgaggctaccgtgagctatgatcatgccaccaca

SEQ ID NO: 23025 - DNA, 997 bp, Homo sapiens
tctataaacaggttaatcgccacgacatagtagtatttagagttactagtaagcctgatgccactacacaattctagcttttctctttaggatgattgtttcattcagtcttatctcttttagaaaacataggaaaaaattatttaataataaaatttaattggcaaaatgaaggtatggcttataagagtgttttcctattgttttcagtgtaggactcactgttctaaataactgggacacccaaggattctgtaaaatgccatccagttatcatttatattccctaactcaaaattcattccatgtattcatttttttctaaacaaattagcatgtagaattctggttaaaatttggcatagaacacccgggtattttttcataatgcacccaataactgtcattcactaattgagaatggtgatttaacaaaggataataaagttatgaaaccaatgccacaaaacatctgtctctaactggtgtgtgtgtgtgtgtgtgtgtgtgtgtgtgtgtgtaaragggagagagagaaaatttcactccctccataaatctcacagtattcttttctttttcctttcctttccttgctcttctttctctcctattgctttcctttcatttccttctcataaaagaaaaataacaatatagaaaataacaaaatatagatggtcaacctttttaatattaaggttacctaaaatgccattatccaaagtggttctctagagatgctgatgtatatacttacatattttacagtgtattcaaataaagagtatattacataagacatatccttttgtaaccaacttttgtcattaacaatttactggacttgtcaacaaacctaaatctgtatcgtctataatggctacgttcattttggtatgaatcttaattacccctttctgcattatttaatgattttctcatatgtcactcttaaatgtacttctaatttttcactttacatcacataatgaat

SEQ ID NO: 23026 - DNA, 609 bp, Homo sapiens
taatgagaaataaatgatttaaaagtgatttcttaaaaaaaatacattcctaatattttaagtgggtttataagcaagccactttgactaatccctttctctccctaatagtcttcccctagcctctagtaaatcttaattagtttacgtctaattataacaagaagatctcacattgtttaattccttgccctctttcctctatcattaccaaattgtgatggcaagtttctggaacctgatatcgctgtgcctgacctttctcttctgtaagcacaataggaagcaaagtgagcactcagtaaatgttaaggttttttctcacctgacaaaacccttgattagcataactcgattttagcctgaggactgacttttcatttctcatttkaatacattgcaaaactaagtatttcctgcaaaaaaaaattgcctagctttgtcttttcttctttttctgcctgaagataaaatttctttcttgaacccctggctgtggaaggcctacgcataaacagacttccagccatcccctgcctgttggttagggattcagagaatctaccatgccatattcccttttactatctcctgctttctagtataaaa

SEQ ID NO: 23027 - DNA, 576 bp, Homo sapiens
aaactctatacccattagacaacaactccgcttttcaccgtcactccagtctctggtaaccacagtcctattttctatttctatgaatttcactactttagatatttcgtgtaagtggactcgtaaagtatttgtctttttgtgactggcctatttcacttagcacaatgtcctcaaggttcatccatgttgtagcatgtgacaagatttatttcctttttaaggctgaatactagtccatcgtatgtatacaccacgttttgtttattcattcaagcatccgtggatggttcctcaaggttcatccatattgtaacatgtgacaggacttctttcctttttaaggctgaataatagtccaacatatgtatacaccacgttttgtttattcattcaagtattcgtggacatttgagttgcttccatttcttgactgttgtgaacagtgctgccatgaacatgggtgtgcatatatttctttgagaccctgctttcaattcttttggatatattagyatttttcactatttcttcaaatgaagaacatagtaatcaaaggtattttagtccattgaa

SEQ ID NO: 23028 - DNA, 605 bp, Homo sapiens
tgagygtgactttttcagttatttatttatttatttatttatttttagagacagggtctcactctgtcactcagactggaatgcagtggcgtgatcttggcttactgcagcctcaaccttccaggctcaagtgatcctcccacttcagcctcccaagtagctgggaccacaggcatacatcaccatacccagctaattttgtttattttttgtaaagatggagtctggctatgttgcccagatgagtctcagactcctgatccaagcgatcctcctgcctcagcctcccaaagtgctgggatttcaggcatgagccaccacgcctggcctaaatgtgactttttctgatgagttagagagctttctctgatcactgtagttctctgtatttcatttctatgagagagacagtatagtatgttcctgagagcaagcagacctgagttctagttctggctttcccgttaatgggatcatcgtgtgacgctgcactctccttctcagccttggtctgcacttctgaagggggaaaaggatggccctgatgatctccaggtgcccatggacattgaaataatataatttaatttcactcacataccatt

SEQ ID NO: 23029 - DNA, 605 bp, Homo sapiens
tgagcgtgactttttcagttatttatttatttatttatttatttttagagacagggtctcactctgtcactcagactggaatgcagtggcgtgatcttggcttactgcagcctcaaccttccaggctcaagtgatcctcccacttcagcctcccaagtagctgggaccacaggcatacatcaccatacccagctaattttgtttattttttgtaaagatggagtctggctatgttgcccrgatgagtctcagactcctgatccaagcgatcctcctgcctcagcctcccaaagtgctgggatttcaggcatgagccaccacgcctggcctaaatgtgactttttctgatgagttagagagctttctctgatcactgtagttctctgtatttcatttctatgagagagacagtatagtatgttcctgagagcaagcagacctgagttctagttctggctttcccgttaatgggatcatcgtgtgacgctgcactctccttctcagccttggtctgcacttctgaagggggaaaaggatggccctgatgatctccaggtgcccatggacattgaaataatataatttaatttcactcacataccatt

SEQ ID NO: 23030 - DNA, 1073 bp, Homo sapiens
tctgagagaagctcagcccttsaagcccctgccccaggcccctgtcccaagatcctgactccagatgaccctggggagcctgtgccagggctgggttgtggcttcctgggcagggctgattgtgagcaacgatttaccagctgtcccagggccgtggttcctagagctggtcaccaggcagggctcagcccccagagccccatctgggcaagggcagagcctcatctttcacctgagagtcagagtggagaggacagacaaacaaacttcccaggccattaaactggatgggaaacttaaaagatgtcccgggaagtgcactgtcctcaggaggagggaaagcagagaaaagacactctggaccgctccttctccaccaggaatcaggcccagagaactcttttttttttttttttggagtaaaataataatagatgatgtttatttggagctattctgtgccaagctttaggtcaggtaattgtaaatattttaatgttaatttacagagaggatggcaagccagggaccattgacatttaccccattttattaaagagaaattgcatcagcatcacacaggctgtcagtgctcaacgtcacaccaccgtgtgtctgcagcccagaatctggtcgtggccaccaccgtggggcatctgtggaccccaggaccagatgttggttcagctcctttcttcttgggcatcctcagctcagagagggagattctggtctgaggaatgacgggcaaatggagaattagtcagtttttacttagaacgaaatcacctgtctcaactatcagactcaatgccaggattgtccaagcctctcccatcagatccacatttcttccctcactggacgtgaaatcatgaatttcttgatttgttgatgtcactcccatgggaggatgaaggaaaggactcagctttctcttcccactacaccctgtacctgcacaaggcccaactgagacacacactcagtagttctctgatgaaggagggagggaattaatgaaaaaagaaaggaataatcataacctctttacagactgggtcctggatgta

SEQ ID NO: 23031 - DNA, 1073 bp, Homo sapiens
tctgagagaagctcagcccttcaagcccctgccccaggcccctgtcccaagatcctgactccagatgaccctggggagcctgtgccagggctgggttgtggcttcctgggcagggctgattgtgagcaasgatttaccagctgtcccagggccgtggttcctagagctggtcaccaggcagggctcagcccccagagccccatctgggcaagggcagagcctcatctttcacctgagagtcagagtggagaggacagacaaacaaacttcccaggccattaaactggatgggaaacttaaaagatgtcccgggaagtgcactgtcctcaggaggagggaaagcagagaaaagacactctggaccgctccttctccaccaggaatcaggcccagagaactcttttttttttttttttggagtaaaataataatagatgatgtttatttggagctattctgtgccaagctttaggtcaggtaattgtaaatattttaatgttaatttacagagaggatggcaagccagggaccattgacatttaccccattttattaaagagaaattgcatcagcatcacacaggctgtcagtgctcaacgtcacaccaccgtgtgtctgcagcccagaatctggtcgtggccaccaccgtggggcatctgtggaccccaggaccagatgttggttcagctcctttcttcttgggcatcctcagctcagagagggagattctggtctgaggaatgacgggcaaatggagaattagtcagtttttacttagaacgaaatcacctgtctcaactatcagactcaatgccaggattgtccaagcctctcccatcagatccacatttcttccctcactggacgtgaaatcatgaatttcttgatttgttgatgtcactcccatgggaggatgaaggaaaggactcagctttctcttcccactacaccctgtacctgcacaaggcccaactgagacacacactcagtagttctctgatgaaggagggagggaattaatgaaaaaagaaaggaataatcataacctctttacagactgggtcctggatgta

SEQ ID NO: 23032 - DNA, 1073 bp, Homo sapiens
tctgagagaagctcagcccttcaagcccctgccccaggcccctgtcccaagatcctgactccagatgaccctggggagcctgtgccagggctgggttgtggcttcctgggcagggctgattgtgagcaacgatttaccagctgtcccagggccgtggttcctagagctggtcaccaggcagggctcagcccccagagccccatctgggcaagggcagagcctcatctttcacctgagagtcagagtggagaggacagacaaacaaacttcccaggccattaaactggatgggaaacttaaaagatgtcccgggaagtgcactgtcctcagraggagggaaagcagagaaaagacactctggaccgctccttctccaccaggaatcaggcccagagaactcttttttttttttttttggagtaaaataataatagatgatgtttatttggagctattctgtgccaagctttaggtcaggtaattgtaaatattttaatgttaatttacagagaggatggcaagccagggaccattgacatttaccccattttattaaagagaaattgcatcagcatcacacaggctgtcagtgctcaacgtcacaccaccgtgtgtctgcagcccagaatctggtcgtggccaccaccgtggggcatctgtggaccccaggaccagatgttggttcagctcctttcttcttgggcatcctcagctcagagagggagattctggtctgaggaatgacgggcaaatggagaattagtcagtttttacttagaacgaaatcacctgtctcaactatcagactcaatgccaggattgtccaagcctctcccatcagatccacatttcttccctcactggacgtgaaatcatgaatttcttgatttgttgatgtcactcccatgggaggatgaaggaaaggactcagctttctcttcccactacaccctgtacctgcacaaggcccaactgagacacacactcagtagttctctgatgaaggagggagggaattaatgaaaaaagaaaggaataatcataacctctttacagactgggtcctggatgta

SEQ ID NO: 23033 - DNA, 1073 bp, Homo sapiens
tctgagagaagctcagcccttcaagcccctgccccaggcccctgtcccaagatcctgactccagatgaccctggggagcctgtgccagggctgggttgtggcttcctgggcagggctgattgtgagcaacgatttaccagctgtcccagggccgtggttcctagagctggtcaccaggcagggctcagcccccagagccccatctgggcaagggcagagcctcatctttcacctgagagtcagagtggagaggacagacaaacaaacttcccaggccattaaactggatgggaaacttaaaagatgtcccgggaagtgcactgtcctcaggaggagggaaagcagagaaaagacactctggaccgctccttctccaccaggaatcaggcccagagaactcttttttttttttttttggagtaaaataataatagatgatgtttatttggagctattctgtgccaagctttaggtcaggtaattgtaaatattttaatgttaatttacagagaggatggcaagccagggaccattgacatttaccccattttattaaagagaaattgcatcagcatcacacaggctgtcagtgctcaacgtcacaccaccgtgtgtctgcagcccagaatctggtcgtggccaccaccgtggggcatctgtggaccccaggaccagatgttggttcagctcctttcttcttgggcatcctcagctcagagagggagattctggtctgaggaatgacgggcaaatggagaattagtcagtttttacttagaacgaaatcacctgtctcaactatcagactcaatgccaggattgtccaagcctctcccatcagatccacattycttccctcactggacgtgaaatcatgaatttcttgatttgttgatgtcactcccatgggaggatgaaggaaaggactcagctttctcttcccactacaccctgtacctgcacaaggcccaactgagacacacactcagtagttctctgatgaaggagggagggaattaatgaaaaaagaaaggaataatcataacctctttacagactgggtcctggatgta

SEQ ID NO: 23034 - DNA, 1073 bp, Homo sapiens
tctgagagaagctcagcccttcaagcccctgccccaggcccctgtcccaagatcctgactccagatgaccctggggagcctgtgccagggctgggttgtggcttcctgggcagggctgattgtgagcaacgatttaccagctgtcccagggccgtggttcctagagctggtcaccaggcagggctcagcccccagagccccatctgggcaagggcagagcctcatctttcacctgagagtcagagtggagaggacagacaaacaaacttcccaggccattaaactggatgggaaacttaaaagatgtcccgggaagtgcactgtcctcaggaggagggaaagcagagaaaagacactctggaccgctccttctccaccaggaatcaggcccagagaactcttttttttttttttttggagtaaaataataatagatgatgtttatttggagctattctgtgccaagctttaggtcaggtaattgtaaatattttaatgttaatttacagagaggatggcaagccagggaccattgacatttaccccattttattaaagagaaattgcatcagcatcacacaggctgtcagtgctcaacgtcacaccaccgtgtgtctgcagcccagaatctggtcgtggccaccaccgtggggcatctgtggaccccaggaccagatgttggttcagctcctttcttcttgggcatcctcagctcagagagggagattctggtctgaggaatgacgggcaaatggagaattagtcagtttttacttagaacgaaatcacctgtctcaactatcagactcaatgccaggattgtccaagcctctcccatcagatccacatttcttccctcactggacgtgaaatcatgaatttcttgatttgttgatgtcactcccaygggaggatgaaggaaaggactcagctttctcttcccactacaccctgtacctgcacaaggcccaactgagacacacactcagtagttctctgatgaaggagggagggaattaatgaaaaaagaaaggaataatcataacctctttacagactgggtcctggatgta

SEQ ID NO: 23035 - DNA, 549 bp, Homo sapiens
agctagtgtaagtattctaaactgtgctagtatagctgctttaaatcactgctttcttctgcaaatggtggcacctttaaagtgttatcttgaaggggaagtgagtgatttgctcatgtctctrctgaactaacactgttaacacccagtccagttctaccttaaacaagtctgagaaatacagacataatccatacttgttatttgtcaagactaaggtaaaataaggaaagttggaactaactcatatcctcttatgactgatgtactgaaaacaatccatctctcaccatttcctaaatagcatagtcacaaagagctctaccctaccaagtactctgcaagtcccactctcaaaggaagactcacaggtgactgagaagataaatttgctattgtttccattatccttcagttcatctgacacctttgaagaaacgcatttggataagactcacaagtctcagggccccttctttatgaaagaaatagctaagcctccatactcagaagcatcagacttttcagaatgcttaagtcatgtaaaaa

SEQ ID NO: 23036 - DNA, 549 bp, Homo sapiens
agctagtgtaagtattctaaactgtgctagtatagctgctttaaatcactgctttcttctgcaaatggtggcacctttaaagtgttatcttgaaggggaagtgagtgatttgctcatgtctctgctgaactaacactgttaacacccagtccagttctaccttaaacaagtckgagaaatacagacataatccatacttgttatttgtcaagactaaggtaaaataaggaaagttggaactaactcatatcctcttatgactgatgtactgaaaacaatccatctctcaccatttcctaaatagcatagtcacaaagagctctaccctaccaagtactctgcaagtcccactctcaaaggaagactcacaggtgactgagaagataaatttgctattgtttccattatccttcagttcatctgacacctttgaagaaacgcatttggataagactcacaagtctcagggccccttctttatgaaagaaatagctaagcctccatactcagaagcatcagacttttcagaatgcttaagtcatgtaaaaa

SEQ ID NO: 23037 - DNA, 623 bp, Homo sapiens
agaggtgtactccatgcccctctcaccatgaaaaaagggagaaaaagacaatttcgtctcagagatagaaaatctcccagagagaacccctggcagctggaatccatttttttccccctgaagctggaatctgttataactacagaacactgaaggataatgaggttctgctgctaagcaaatgctgggacaaaaagcacagaggtgctgcagccaggcagagactgggcttttcatgaaaccctgtgtctctgagcacatattgcaataattctctgactagctgctcaaggccttggcttcgtggctttttactccgtttaaaggtcttgatcaggccacttccgtttttaatgtttgagaaatgtctgatttatgctgcttcaaagtggaacttgggtttctattacctttttggcaccttgcacccattgttggcctarttctgctgtctcgtctatcttgtggttcctatcagtaaacaaagtccaggagaggcgtcatgcttgtgaacacctccaacatcaagttcaaaagtacaatcatgaccttgtcctgtcgttctcagaatctgggctcagctatttcaaacctcccatgtcttcactggtagtggtcaatta

SEQ ID NO: 23038 - DNA, 600 bp, Homo sapiens
tgtttgtgctattccttggaactgggaagagacagtgatcctctggtgtgaggctgaagaaatgccccggaagcattgtgaagatctgaggagagagtaccactgtagaaaatgtgtcatgataggccaagcacggtggctcacgcctgtaatcccagcagtttgggaggccgaggcgggtggatcacgaggccaggagatcgagaccatcctggctaacacggtgaaaccccgtctctactaaaaatacaaaaaaattagccggacgtggtggtggcaggcacctgtagtcccagctactcgggaggctgaggcaggagaatggcgtgaacccaggaggcagagcttgcagtgagccgggatcgtgccactgcactccagcctgggcaacagagcgaaactccatctcaaaaaaaaaaaaagaaaatgtgtcataataaaatgccatttaggcccggcacggtggctcacacctataatcccagcactttgggaggccgagrcaggtggatcacctgaggtcaggagttcgagatcagcctggccaacatagtgaaaccccgtccctactaaaaacaaaatacaaaaatttgctgggca

SEQ ID NO: 23039 - DNA, 553 bp, Homo sapiens
caaacagattctctcaaatatagaaggcttaaggaaagtgggtgtaaagaccctcaggtggatgccaaagtgctacagagaccatgaaataataaaactacrtttcctttaaaatagttattttccttctactcactcccccctattcatttattttacaaatatttgagtttgctttatttccatgtgtcagttttaaacatggtgggcaatgcagatgagcaagacctagtccatgctttcagggacctgtttatgctcagaagaaatgggatacaaaataactacattaagaagaagaaatggatgtgggcactaggagggataaattgtttctcgaacatagaagaggaaaaaatgccttcaatttggacccaggaggatgttactagaacaatgccatttgaataggactttgaagggccattgtgtaacatcagagagacatcttggggaaaatactctaaacttgcaaaaggaaaatgggagggcaaaacacaggaaagtattcaaggaatgccatgagtacccgtagagtacaagaagggagagt

SEQ ID NO: 23040 - DNA, 553 bp, Homo sapiens
caaacagattctctcaaatatagaaggcttaaggaaagtgggtgtaaagaccctcaggtggatgccaaagtgctacagagaccatgaaataataaaactacgtttcctttaaaatagttattttccttctactcactcccccctattcatttattttacaaatatttgagtttgctttatttccatgtgtcagttttaaacatggtgggcaatgcagatgagcaagacctagtccatgctttcagggacctgtttatgctcagaagaaatgggatamaaaataactacattaagaagaagaaatggatgtgggcactaggagggataaattgtttctcgaacatagaagaggaaaaaatgccttcaatttggacccaggaggatgttactagaacaatgccatttgaataggactttgaagggccattgtgtaacatcagagagacatcttggggaaaatactctaaacttgcaaaaggaaaatgggagggcaaaacacaggaaagtattcaaggaatgccatgagtacccgtagagtacaagaagggagagt

SEQ ID NO: 23041 - DNA, 553 bp, Homo sapiens
caaacagattctctcaaatatagaaggcttaaggaaagtgggtgtaaagaccctcaggtggatgccaaagtgctacagagaccatgaaataataaaactacgtttcctttaaaatagttattttccttctactcactcccccctattcatttattttacaaatatttgagtttgctttatttccatgtgtcagttttaaacatggtgggcaatgcagatgagcaagacctagtccatgctttcagggacctgtttatgctcagaagaaatgggatacaaaataactacattaagaagaagaaatggatgtgggcactaggagggataaattgtttctcgaacatagaagaggaaaaaatgccttcaatttggacccaggaggatgttactagaacaatgccatttgaataggactttgaagggccattgtgtaacatcagasagacatcttggggaaaatactctaaacttgcaaaaggaaaatgggagggcaaaacacaggaaagtattcaaggaatgccatgagtacccgtagagtacaagaagggagagt

SEQ ID NO: 23042 - DNA, 592 bp, Homo sapiens
agcctcggcctccgaaagtgctggattacaggactgagccaccgcacccggcccgactattttttttaatattagaaattgtatatatagagataaaatctttgagctcataatctaagatttgatgacactacaaaagggcatctaatcaagtctactgctctcaggaaaaattaattccmaagtctattatgttgtatatttattaaaaccatgaaggtgagactctaggagaggtatgggtagggttaggggctctggaaagttcaaatacaagtccaaacgtttagagttgagataaaaaatgtgtatccaatattattctaaactcttgctattattcataccaatcaacatttaataactaatcaaggcaatattttccttttccttttcctagagatttatcctgcaataaaatacagtctattgaaagacatacatttgaaccactaccatttttgaagtttatgtaagttacaaatataacttgattacatttggaatttttataaaacttaattataaacctctttgctattcttgaaatataattaaaattttaccagtagaaagctactaaaattataca

SEQ ID NO: 23043 - DNA, 653 bp, Homo sapiens
tgttccatgcaaaggtaactgccaagtgcaaatttttgcaggtgggaacacacctggattcttcaggtaatagctagttgaacaatggctggaacaaagaaaacaaaagggaaagtaacaggagataaagcagggagcttgggaactgatcatgaaaggcagtggtaagggctctaacttgtattctatgagatatggaaaccactggggatttttgagccaaggggtaacaaaattttacttccatttaacacaaaagcataactctagccgctgtgtcaatgaccttggggttaagtggaggcagagagggatgctatgataatcatccagggaagagatcatcatggcttgaaacatgrtctgctgaattggttctagggtaagaaagttttgtggtagaaatatcaaatagctaaatccagaatatgtactctcacattactcaataaacgtaccatggattcaaaggatgaaacagccacttatgctttcttgttttttcaatcttttagggtccgaaaatgtctttttcttatttaccacctgtgccgcttggtttcaagtcaaagtttttctattcaaaggcaatgcagctgaagcttagagctctgcccagaaaaattcatttctgggatgtggtgtttcaaatc

SEQ ID NO: 23044 - DNA, 1316 bp, Homo sapiens
gttctaattttacttttccttttaaatacacttcttggggagttctaaagctaagcaggactattaattctaagttgcctagatcaaccatgcaatctgatagataagatttatttataaattattaaaatctaaatttcaaactcaaggaaaacacgatctagccttggtagtttaccagggtttttmtcacatgcagtaaacattcaataaagatctgtggcataaagtttttaaatatttccctcccgttatccaattttataccatggctcacaccacactccctttgaacatcaactttttcatgggtgtttatttatttagagacagagtctggctgtgttgcccagttttgtttaaagataggttctcactacgttgcctacgctaagcttgaactcttaggttcaaacaatcctcctgccttagctgggattacaagcctgtcccaccacacctggctttgatttaaatttcacatttttagtaagactttctcaggctatcctatataaaatgcaaactctcactatttagctctcccttgatttttctccttagtacttatctagtttatttttatatattttcttttctattactgaattttctcttttattatatatcttccccatcagaaagatgctccatatggtagacactttaagtctctctctctctcttttttttttttttataagatttggagtcttgctctgtcactcaggctgaagtataatggcacaaccagagctcctgcagccagcctcaaactcctggcctcaagtgatcctcccacctcagcctcctgaatagctgggtatatgccaaacatctagctaattgttttcttttttcaaggatggagtcttgatatattgcccagcctggtctcaaactcctggcctcaagcaatcttcccatttcacctccctggttgctgggattaaaggcatgaatcatgaaatgtggctactctttttcacagatcagtacccagtggggagaacaatgccttgtacctaatattgctcaatgaatattggtctcactgaatgaattagtgaatttaatgacaaaaacttcatactgttaaaaaagatgttttagattatgtttatttttggaagatatgaggttgtagaaaaatgttttaataaaaaggcaaagtcagaaaaacacagagtttcttagcataaataatgaacctagctggcactacccagatcaataaattgactcatctgatcttgtggtccccatccaggaactgactcaatgcaagaagacagctttgactccctatgatttca

SEQ ID NO: 23045 - DNA, 531 bp, Homo sapiens
agctcactacaagctccgcctcctggattcatgccattctcctgcctcagcctcccaagtagctgagactacaggcacctgccaccacgcccggctaagtttttgtacttttagtagagatggggtttcactgtgttagccaagatggtctcgatctcctgacctcgtgatccgcccgccttggccttccaaagtgctgggattacaggcatgagccaccatgcccggccctaaaaacatatttttttaaggtttcaattactaagtttctttaggatttgataatttctacatttttgatattattggtcttactatgttatacattttcttgattttgttttatcagcttgaatattatrgtatgtttatagctatctacttctaggtaaaaataaaatttgttagggaatataggaaaattataatcccttcatttttccttcaacatttcataataaaaattgtgaaatgttacagaaatgttgattcctagtgcttattcctttatccagtggttgtccacccctc

SEQ ID NO: 23046 - DNA, 632 bp, Homo sapiens
gagccaaagagcctatgtttaaatctcttctcttccccttactagctgtgtggctatgggctggccagctcgcctttctgtgcctcagcttcctcatctgtagaaatgacaataccattcacctcattgtgataattaaatgaggggatatatgtaaaatgcttggaacattggcatgtagaagtcatctatgtggattatttctgtgctgtttggaatttggaagctgaggcacagaaagcaaaaataatttactcaggaccacaatgctgcttaacagcagaagctagatgcctatccatcataccaaagtgctttgaacataagtgttgtcaaaatccatctctcccaatggatcctaaaagatacgttttcatttgtttagatgwtgaagaggaaattcattcttttaaaaactctttgtcatttctatttcccccttttatcttaagatgctccagctgcttcccatattatgttccaccactatgttttccttttattttaacatgcaccacttcaatttccgaaaacacagtgtaatttatcaatcaataaataaatctggacagaaacacaaagcacatttttctccaggagcattccctattcacaagcacagggagaggaaa

SEQ ID NO: 23047 - DNA, 1010 bp, Homo sapiens
aaggggataaggaatgagatctctgggtctcggggaatgaggagacatgtctgccctggcaccgtctctctaggtccagggctcaaattggagcctgctgtcctctcagccacagtgcttatccccagatgaaataaaaacaaggcgattattatgggtgtttggggattcagagcatcccctcggagactacatcaactggtggcaggaaaggatctttaagagagtaagaatgagagaggcttaaaaaaaaacccagcttgtcagcagtaatcggctcctgcttggccctctctctgctggggtccaggccaccttgcagggagatattttccctctaagaggctttatgatgctacagttctgaacacaggtgcccgctgccttaacttggtgctctgtggcacctctacccactctgactgtcccacttctgcagggacaggtgacctccagaaaggcaccgtctctctctggtgcagtgttcctctccgtctccttcattttctcacatcttcccactcctgccattgctttggggcttcctgcttctccttctgtatgctcagcttcatggcagtgaggaccacacagaggcaggaagcaaaaagttgggggatgagggggtgcarctaggtgtttggtacttggtgtctccccacaaacacttccaacttcacctgggtctggcttagattaagcaaataaaaatacaggacagacacttaatttgaatttcaaataaaaaacaaatatatttttgtataagtatatcccatgcaagtcttgggatacacttacactaaaattagttgttgtttatccaaaattcagattaactgggcgttctgcactttatctggcaagttagtcttgaccactccttcctcctgcctctggaagggtccttgggtgtctctctgtcttggagggcacagtcccaaacagggggactgtccccaaccatttatacacaagaacagtagccctcacctcctggtagtggatcc

SEQ ID NO: 23048 - DNA, 1451 bp, Homo sapiens
aagtagccatagctttgggtttttaaaatttaagtccagccagaaatttttgaggctttgtctcagttttcatccagggacagggagaacaggaacctccagaaaaaaaaaatacaaaggaattgtgagagaaaaagataaatctatgttatgatcacatcctacgagccacagttgctcaacctccaggcaacccacgtctgtctttcccttagactgtgagtcccttcctgcgtggagggaagactgtgcagtaaatggtcaatgaagatggggtgggcacaggggcgagaaatggaactgcgtagggcgggacaggctctgccccaggaagcatgtgctggtgtaggactcaaggctagcactgccccaggagtcagcctcagatatgcagggtcttgcaaagaaggcccttgagggttttaacatctgtcttttgctacacagataaacccagaaactttataatgcaaatgcaccccagaaaggcaatgtgagtccaaaggagtatctaagtgtgggcaacacgtgtcaaatcctttcctgctgacattttgcttgtacagtggacaccagggagagccgcaaggacccacctaaagagaagcatcagctgggcgcggtggctcacacctgtaatcccagccctttgggaggccaaggcgggcagatcacttgaggtcaggagttccagtccagcctggccaacatggtgaaaccccgactctactaaaaatacaaaaatcagctgggtgtggtggcatgtgtctgtaatcccagcttctcaggaggctgaggcaggagaatcacttgaacccggcaggcggaggttgcggtgagctgagattgtgccactgcactccagcctgggcaacagagtaaaactccatctcaaaaaaaaaaaaaaaaaaaaaggaaaagaaaaaggagagaagtgtcatcaccaggtaaaccaaagacaagagatggaggccacatggctgacagcccatctgtgtgcactgccgtaatctcaccagcccatgggatgtgcaacctgtagcagtgagaaaagtgagcctgacaggttaacaaatctgccccaaatcacaccaccactaagtgacagactgggattcaaattcaggtgtctgtatctccagagccccctccagcaggccacactggctgactctgggtgagaccttcatctccttcttccatttgcttggaggctactctgtaaaccttcaactctatgcatttgagaattgagaggagaaatgaaggacccatacgcatggtccacgcagggcttggagtagtggaagtcagagggcagggtggaaggcaaggctgctgctgaggatgggaggctctcccaggcttcaacagtgcccctgtgtgcacagtgctgtgtgcatcctgcctcccctaccrtgggcccctgcatgaccgggctcactaccctc

SEQ ID NO: 23049 - DNA, 495 bp, Homo sapiens
actgtttgattctccttactgatattttatttagaatatttgtgtctatattaatgagtaacattgggtttttttggctccacataaaagttgatattaatattattcttgctctgtaagataatttcagagttatcttttcatrattttgaaattatctgttttttgctctactcttttttaactttttcttttcactagtttactcaatttttctacttcttaatgaagaaattttattaatttatattttgctaggggttgatttatttcttttagtttttcaagtatgtgtcatcaattaaatattttcttctactttactcttgtctgttaattccaaattatatgtatatttactcttttttcccattaatcactctcacaatagacttatcttattggtctttacagcgaaccaatatttacatttatttatcttttatataatctgtttgtgttcctcctagtgactaatttcagcttttatcttta

SEQ ID NO: 23050 - DNA, 1321 bp, Homo sapiens
tgcatgcaaacacagactgcatggtgccatgattctagggattccaggaggcactgactcacaggtaggcttttctcctggtattgagagccaggatggggtcgatgctggagtctagggcaatttgacttttggcatgatatcttctgggggatggcagttaggtgcttaaaatgaaatattttgggttaaaaattagtatccctggctggcgtgttggctcaagcctgtaatcccagcactctgggaggccagggcaggcagatcacctgaggtcaggagttcaaggccaacctggccaacatggtgaaaccccatctctactaaaaaatgtaaaaattatttgggtgtggtggtgtgtgcctgtagtcccagctacttggaaggctgagacaggagagtcacttgaacttgggaggtggatgttgcagtgagccaagattgcaccactgcactccagcctgggcagcagagcgagactgtctcaaaaaacaaaacaaaaaacaaaattagtctcccggagcagttcaagaaatggagattaataatcatttatatcttttccttaccagggtcatttgtatgtttgtatggtctgagataaatcgtattcttttttttttttttgtctctagctgcttcattcagttgctacctaggtaacatagttggaagctacttaaagcatgggatagaagactttataccttcatcagtgttttctttaatcaaattactttcctcctagtaacaggaactgctgctttgcagwttcacatcgtattctatagtaaatgctgctccctggattcaggcaacattgtgcctctgctagatctagctgtgataggtatagggaataggaattgtgatgtgacgtgttagattgaaggaaaggatccctatgcagttttgaaaaaatggcactctgaaagattagccctggataaagtgctgtatggggaatttgggcaatcagagagcacatgagtcctgaatgggatcaggggaagtggtatcgaagtaattaacagataaatctcaaaaacgtaatgttgagcaagagaaaacagacacatcaagtacatactatacgattcatttatacaaaggttaaaaatgggcaaaacccatctgtaggattagaagtcaggatatagttattcttgtggaagggaatgggtagttactcgaaggagggcataaaagggggctgttgagatgctggtgatactgtttgttgatctgggtacattggtatgttgtgtttgtgaatattatatgagctacacacttacgtcctgtgtaattttctgtatgc

SEQ ID NO: 23051 - DNA, 602 bp, Homo sapiens
cagaatctgtagcagagaacccacgctttaaggagcagatgtgtccccatgagggttggaggagtcccctaagaaaatgagtccacggcccaattctgtccaagggcaggacggggcaggagcaggaagctgtctgcaggaccatacacagcgtcctggcccacttgtggccctccagggaagcagatttaaagcaacatcagcttcaaggaaggggtttgaacccacccatgagtctctgctccctcctcaatccctactgaattcagcagagaracagaagcctaggacaaaactctgtgctggctgaaaacagggaagggtgaaatcaccaagcctgagttctggggaatttctgcaaattcctcagatgagggcagaatggcctggacagctgcaaagtgagcacgtgtgaaagaaaagggaggggcccccagagtgaccgccagtcactctggggctggcaccaagggtgtgcgccggccatggggctgtcagtgcgcatggtggtggaattgtgtctcctccaccccagattggcacgtggaagtccgaacccccagtacctcagaaggtgacttcatttggagatagggtctcta

SEQ ID NO: 23052 - DNA, 602 bp, Homo sapiens
cagaatctgtagcagagaacccacgctttaaggagcagatgtgtccccatgagggttggaggagtcccctaagaaaatgagtccacggcccaattctgtccaagggcaggacggggcaggagcaggaagctgtctgcaggaccatacacagcgtcctggcccacttgtggccctccagggaagcagatttaaagcaacatcagcttcaaggaaggggtttgaacccacccatgagtctctgctccctcctcaatccctactgaattcagcagagaaacagaagcctaggacaaaactctgtgctggctgaaaacarggaagggtgaaatcaccaagcctgagttctggggaatttctgcaaattcctcagatgagggcagaatggcctggacagctgcaaagtgagcacgtgtgaaagaaaagggaggggcccccagagtgaccgccagtcactctggggctggcaccaagggtgtgcgccggccatggggctgtcagtgcgcatggtggtggaattgtgtctcctccaccccagattggcacgtggaagtccgaacccccagtacctcagaaggtgacttcatttggagatagggtctcta

SEQ ID NO: 23053 - DNA, 582 bp, Homo sapiens
tgcctgtgggtaccttccaggctttggtttggggattctccccatggctgcggctccagcagtgaccagcagggacagaggcggacaaacgcccagttttaatttagaaggcaaggcaagaaacaatttgggatttgcattttatttgcatttgtgtgcccggacacagttggagctttacagatgctttcgaagaaatgaagtgtgtgcattttcccatattccgaaaaggagaaagatgacaaccactttttgatgaattatagatgatgatgatgatgatgatkattattattattattattattacttgagacagagtctcgctctgtcgcccaggctggagtgcagtggtgcaatcttggctcactgcaacctctgcctcccaggttcaagtgattctcctgcttcagcctcctgagtagctgggactacaggcacgtgccaccacaccaggctaatttttgtatttttagtagaaacggggtttcaccatgttagccaggatggtcttgatctcctgacctcgtgatccacctgcctcagcctcccaaagtgctgggattacaggcatgagccatc

SEQ ID NO: 23054 - DNA, 582 bp, Homo sapiens
tgcctgtgggtaccttccaggctttggtttggggattctccccatggctgcggctccagcagtgaccagcagggacagaggcggacaaacgcccagttttaatttagaaggcaaggcaagaaacaatttgggatttgcattttatttgcatttgtgtgcccggacacagttggagctttacagatgctttcgaagaaatgaagtgtgtgcattttcccatattccgaaaaggagaaagatgacaaccactttttgatgaattatagatgatgatgatgatgatgattatkattattattattattattacttgagacagagtctcgctctgtcgcccaggctggagtgcagtggtgcaatcttggctcactgcaacctctgcctcccaggttcaagtgattctcctgcttcagcctcctgagtagctgggactacaggcacgtgccaccacaccaggctaatttttgtatttttagtagaaacggggtttcaccatgttagccaggatggtcttgatctcctgacctcgtgatccacctgcctcagcctcccaaagtgctgggattacaggcatgagccatc

SEQ ID NO: 23055 - DNA, 1040 bp, Homo sapiens
aagccataggtgagccagatcatgcatttatccaatagtggacgttaaactgcttccaaatgaactggactccatcagagccacatgaaggtgattcccaatccctgtctgttctttcagtcactgctgctgggggcatccaggagaccctcccctgcccatgcctgtggggctgtgctgtgtctgatgctccttatctcccatcttaatttgttctgtggcaccacctgcccctcctgtgcgtgcattgcttgttctccccattcactatttgtgccatatttttctccccgttcctttctctaccaaggcttctgacaccttctctttccaggaatgtaccttgtgtgtatttccctatttagagaacagctaaagtttcaagaacaaagaatctgggtttgaggttggtggttgggggtagtgggtgcaggcagacttcggaaatggagattccgttttttagagagagagagagagggagacagggtctcactctgttgcccaggctgaagtrcagtggcacaatcatagctcactataacctcgaactcctgggctcaagtgatccttccatttcagcctcttgagtagctgggactacaggcgcatgctcccatgctcagctaatttaatttttttttatttttgtagaaacagggtctcactatgttgcccaggctggtctcaaactcctggcctcaagtgatccttccaccttcccctcccaaagtgctgagtttatgggattgagtcactacatctggcttgaacttcccttctaatgtcagggactctttagtcctctggacagctgggatctctggaaaagggcaaggaaccatcctctcttccttcagagcaaactaagttcaactctaagtgctagctgtaagcaactggccccatgtaaatatcccatggaagggaacaattcagaaacatctaatgtggggtcactttcatttgtatgtgtttaattctctttgttttatttctctatcctttgtttcaacttcagtgactctctttctggatcc

SEQ ID NO: 23056 - DNA, 560 bp, Homo sapiens
aatcctctttaccccagaacaaaattttgagtacagtgacacagagatggaaataatatgagcttattcaccctgactgtggctctctgaagaggctgtccaatargtctaattatttggatgcttagagatagttgttaagttttcccttatgttttctgagctcctcaacatctttgtaataaattttctgttttgcataatttccatcattagtttctgttgcctgcaagcaaagaacccagagcaattcaggaggattgggatattagtcatgaagcagaaacattgtatgcggtacataagaccctgggaagctggtagtctctgcctgatctgtgctgatgcaagatgtactggagtgctgcatagagccatgcagctggtcgaccatttgtccactagggcagtgtgtgctcttgggatggtactgcttgaatcagtggttgaatatttgttaattcaatgttcatggcaacttttaaaatatgtatatatttgtgtgtgtgtacaggttgagtatcccttacccaaaatgcctaggactagaagttttcaga

SEQ ID NO: 23057 - DNA, 560 bp, Homo sapiens
aatcctctttaccccagaacaaaattttgagtacagtgacacagagatggaaataatatgagcttattcaccctgactgtggctctctgaagaggctgtccaataggtctaattatttggatgcttagagatagttgttaagttttcccttatgttttctgagctcctcaacatctttgtaataarttttctgttttgcataatttccatcattagtttctgttgcctgcaagcaaagaacccagagcaattcaggaggattgggatattagtcatgaagcagaaacattgtatgcggtacataagaccctgggaagctggtagtctctgcctgatctgtgctgatgcaagatgtactggagtgctgcatagagccatgcagctggtcgaccatttgtccactagggcagtgtgtgctcttgggatggtactgcttgaatcagtggttgaatatttgttaattcaatgttcatggcaacttttaaaatatgtatatatttgtgtgtgtgtacaggttgagtatcccttacccaaaatgcctaggactagaagttttcaga

SEQ ID NO: 23058 - DNA, 726 bp, Homo sapiens
gtggaatcctaaagaaagattgtctggtatgtgggaaatattacactgaactgaataggaggtcttatgtggcacaccaggaaagactttttgggaccttagaatatttctctttgtcctctgcagagactggagacctatcaggacaaagcatttcttagggaatttctgcgttatggtcacattcacttattcagtcattcrtacatcagatatatatttttgaactgtatgtcccaggaaccttttaggaacaaggaatacaatagagaacaacagggacaagatctttggtcttagaccaatcattttaataagaaatacagaccaaaaaaaaaaagaaggaacacatttgtaaataagttatgtattatggtaatcacaaggaagggaatgaactgtttgacaggggaatgatggaacaggatagtctaggaaggtctctctgaagtattgacctggagacgtagagcatggccatgcagagagacagcaggggagtgctgcttgcacatggaacagcaattgcgtaaactttgcagaggaaaagacctgagtgtgctggtgaagctgaaggagagctggacagtggtcagggagagaggagtacggcctgagaggccagcgaggtcatcctggttaagacgccccggttggttttattttccctgaaaaggagtcttggttttcatgtaatggtatcgcatacttatccaatgaaagggc

SEQ ID NO: 23059 - DNA, 726 bp, Homo sapiens
gtggaatcctaaagaaagattgtctggtatgtgggaaatattacactgaactgaataggaggtcttatgtggcacaccaggaaagactttttgggaccttagaatatttctctttgtcctctgcagagactggagacctatcaggacaaagcatttcttagggaatttctgcgttatggtcacattcacttattcagtcattcgtacatcagatatatatttttgaactgtatgtcccaggaaccttttaggaacaaggaatacaatagagaacaayagggacaagatctttggtcttagaccaatcattttaataagaaatacagaccaaaaaaaaaaagaaggaacacatttgtaaataagttatgtattatggtaatcacaaggaagggaatgaactgtttgacaggggaatgatggaacaggatagtctaggaaggtctctctgaagtattgacctggagacgtagagcatggccatgcagagagacagcaggggagtgctgcttgcacatggaacagcaattgcgtaaactttgcagaggaaaagacctgagtgtgctggtgaagctgaaggagagctggacagtggtcagggagagaggagtacggcctgagaggccagcgaggtcatcctggttaagacgccccggttggttttattttccctgaaaaggagtcttggttttcatgtaatggtatcgcatacttatccaatgaaagggc

SEQ ID NO: 23060 - DNA, 586 bp, Homo sapiens
aattaggcaggtgtggtggtgtgcacctgtaaccctaactactcagaaggctgaggcaggagaatcatgtgaacccgggaggcggaggttgcagtgcgctgagatcgcgccactgcactccagccagggcgacagtgtgagactccgtctcaaaaaaacaaaacaaaacaaaacaaaaaacgctatgctctttgccccagctctggatcctcgattgtctctcctctctctgagaactatgctcctgggaggaacaggatcaggtagaggctgggtgtccagctgcatagccagactgtctgcactcccatcacggctctaccacttaccagctgtgttaactcaggcacgtgactctacctcatggtgcctcagttttcttacctataaagtgggatgctaatagcacctaccttattaggttgttgcaaggattaaatacactatatgaaaagtgcttacattcactacatgaatcatattcactstcccaattaaaaaaacaaaacaaaacactattgactctcaaccatggtccaatttctcttctaccctccacagtcaaacttctgggaagagttgtcta

SEQ ID NO: 23061 - DNA, 1141 bp, Homo sapiens
caggtggcgggagctggtgagtggagccatggccgagccctgctggggccggcgcgggcgggagcgggacgcggccttgcgctggggaaacgcggggaccccctacccgcgcccgccttcaccggaagactcggaaggaacctggagttctccgcaggcccgggccccgccctgagctttccagcggccgggaggagcggrtcctcggggccaggaaggtgagcgcacctttcgctgagcacagggcggcaccgcgcgggcggaccccggattctccacccgcgacccaacgaattttcgccctatccggtaccggagacgaaagtctccttcttccgaaataccggcttcctctcttcgccctgccaaccacttttttagtttcttctcatctctcggaagcgcacgtctcctaagttaaggagtgctgagtaacgcgtgagggagttggggtgtctgcgagcacctgtgattgaagccccctcttctgtgatcagtcttcgttttctgtcttccggcagcctcagtttcccccccatgaagtgatggtgtgtgtgtgtgtgtgtgtgtgtgtgtgtgtgtgtgtgtgtgtgtcgggccccgtgtggtgccctctgtgcgcagcgagagctataactcaaggtgtgcacggggagagtgaagcgaccacgcacctgcttccaatcgggctcgggcgcgaacactcaggctgattcctgaaggtcgttttctgaaggaaaagacagagcatgcactagccacgggtgacattcccacccgtacaaccgcgtggtgggcgcgtacatccaacattgacccatgcaggcgcccgcccactgcgcacaccggtcgcagggcacttcgttgttgaacgttgggagcagcgtttgaaggccggatctctcctggcagtgcggattcgggaccggcggaagcagtatggcctctgcgaccgttatccctacttttcggggccgaccccagggccctcacaactcctcatcaccgcatatgtgagcgccgcccccacagggttttctccacgacctcgttcttggctaggtcgcacctctcttagtacctcctctctggccagaacgaatctttgactccgagctgcgcagtctacgcagacggggca

SEQ ID NO: 23062 - DNA, 497 bp, Homo sapiens
aggtttcaatgccagctccttgggtcgggggaagaaaataagtacaatcgtctaaggatggagtcagaccagagctaagctgttgttttactacatactagctccaagaccctgggcaacggctccagcttcaatttctccaagtgtaaaatgcagatgatcacagtatctttctcaaaagattgctgtgagagattaaagggggtgggggtggggcatccatgtaaacatttcacctagtggacgaagtaaatgctcaatgaaagctaggatttttgttgtkactatcaccagtggctgaaaggtaggcactgcagttaccccgggtccaaaaagagtccagactgaacaataaaaagcaaacagcccaatttaaaaaaatgagcaaaagatattcctccaaagaagatataaaaatgaccaataagcacatttaaagatgctcaatatcactaatcatgagggaaatgcaaatcaaaactacagtgagatattag

SEQ ID NO: 23063 - DNA, 721 bp, Homo sapiens
aaaaaaaaaagtatgtgagatgatggatatgctaattagcttgatttaatcatcccacaatgtatggatgtatcaaaacatcatgttgtaccccataaacatatacaattattatttgtcaatttaaaataaaattgttatgttaggtaacactggtgaaagtcactatatgttcctcctgccaccacatcccttcctgctgtcagattctggccctgtaactttacaccagagccgatgctgaccaggtcctaggtgctttcactctctgtgcttctgcccaataaaaaaaaaaaaaaaaaaaattcctgaaatgcgttcttggctgcctcaatcctggtattgtgggccaccattttggttccacagttgtctgaccagttctttcccaccctggctttggaaggttagaaatcttttgtttttcctacttttcaattacaaaagcctgtttgaacagcctctgtgacagcccatgttcaaataagcttttgtaattgaaaacagagctcscaatgtggctgcagggatgctcgcctcaaaaggaggggttgcagatccagctgtgagctggtccctaaggccactttcaaagtgtttaaagcttctttccaatttaaaaaaaaaaaaaaaaaaggaaagaaaatcctatttaaacacacagtccagaccgactggcttgggtgattgaaaatgaaaattttgacagagacattgcttt

SEQ ID NO: 23064 - DNA, 721 bp, Homo sapiens
aaaaaaaaaagtatgtgagatgatggatatgctaattagcttgatttaatcatcccacaatgtatggatgtatcaaaacatcatgttgtaccccataaacatatacaattattatttgtcaatttaaaataaaattgttatgttaggtaacactggtgaaagtcactatatgttcctcctgccaccacatcccttcctgctgtcagattctggccctgtaactttacaccagagccgatgctgaccaggtcctaggtgctttcactctctgtgcttctgcccaataaaaaaaaaaaaaaaaaaaattcctgaaatgcgttcttggctgcctcaatcctggtattgtgggccaccattttggttccacagttgtctgaccagttctttcccaccctggctttggaaggttagaaatcttttgtttttcctacttttcaattacaaaagcctgtttgaacagcctctgtgacagcccatgttcaaataagcttttgtaattgaaaacagagctcgcaatgtggctgcagggatgctygcctcaaaaggaggggttgcagatccagctgtgagctggtccctaaggccactttcaaagtgtttaaagcttctttccaatttaaaaaaaaaaaaaaaaaaggaaagaaaatcctatttaaacacacagtccagaccgactggcttgggtgattgaaaatgaaaattttgacagagacattgcttt

SEQ ID NO: 23065 - DNA, 946 bp, Homo sapiens
ggatcccaattttttccatcttatgtctgtgtatatttcataaacggcataaaatccttttttgggggaaagtaatggaaatgtatatgtgctctctgtgtgtattcacacaagtacctgcatgctcccctttagctatgcaatcttgagcctttgaacttcagccagtacaaaggaatagaaatattgctggcactaacttcaattagagccagccaaaacaagcgggcatgctgagtgtctgtttttcccatccatgactccaagagcagcccatcccaggattctagcccaacctcaccctctctggaacaagagccatttctctcttgcatgctctagggccctaaatctaacttacttggaggggaggagatttcttgtctgccaagggtagtggaggcccctgcatctgtcatgcagatccatccagcactcttgccagatctagcgtgctgatcccttatgctgacccgctaatactaacattagtgtgggactgcccagagccaagagctggaaaccaaatctgtagcaaggagctgctcaggccagccaaaatgaaccaggacttattctattagagagaatatttcgtttgctccaataacaagaactctattgagattggttaattcaattctgcccatcttatcagatttatttttaatgaaactgaacaatagttkcatttgttatgttattagttttcccagtagaagcaatgaggctttaacactgaaagcgaggcagacaagctttgccagtatctttggcttatcagtggtgcatgccagtttggatattacacagtgaaatgcttctgtcctcttctgggtctactttcttgcttatgggacttgtagagctgtgaagccatcttttctcatgtaagttccctgaacctcatctaatcttgtcattctcttgttaatacacctgcctg

SEQ ID NO: 23066 - DNA, 1025 bp, Homo sapiens
ggcccccccagcgctccgggcccggcatcccggggctctccatcgcggggtaccccagttcgcggtctgccatcgggcagcccgggcgctactcacctccgcccgcgtccgtgttccaggtccggcccggagcggccatgtcccacggccccaagcagcccggcgcggccgccgcgtgagtgcactgatcccctccccacgccctcgctactttcccggctgcagccctagctcctgaacccctgacccagtccctcccgccggagtcttgactcccccacctgggtcagggggcttctccctccacccaattctgcaccccccacctcggyctccagtccctcccaggagccccgcttgtcccaccttccccggatactgaccccatcagaccctgcctcctcgggctcatgcactctcgctgcagccccgccgtcgggggtcaaaacgccctggggtgggcttttgggggaggggagattcttgggacggggctgaccgcggtatccttggctccaggccggcgggcggcaaggctccgggccagcatgggggcttcgtggtgactgtcaagcaagagcgcggcgagggtccacgcgcgggcgagaaggggtcccacgaggaggaggtgagagtccctgcgctgagctgggggaggccccgggctcccgccccagcctcgaagccccgccccaggctggatttgaattgcttgtggctccgcccacagcccattttcctctggaagctgagaccccgccccgtgccagctgccacgcccctgacaggtcctctgccactctaagtccaggccccgcccaccgcacaatgccagctctgcccactctaaggtcccgcccacttccactccttgggggcggcaccctccccttggtcctgtgggcccgttctccagcagaaaaccacgcccaccaagcagaggccacgcccacaaccgaagtcaacgccaaccctgtactcaaacctcggcccatagttcctcagatcccctcacccctggccag

SEQ ID NO: 23067 - DNA, 602 bp, Homo sapiens
aatgggacattttctctccatctccccccgcactgaattcgtcaccaagtcctttccatttcacttcctcaatacctttgaatccatctggatcatcttgtctgccaccatctcattgagttactgcagtggcctcctaaccagtgttcacactcacactcctgctcccagatcccattttctataacacaggtagagagatattgacaagcaggctgggggtggtggcttgcgcctgtaatcccagcactttgggaggccgaggctggcagatcagttgaggtcaggagtttgagaccagcctggccaacatagcaaaactccgtctctaataaaaatacaaaaattagctgggcatggtggtgtgcgcctgtaatcccagctagtcaggaggctgaggcatgaaaattgctggaactctggaggcagagcttgcagtgagccgagatcacaccactgygctccagcctgggcaacagagtgagactctgtctcagaaaaaaaaaaaaaaaaaatagatattgacaagcagagctcagtccattttatttgcctgcttaaaatccctccatggcattctgtggcttttagcttgaggatgt

SEQ ID NO: 23068 - DNA, 540 bp, Homo sapiens
gccctttgattctgcaaaaataaaaccaatttgccttaaaaaaaacttgtctcaatttttttctttcttcatatttgcaagttaaataggattaaatcccaatcagccattcattatacacttgctaaatatgtagacttagacttggttaagagtccaagttgaatgtcaggtgctttgatttacaggaaacttctggagttgcttgtggtatcatcttttcctactcaaaaaatgtatcttgkccaggcacagtggctcacacctgtaatcctagcactttgggaggctgaggcaggcggaatgcttgagatcaggaattcaaaaccagcctgggcaacatggtgcacccttgtctctacaaaaaatacaaaaattagctaagcatcgtggtgcacacctgcagggctgaggtgggagggtcccttgagcctgggaggtggagtttgcagtttgccgagatcatgccactgcactccagcctgggcgacagagccagaccctatctcaaaaaaaaaaaaaaaagtatctctttgtttt

SEQ ID NO: 23069 - DNA, 520 bp, Homo sapiens
aatcatgatatagttayagattgctactgaacttcattttgaaagtcctttcaagtatggaaactagtacgttagaatatgttttccatttgtcaggatggtctgtaatttctgttttctctgctttttgggtcagttaaaggaccactatttacaaaggcttaagtgggtgtgttttccctttcccctttcctataggctctacttggttccttttctagcatgctgtctgaccaatttagaaaatttcaattgtctacaggcgttgtcagttaaaactatttttttaacctatcaacagtgaatacttttgagtagtaattgttttgtgcctaatgctaagtgtatttattagcatttcggtgttgatctagaaaatttttacttttaatcctgtagttttagaagtatgttattcctttatctgtttctttatatcagtttttcccataattgggtaaactcctattttataaaatacgaagtacatttctggttttttctacataggttactagac

SEQ ID NO: 23070 - DNA, 2139 bp, Homo sapiens
tcatgcctcggcctcctaagtagctgggactacaggtgcacaccaccacagccagctaattkttaaactttttgtagagatggtgtcttgctatgttgcctaggcctggtctcgaactcctggcctcaatccaacctcctgcctctgcctcctgaggctgtgtgattacagatgtgaattgctgtgcccagcccttatcttctattactatatttcaagctggtcatggtcaaaattgttcaacctggttttcccccataaaattaagtcactttcttcaaccctcttccatcagattttattcatctcttagttttcttctctgtcctatattttctctatctcaaaatgtagcacctagaattcgacctgatattccctgataggggttgcggagagtacagattgctgcccaagagtgttttgttgttattgttgttttccttttttgttttttaaatgaagcttttggtgtcctctaaatcctctttgtaggaacttgccagaaactgttaaatctgataggattgaatctggcatgctccagtcatctgagcaagagtttgtttagggcttgtgaatgtgcccttgatcgggatgtgaggttggaatgcaggacgatgcttttggtctggacattggaacgcagcagtcggccctgggcaggggttggggcccggatggggtcggctcctcgcaggaacagtgatcctgtctctccccagacaccccccacccacaacatactccctccttgtctgcggcttacccagcacactccctctgctctttgccctgctggaagagctcatgcccataatatcaactgcaggactcctggaccaggcctgccttgctgccttccagaacacacctgccgcccccatccccctgatcaatagctgatggtgcccacatctatacgcccagctctcgcctcccctgagctccctggcctgtgggttgtctacgtgcacctcagcccaacacgctgacaagtgcctcatttctgctgcccctccacccggcattcctcatctcatcccggatccacccccccgacgctcagctgctcagaccaaaagcccagacatgtccttgttgtccccgcctccctcacgccctgaagacctgctgtctgcaattctggtcacctctctccagagtgtgttccgagagcagccctccctcctctcatctttctggctcctgcttcggtggctgttcagtgacctcctcactggtctccctgtttcccgtcctccccacccctgccaggctcttccagcaaccagcatgaccttcctagcgcagagagcacaccccccggcccctgctcacagccctccgcgtgcaattccaaacttcccacagccccaggtccaggagcaccctgcctactcggcatctgctcccagccccccacagccacagactcctttctggtgcttagacctgccagccctgcgcccacatcaggaccctgcccagcacacccctccctgcctgagcctccgcgcagtcggtcctcacctctctcctctctatgtccttgcccccgtgagcagatgtaaagtcccccgcctgccgcccgcccactctctctctctctccagtgtatcatcacgtttggctttcttcatagcacttcatccggtctgaggtcatcttttatttcagtgtggcttgtctgccgcagtggaacgcctgttccggagagcagggcccttgcccgccacatcccagctcctgcaacaggcccgcacgcagtaggcacctgttgaataaatacgccacaatgccacaaaaagaaagaacagaaatcgctgtgggctcctgcctagaggcaggtcctgtctctttgtctcccacctggggcagcaggaaggtatcttgtttctgtccctgcccaggcctgtagcccagcgccctgcacagccgcctgcagttcttgccctcgtgctgttatgttatgccccagagaggaagactgctctgtaaggtagtgagtttcctgtgccagaagcgttcagacagagacgggataccagcagttcatccaagtttccatcagcgactgtttttccttaggcggaagccacactagatcagtggttttctaacattttctaaaacact

SEQ ID NO: 23071 - DNA, 2139 bp, Homo sapiens
tcatgcctcggcctcctaagtagctgggactacaggtgcacaccaccacagccagctaattgttaaactttttgtagagatggtgtcttgctatgttgcctaggcctggtctcgaactcctggcctcaatccaacctcctgcctctgcctcctgaggctgtgtgattacagatgtgaattgctgtgcccagcccttatcttctattactatatttcaagctggtcatggtcaaaattgttcaacctggttttcccccataaaattaagtcactttcttcaaccctcttccatcagattttattcatctcttagttttcttctctgtcctatattttctctatctcaaaatgtagcacctagaattcgacctgatattccctgataggggttgcggagagtacagattgctgcccaagagtgttttgttgttattgttgttttccttttttgttttttaaatgaagcttttggtgtcctctaaatcctctttgtaggaacttgccagaaactgttaaatctgataggattgaatctggcatgctccagtcatctgagcaagagtttgtttagggcttgtgaatgtgcccttgatcgggatgtgaggttggaatgcaggacgatgcttttggtctggacattggaacgcagcagtcggccctgggcaggggttggggcccggatggggtcggctcctcgcaggaacagtgatcctgtctctccccagacaccccccacccacaacatactccctccttgtctgcggcttacccagcacactccctctgctctttgccctgctggaagagctcatgcccataatatcaactgcaggactcctggaccaggcctgccttgctgccttccagaacacacctgccgcccccatccccctgatcaatagctgatggtgcccacatctatacgcccagctctcgcctcccctgagctccctggcctgtgggttgtctacktgcacctcagcccaacacgctgacaagtgcctcatttctgctgcccctccacccggcattcctcatctcatcccggatccacccccccgacgctcagctgctcagaccaaaagcccagacatgtccttgttgtccccgcctccctcacgccctgaagacctgctgtctgcaattctggtcacctctctccagagtgtgttccgagagcagccctccctcctctcatctttctggctcctgcttcggtggctgttcagtgacctcctcactggtctccctgtttcccgtcctccccacccctgccaggctcttccagcaaccagcatgaccttcctagcgcagagagcacaccccccggcccctgctcacagccctccgcgtgcaattccaaacttcccacagccccaggtccaggagcaccctgcctactcggcatctgctcccagccccccacagccacagactcctttctggtgcttagacctgccagccctgcgcccacatcaggaccctgcccagcacacccctccctgcctgagcctccgcgcagtcggtcctcacctctctcctctctatgtccttgcccccgtgagcagatgtaaagtcccccgcctgccgcccgcccactctctctctctctccagtgtatcatcacgtttggctttcttcatagcacttcatccggtctgaggtcatcttttatttcagtgtggcttgtctgccgcagtggaacgcctgttccggagagcagggcccttgcccgccacatcccagctcctgcaacaggcccgcacgcagtaggcacctgttgaataaatacgccacaatgccacaaaaagaaagaacagaaatcgctgtgggctcctgcctagaggcaggtcctgtctctttgtctcccacctggggcagcaggaaggtatcttgtttctgtccctgcccaggcctgtagcccagcgccctgcacagccgcctgcagttcttgccctcgtgctgttatgttatgccccagagaggaagactgctctgtaaggtagtgagtttcctgtgccagaagcgttcagacagagacgggataccagcagttcatccaagtttccatcagcgactgtttttccttaggcggaagccacactagatcagtggttttctaacattttctaaaacact

SEQ ID NO: 23072 - DNA, 2139 bp, Homo sapiens
tcatgcctcggcctcctaagtagctgggactacaggtgcacaccaccacagccagctaattgttaaactttttgtagagatggtgtcttgctatgttgcctaggcctggtctcgaactcctggcctcaatccaacctcctgcctctgcctcctgaggctgtgtgattacagatgtgaattgctgtgcccagcccttatcttctattactatatttcaagctggtcatggtcaaaattgttcaacctggttttcccccataaaattaagtcactttcttcaaccctcttccatcagattttattcatctcttagttttcttctctgtcctatattttctctatctcaaaatgtagcacctagaattcgacctgatattccctgataggggttgcggagagtacagattgctgcccaagagtgttttgttgttattgttgttttccttttttgttttttaaatgaagcttttggtgtcctctaaatcctctttgtaggaacttgccagaaactgttaaatctgataggattgaatctggcatgctccagtcatctgagcaagagtttgtttagggcttgtgaatgtgcccttgatcgggatgtgaggttggaatgcaggacgatgcttttggtctggacattggaacgcagcagtcggccctgggcaggggttggggcccggatggggtcggctcctcgcaggaacagtgatcctgtctctccccagacaccccccacccacaacatactccctccttgtctgcggcttacccagcacactccctctgctctttgccctgctggaagagctcatgcccataatatcaactgcaggactcctggaccaggcctgccttgctgccttccagaacacacctgccgcccccatccccctgatcaatagctgatggtgcccacatctatacgcccagctctcgcctcccctgagctccctggcctgtgggttgtctacgtgcacctcagcccaacacgctgacaagtgcctcatttctgctgcccctccacccgrcattcctcatctcatcccggatccacccccccgacgctcagctgctcagaccaaaagcccagacatgtccttgttgtccccgcctccctcacgccctgaagacctgctgtctgcaattctggtcacctctctccagagtgtgttccgagagcagccctccctcctctcatctttctggctcctgcttcggtggctgttcagtgacctcctcactggtctccctgtttcccgtcctccccacccctgccaggctcttccagcaaccagcatgaccttcctagcgcagagagcacaccccccggcccctgctcacagccctccgcgtgcaattccaaacttcccacagccccaggtccaggagcaccctgcctactcggcatctgctcccagccccccacagccacagactcctttctggtgcttagacctgccagccctgcgcccacatcaggaccctgcccagcacacccctccctgcctgagcctccgcgcagtcggtcctcacctctctcctctctatgtccttgcccccgtgagcagatgtaaagtcccccgcctgccgcccgcccactctctctctctctccagtgtatcatcacgtttggctttcttcatagcacttcatccggtctgaggtcatcttttatttcagtgtggcttgtctgccgcagtggaacgcctgttccggagagcagggcccttgcccgccacatcccagctcctgcaacaggcccgcacgcagtaggcacctgttgaataaatacgccacaatgccacaaaaagaaagaacagaaatcgctgtgggctcctgcctagaggcaggtcctgtctctttgtctcccacctggggcagcaggaaggtatcttgtttctgtccctgcccaggcctgtagcccagcgccctgcacagccgcctgcagttcttgccctcgtgctgttatgttatgccccagagaggaagactgctctgtaaggtagtgagtttcctgtgccagaagcgttcagacagagacgggataccagcagttcatccaagtttccatcagcgactgtttttccttaggcggaagccacactagatcagtggttttctaacattttctaaaacact

SEQ ID NO: 23073 - DNA, 1083 bp, Homo sapiens
tctcacctctactttgcttgtttcatcaccttctctcactgaccctcctttgtttcccttgtaaggaccattgtratcatgtcatctgaccagcctgggtaatccaggatgatctcttgacctcaagatccttaacttaatctcatctgtgaaattctttttgccaagtaaatttacatattcacaggttccagagattagaacctaaacatttttgggaggggtgaggaggtattcagcctaccacagttaatgaagagtgagtggcctgagataaggtcttagagattggcagggaccagatcatgataggtcatgatagggagtctgtttttcagtcatagtgctgagaggtttcagtaggggaatgataggatttgatgtgaaaaagtctccctggccgctggatggcgattagactgttgggatcgagagcagaaggcctcagctttttattcataacatcatacggtggatctcagtcttgctgtacgttatgatcacacctcaaagcaattatatctgaaccactgagggctggacccaagtatcagcctttttttgtttgtttgtttgttttttaagaaaaagagcattctaattgtagccaaggttgagaaccactagtttcatagatctgaatccattttaccttttcagccttagctcagtaggagcttctcgcatccatcacttactgcatgagctacttgaccatttcttagacaaacttcctgtattcccacctgtgcctttcaaaatatacctagtctagggaggcctacgcggactgtcagggcccagctgacaaactctcctccagaaagcttctccagtgccctgtagtaggaatgatttgcttccttccctggctcccatttgcacttagatttctcagccctgatcacagtcagctgtatattatcgtctcctttgcttatttactcatgccttcaacaaatactgtaccacttggctgaatgctctgctagacactaggatttactacaatgcaaagacagtcttggttgggcgtggtggctcacacctataatcccagcactatgggggggtgaggtgggc

SEQ ID NO: 23074 - DNA, 1083 bp, Homo sapiens
tctcacctctactttgcttgtttcatcaccttctctcactgaccctcctttgtttcccttgtaaggaccattgtaatcatgtcatctgaccagcctgggtaatccaggatgatctcttgacctcaagatccttaacttaatctcatctgtgaaattctttttgccaagtaaatttacatattcacaggttccagagattagaacctaaacatttttgggaggggtgaggaggtattcagcctaccacagttaatgaagagtgagtggcctgagataaggtcttagagattggcagggaccagatcatgataggtcatgatagggagtctgtttttcagtcatagtgctgagaggtttcagtaggggaatgataggatttgatgtgaaaaagtctccctggccgctggatggcgattagactgttgggatcgagagcagaaggcctcagctttttattcataacatcatacggtggatctcagtcttgctgtacgttatgatcacacctcaaagcaattatatctgaaccactgagggctggacccaagtatcagcctttttttgtttgtttgtttgttttttaagaaaaagagcattctaattgtagccaaggttgagaaccactagtttcatagatctgaatccattttaccttttcagccttagctcagtaggagcttctcgcatccatcacttactgcatgagctacttgaccatttcttagacaaacttcctgtattcccacctgtgcctttcaaaatatacctagtctagggaggcctacgcggactgtcagggcccagctgacaaactctcctccagaaagcttctccagtgccctgtagtaggaatgatttgcttccttccctggctcccatttgcacttagatttctcagccctgatcacagtcagctgtatattatcgtctcctttgcttatttactcatgccttcaacaaatactgtaccacttggctgaatgctctgctagacactaggatttactacaatgcaaagacagtcttggttgggcgtggtggctcacacctrtaatcccagcactatgggggggtgaggtgggc

SEQ ID NO: 23075 - DNA, 1083 bp, Homo sapiens
tctcacctctactttgcttgtttcatcaccttctctcactgaccctcctttgtttcccttgtaaggaccattgtaatcatgtcatctgaccagcctgggtaatccaggatgatctcttgacctcaagatccttaacttaatctcatctgtgaaattctttttgccaagtaaatttacatattcacaggttccagagattagaacctaaacatttttgggaggggtgaggaggtattcagcctaccacagttaatgaagagtgagtggcctgagataaggtcttagagattggcagggaccagatcatgataggtcatgatagggagtctgtttttcagtcatagtgctgagaggtttcagtaggggaatgataggatttgatgtgaaaaagtctccctggccgctggatggcgattagactgttgggatcgagagcagaaggcctcagctttttattcataacatcatacggtggatctcagtcttgctgtacgttatgatcacacctcaaagcaattatatctgaaccactgagggctggacccaagtatcagcctttttttgtttgtttgtttgttttttaagaaaaagagcattctaattgtagccaaggttgagaaccactagtttcatagatctgaatccattttaccttttcagccttagctcagtaggagcttctcgcatccatcacttactgcatgagctacttgaccatttcttagacaaacttcctgtattcccacctgtgcctttcaaaatatacctagtctagggaggcctacgcggactgtcagggcccagctgacaaactctcctccagaaagcttctccagtgccctgtagtaggaatgatttgcttccttccctggctcccatttgcacttagatttctcagccctgatcacagtcagctgtatattatcgtctcctttgcttatttactcatgccttcaacaaatactgtaccacttggctgaatgctctgctagacactaggatttactacaatgcaaagacagtcttggttgggcgtggtggctcacacctataatcccagcactatgggrgggtgaggtgggc

SEQ ID NO: 23076 - DNA, 531 bp, Homo sapiens
tgcaacctctgcctctctggttcaaacgattctcctgcctcagtctccccaatagatgggattacaggcatgcgccaccacacctggctaattttttgtatttttagtagagacggggtttcaccatgttggcaaggctggtcacaaactcccgacctcaagtgatccgcccacctcggcctcccaaaatgctgggattatatgtgtgagccaccrcgcccggcctattctatttattcttaagtatctgcagtaattgctactttactaatagggccacttcaaagattgtattttataactatatgggaacataatagattttaaaaaggaatcttgcggcaaacttctaaactcttaggtagattcttttgaatttttctatgtacacattcatatcttcaaataataactattttgctttttcctaagctccatacctcatattttctcttcttctcttactttgctggcctgggcatctgatccaatattgactagcagtgatgacattgaacatgcttgtcggcc

SEQ ID NO: 23077 - DNA, 1036 bp, Homo sapiens
tggagccgatcctgtcacccagccgaggccggagcggcggctccgcacgcccagagcgggctccgactctttgcagacccagatccttctcagatcccggtctctattaagytctgatcccaccctcaccccgacctctcttccagaaccccagccttttctcccgattctccctttcctgccttcggtttcttcccaattcttacccatcccctactagctgccatccctgacacccttctctcctgggccacgcagtccaacctgaacgggagcggggaggtatcctggcaccttccttggctcttacccctcggtttctcacaggacgcatgtccccttgccgagttgagggcagctggcctagagtgagtgagggtcgtgttgggggaggggggaatggagtggggaaggggaactggggagcactggagccttgtcctcattaactccttgtgtccgtaggcctgtgggacactatgaagaggtggagctgactgagaccagcgtgaacgttggcccagagcgcatcgggccccactgctttgagctgctgcgtgtgctgggcaaggggggctatggcaaggtaggggcgggcgcaccctcctcctggcctcacagcctccatctggaggcagcaaagggttctcaaaacaaattagacttgtgaatcagcagggcctctaatgggattcagagccagaaacataaaggagggaaggccaaatcctctccaatcggacttgaaatcttcactgccccacccttggcagggcctaggcctcctgatcccaaagccagagcttcagggtggggcttcttgaagataggatgtggagagggaagttgatcctgtctcccctgccctacaggtgttccaggtgcgaaaggtgcaaggcaccaacttgggcaaaatatatgccatgaaagtcctaaggaaggtgagtcactcgttcagccaacgaatactgtgtggctgccattcccaacatgctgtaccaggctttgggaagacagcagggaacacagtggagga

SEQ ID NO: 23078 - DNA, 540 bp, Homo sapiens
aatcacacttacttaaagtcaactgatgtttggattatagtcacacctacgaagaacctttatagcaactcctagattaacatttgtttgcatggccagggaagatagctttaccaagtgtacgcacccaaaatgtcatcacaccttgtgatacaaaaatatgctcaaatatcttaacagtgtttttgaatgacagatttaaaaacaatgacttagcctagttaggggaggtgaagaaaaaagatatgtccaaggttacctagaaagttagtggttatttaacatagtcagaactagaatgaaatcctcatgattcctggtcatttcttttaatacatggtgtattgttaattccagcattaaggagagaggctggacaaacaccagccaaggggtggaaaatcctaccaataggttattgaagatacaacatctacytaaatgtgctttttgaaaatgaatagaatctcagttattttgttttgcattaaaaattctctcaatacatgcagaaaaggccttcgataaaattcaacaccc

SEQ ID NO: 23079 - DNA, 1176 bp, Homo sapiens
gtaacttttaawtttttttaccctgccttaaatgcctgaagatggttaatctctgaaattaaatactcttttgattgtatctcaaagtcagcatctttttatcaacattgactgctcttctggacactcttatttatggctcttcctcctgctccagattctgaactgtgcctgtcacctccctcaagacagccacagagccccaagatccttataacctcaccatgatgttccactccacagggttctgccattgtgtgctttctttttcatccttctctgatgccacctcctcctctgtttgttgccagccttaataattttaaattcatggatcacaggtagaaaccccagttttgtctaagtagacgatcgattttttttttcttaaagctagtcttccatttttctctttctctatttgtcaccttttcccaagagataattttttcttttagttttcagaggagccttcaatttctttttttaaaccttttttctaacttttattttaagttgaggggtacatgtgcaggtttcttatacaggtaaacttgtgtcatgggggtttgttgtacagattatttaatcacccaggtatttttttttttttttttttttgagacggagtctcgctctgtcgcccaggctggagtgcagtggcgcaatctcggctcactgcaagctctgcctcccgggttcacgccattctcctgcctcagcctcccgagtagctgggactacaggcgcccgccactacgcccggctaattttttgtatttttagtagagacggggtttcaccgttttagccgggatggtctggatctcctgacctcgtgatccacccgcctcggcctcccaaagtgctgggattaagcttcatattcattagttatttttcctgatcctaaccctcctcccaccctacaccctcctataggccccagtgtgttttgttcccctctatgtatctgtgtgttctcatcagttagcttccacttataagtgagaatatacagtattttgttttctgttcttgcattagtttgctgaagataatgccctccatccatgtccatccatgtccctgcaaagcacattatctcattctttcttacgagccttcaatttctaatcattcctcagaacctcctccctatggtggctttcacaa

SEQ ID NO: 23080 - DNA, 2209 bp, Homo sapiens
agggtcctcagcccccatctgcctcccagcctcacttcctgcacttccatgaaaataacctttgttccccctacaaggaacttcttgcagttatccaaatgttccctgtcctggtgcacactgaggcccctgcatggagccaatccttcacttaaatcactatgcccccatgccttcatctggagaactcacacttctgttcagaccctcagatgtgactgcttccgtgttactgctttctctgccatttcactgggcctggaaaataccttctgcaaactccagggagagttactcagctcccccttccctggtgctttgctgatgcctctgtcacagcactcagcacatgacactcggattactggctcacagtcccctgcttccaaaggctctgcctgcatgcctccaggggttatttccagagcacccagctcagtgcctgtccagtggtgaacgtccatacatgtgtgttgaatgaatgagtggacagatgtgtgcagggagaatgtgaattcactcccacaaagcttgtatgtgccaaaaaatattggttatttttcataattgagctaatcttgtttccctagccctatctcctacatggcaggagcatagagaaatttttatccagctgagtaaatgtagcccagtgctgtattttaaacagtcccttaaggtaaagtgatttgtctctcagattgcctctctcccagctcctctcttggacggagctggacacatggcggagagggactttgagatcccaggaagcagggaatgatgagggctggtcctagaagccacgcgagccctctggatgcttgctcatctctgctgcatggggctaggctgaactgctgtctgaactggtacctgctgaggtccatctggttagggcatccactgctggagtccatgcccttagggcatccactgctggagtccatgccctctacttgcctccggccttgaaatctccacctctgctctctgacccttgagttctgttggcccactgactttagcacctctatacctcagctgaggacatggacacttccaggtccctcacactccgtgaaggagctagaggagacagcagccctatgacaggctcattggcctaccggtgtcccatcacaacctctgtaacagccaggataagcttcaagccaagggctgaccttctcccagggtctgccgaggcactccaccagccccagtgttgctgggcttccccgtggccatctgggtgtttctaaagcaactccccaccaacctcttgggctgtggtgaccaagggctaaaaattaagtggggaccctggtgtctgacttttgctccacttctgataccttctttctctcccgtttcactaggactggaaaatacaggcttttttcccaatccttgtttctctcaaaccaagacctcatctacataaaacatctagggtcaggcccatccactctagctcttattacagagmaagagctccagaaatattaaaaaaaaaaaatttctctctctcagtaatgcttggctgttactgcttaatctccagcatctggagaagtggctggtacataacaagaacctaataaatatttgctgggtgagtgagtaattaataaatgaatgatcttgccccagtaagacaatagacttgacacagattcaaacaaaatatctaatttgacagtcaaagctgaaaaagcatgttgtgctttaacagttccaaagcccccacacaataagagtaaagggattaaaaatacacttgaaaatatttccaaaatatcattctcagttcatgcaagtgagtaaatcataaattaataaatgaatgaatgaatgaatgaatatgatctggaggatggaagggaaaattacatacttgtgtctcgagttagagattgcctggaacactctgggaacattattttcatccagtgatctatggtgcaaactgtgcttttcaacaagagggaaagagcagtggtgcctgtaaacctctggagtctccctcggccctgaggctttgctatgtgctggccattcagccctgatcatctgcctctgggaaggccttctccttctgcagccacccctcaatacaccgcagtaatgcggacggcagattttgttctcctaaaggcttacagctagtagattggcactatcattgaaactcatttccagatga

SEQ ID NO: 23081 - DNA, 1205 bp, Homo sapiens
gtgctttagaagcaaaccttaacaacgatgttcctgtcatttaacacttaaaaaagcctaccttttgattctaatgaattgatgtatctttttgatggtcgtttctaacagagatgaagagctctatccttctggcaagataaaatgaggataattaacctctaggaaaaataggggtacagttttaaaacgcataaaaagcagtttttttgttttttttttttgagatagggtctcactgtgtggcccaggctggagtgcagtggtgcgatctctgctcgctgcagtctccacctcctgtgctcaagtgatcctcccaccgcagcctcctcagtagccggaactattagtgtgtaccactacgcccagctaattttggtatttttgtagagatggggtcttgctatgttacccaggctggtctcaaactcctgggttcaagtgattcacccactttagcctctcaaagttctgggactgcagatgtgagccacagtgtctggcctagcaattattcttaactgcagtgtagtttctgagggcaaagtcagttttggacttaatttatgtttatttaaaaaggatatttttctactttttcctttctcacctcaagtgccagcaaactagagctgaaaagtcttcaaatctattggcctcctgtgcttttcactgtttattgtctcttcaacaggcactctcccycttccttctatgacaaggaccctgattcgacacggctgcccatgttcccagctccaggagataaacgaagtcaaacctaagccactcatgacaaatttgtctcctgtgtaattggtctaggcacaagcacatgacccatttatagacaatgagacaggtgggacgtcttaaagcactggaaatatttttctccttgacacatagaaagtagtcacacttggtaaagaccttcaactgcgctcacattctgtcctgctttctggggaccacatgatggtgcctgaatcagaggcagccacctagggaccatgaacgactaagccttaaataagctaaagaaggcaggagaggatggaaaaagacctccaggaatttccaagtcaaccctgggagtgtccaccatggtaggctaaacaatggcctatcaaagatgcccatgttctaattcccaggactgctaggtcactccctacatataattgaacctctgtggaattgaa

SEQ ID NO: 23082 - DNA, 1205 bp, Homo sapiens
gtgctttagaagcaaaccttaacaacgatgttcctgtcatttaacacttaaaaaagcctaccttttgattctaatgaattgatgtatctttttgatggtcgtttctaacagagatgaagagctctatccttctggcaagataaaatgaggataattaacctctaggaaaaataggggtacagttttaaaacgcataaaaagcagtttttttgttttttttttttgagatagggtctcactgtgtggcccaggctggagtgcagtggtgcgatctctgctcgctgcagtctccacctcctgtgctcaagtgatcctcccaccgcagcctcctcagtagccggaactattagtgtgtaccactacgcccagctaattttggtatttttgtagagatggggtcttgctatgttacccaggctggtctcaaactcctgggttcaagtgattcacccactttagcctctcaaagttctgggactgcagatgtgagccacagtgtctggcctagcaattattcttaactgcagtgtagtttctgagggcaaagtcagttttggacttaatttatgtttatttaaaaaggatatttttctactttttcctttctcacctcaagtgccagcaaactagagctgaaaagtcttcaaatctattggcctcctgtgcttttcactgtttattgtctcttcaacaggcactctccctcttccttctatgacaaggaccctgattcgacacggctgcccatgttcccagctccaggagataaacgaagtcaaacctaagccactcatgacaaatttgtctcctgtgtaattggtctaggcacaagcacatgacccatttatagacaatgagacaggtgggacgtcttaaagcactggaaatatttttctccttgacacatagaaagtagtcacacytggtaaagaccttcaactgcgctcacattctgtcctgctttctggggaccacatgatggtgcctgaatcagaggcagccacctagggaccatgaacgactaagccttaaataagctaaagaaggcaggagaggatggaaaaagacctccaggaatttccaagtcaaccctgggagtgtccaccatggtaggctaaacaatggcctatcaaagatgcccatgttctaattcccaggactgctaggtcactccctacatataattgaacctctgtggaattgaa

SEQ ID NO: 23083 - DNA, 548 bp, Homo sapiens
agacagaagaaaatctgcatataaatgagcccacacagttcaaacccatgttgttcaagggtcaactgcatatacctcacagcaagggctcccaaccccaggctgcatacatgtaccagcctgtagcctattgagaaccgggcctcacagcactcacagcagaagttgtgcaatgggtgggtgtgagtgaacatcacagcctgagctccgcctcctgtcggatcagcggaggcattagattctcaaaggagcacgaaccctattgtgaactgcgcatgtgagggatctaggckgcaaactctttgtgagaatgtaactaatgcctgatgacctgtagtgcaacagtttaatcccaaaaccatcacccctgccactgacccccaggtctgtggaaaattgtcttccacgaaacccgtccctggtgccaaaaggttggggactgctgccctatagggttacagtaactcaaaggacagcatggtgcaaagaatagattcacaacgaacagtatgtacggctttttttttttttttttttttttttttttt

SEQ ID NO: 23084 - DNA, 1336 bp, Homo sapiens
tgcatggtggctcacgcctgtaatcccagcactttaggaggccgaggtgggcagatcacctgaggtcaggagttccagaccagcctgcccaacatggcgaaacctcgtctctactaaaaacacaaaaaattagccaggcatagtggcgggcacctgtaatcccagctactcgggaggctgacgcaggagaatcatttgaaactgggaggcggaggttgcagtgagctgagatcacaccactgcgctccagcctgggcgacaagagtgaaactccatctcaaaaagaaaaaaatatatatattcctataaatgtagatggttcacaaacaccctggataatattaagaagtaccttcatgagagtatattttatactcaaggggagataacagaaacagggaaagtaacttcagaactaaactaagaatatagaagaaccataaaatttaagaacaaataagaatatgagactggaagaaggtaatatatttcaattcttaatgtattgagtgcttaatgctttttaaggttgccctctgtgcttgacacaggattttcactagcaccagtaaattaaaaaaataaataaataaacagagggaatttaaatgtcaaatgtttctcctgactttgcttggacattaagtacttgacatttaggaagtaggagaggccctggacttagtctatggacccaaagccagttctagttccagatctgcaacatatggggagtcaccaaatggctgcccttctccagttatgtttccctatctataaaatgaggaggttagtgtacatttatgataacttatggctattacactctgaccaaaaacactctatgagcttcccttgttagacagaggacataaattccaagggggaacattcagattattctggaagagcaattaaatgcaattttattgcatgtaatattgcttgaaaatattgagcttacaagctagaactcagttttggattatgtggacagtgttgttttcatgagttttttttttttaataagagaagttggcatgcaagcaaatcatatatatttttttctttctaggttgaatgtttaactaaaaggtaacccatttatctacattttaaaataattttttttgtactrgagacatccttagtgagtttggtggttccatctcttttcccttcctcccaggaagaatttatatctggagaagtcacccaaatgtcaatcttttgcatgctactttcaatatttttccacctgtactattatttatttaactttttttcacactgactcatttttttaaactttcagtgcctaccccaacctcatgca

SEQ ID NO: 23085 - DNA, 1021 bp, Homo sapiens
accccacagcctcccaggaagggagagacattttctctgcccgttttctctttctccccacccccaccccccttagaatgaccaaaggcaggctttggctgcgaatcactttatagaaagtgatatgaagcataaatgagctataaccaatttaaggaaagcttgaaactgggcattgggaaatctctgccaatatgtaatactcttactaaattctggcttagtagccggccaaagcagatttatagataatccccatttatgaaaatgttctactgagaccactgtgcagttacattttaatagtttatgtggtaacaatttaggctcttgttattccaagatacctcacagatgtaacgcgctcaatatatatatatatatatatatatatatatatatatatatatatatagagagagagagagagagagagagagagagagagagcgagagagagatagagtgtcagagagagagagagagattgttcgagtcrctaactagaaaagcctaatcacacaaatgccaaataaattatgttggcaggtggccagctgaatttagacataggttctctgtattattcaaaagtcactccatgttgatctaaccacaccaatgaaaagaaaataaagaaaataaaaagtgattcctgtttcatgagagtgtaagtccagtatctttatttctggcactcctgggcatgtcagtttacactttgcatattatttccacaaagagaatccacacatttttccagggataaagatttagtgagtacattcactcctttacattgatgctgaaaaggagtgaagctcacgtgtagtgagaaacgtgaatgtttcctgtaagaaactgattctccagtagagggtggtagtgttctgtgcccccagcctctatctgcgacccttctgggctctgttcagatgaatgaactgataaactattttaattgaatatcttattctcacagtacataatgtaaacaaaggccaaaaagcatttatagagc

SEQ ID NO: 23086 - DNA, 573 bp, Homo sapiens
agacactgatcattacaccagcaacttaaggatgcaagacaaatggctgtgaggagaatcaggagagacaggttcaagtcctagttctgccaccaacttcctggtgactcagacccagcaataatctctctagtcttcgtttcccattcataaagatggaagtaataatccccagtctgccagctttgcaaagatgaaaagttctttccaaatgttcagtgatgaagaattcttttaaaaattatgatctacttaaaagggagaaaaagctggtttggaaagcctaagggaagtcggcttcaccaaaaggaaatatgcatgagccaagcaggtaaagattaagaccagagcagtccaagtgrataccaaggcaagagcagacaccctgagaaggaactaccatcgttaaaccaactttttagaaaaggtcactgaggtgtgtagttactcactcaaagccacacatctagtcagtaccagaggttgaatcacacccatggatgtccatctctgaaacgcacactcttagtcaatgcccttaaccccttaagggaaattgttttcaatgaggca

SEQ ID NO: 23087 - DNA, 590 bp, Homo sapiens
gactagatgtactctaagggccctctgagaccagcttttccttgggggcagaagaagagtggaagctctgaagtgaggcctgggtggatccaccagtactgtcatgacctgcggaggggctgctgccatgcccaggtaggactcccccacaggaggtgggtaccagtcctgactgttatacatgtacgaagtacacaatgagaggtggaggatgtttcctggagtcactaagctaataacgcatagggttgtgttttcaatccaagaatttaaattccgaagcagatgatcatgacccctatgatgctgcttcctccagctccataacctgatgctcagatagttcagcctcccaaaaccaatctctgtctccctgcctcagaaaccaccatgttctataaacttggaatcccctttctgcattgcacactggccagcgccccaggcagaaagctggaacaattgcaagactcaccacaggcatttctctttttacaggagtcacagaattcttctgcmtaatgtccaatgtctgaaaacattacaatatatatataatcatataaatatattattaatatatgaaaatg

SEQ ID NO: 23088 - DNA, 537 bp, Homo sapiens
ctgctttccttgcaaagataarccaaagaccaatgtatgtcgtatctgcccccttcagcctttgggacacaattttgataaaccttcctctatttcacattaacagaaaatgtcacttctcccttcctaatctccaatgcaaacctaacattttagcccaacgtttctcatgcttgcacaagccagcttttaaattctgctcaattccaatttaagagtaggcattgtgctagacatttatagcccaagatctgtaagcaaatataattctgtggactaagaaagctaacatttaaagaacggaaagagttttttatttaaaaaaaaaacgcgaatcactatcactgcctttattaattctctaagtacaagctgttgtaaatcttctcagtgttagatcccactggagagtgattcatcatattgcacataagctcactccaggctgaaatcatatctataacgcaagggtgattatggttgaacactgggcaccaagaggctctctaggagtgcagaatggaatatggaaaaagc

SEQ ID NO: 23089 - DNA, 647 bp, Homo sapiens
aagaaaaaggtttggctgcccagagaagatatatatccttgagacgcctaaaaaaatatttttcagacatttgcccttgggtttaaaaaacattatgtcataaaaaatgtgtaaaaaatagtgtggcaaacacctctctacccacagcctaacttaagaaattaaacattagcaataaaattgaagctctctgtgtgtcgccttccctagctgtagcctccttccaatccgctagatgagggaatctagcattttatcatttccaggcacttttgtatattttactatatatgtattgtatctttaaacaatatatagtattaatatccatttttaaacaccttatagaaacgtaatctgtgtgtatgcctatgaaaatkgctttttttctgtcaacattttgtgtcttacagcaatccacatagatacctggagctctcactaattttcactcctctatgttcttgtattgcatggttataccaccatctacttttgaatttcctgtgaacggacatttagcctacctattattttttacgattattaacgttgctagtgtgaacattcttgtgcatatcttttttgtgcacatgaacgagaacttctctagaacatatccgcaaactggaactggtgagtcgtgg

SEQ ID NO: 23090 - DNA, 647 bp, Homo sapiens
aagaaaaaggtttggctgcccagagaagatatatatccttgagacgcctaaaaaaatatttttcagacatttgcccttgggtttaaaaaacattatgtcataaaaaatgtgtaaaaaatagtgtggcaaacacctctctacccacagcctaacttaagaaattaaacattagcaataaaattgaagctctctgtgtgtcgccttccctagctgtagcctccttccaatccgctagatgagggaatctagcattttatcatttccaggcacttttgtatattttactatatatgtattgtatctttaaacaatatatagtattaatatccatttttaaacaccttatagaaacgtaatctgtgtgtatgcctatgaaaattgctttttttctgtcaacattttgtgtcttacagcaatccacatagatacctggagctctcactaattttcactcctctatgttcttgtattgcatggttataccaccatctacttttgaatttcctgtgaayggacatttagcctacctattattttttacgattattaacgttgctagtgtgaacattcttgtgcatatcttttttgtgcacatgaacgagaacttctctagaacatatccgcaaactggaactggtgagtcgtgg

SEQ ID NO: 23091 - DNA, 542 bp, Homo sapiens
cagataaggaaaaatcaatgtgaccaaggagacagagattggagggatgcaaccgtaaaccaaagaatgccaggagccaccagaatatgcaagaagcaagaaaggattctcttctagatcctcggagggagcatggccttcagacacctggacttcagattttggacttctggcctccagaactgtaagataatagatttatgccaccaaatttgtgctaattggttacagcagccaatgaatttgctctttgcttctgcaatcagtgaaaatttaacatgccttcaagttcacctttggaatatctatarataaaagctttgcttctcagcctagtatttgtaggtgctgggttctagctcgctgagtgtagatgggttgacagaactagcagataaaattacaggctgttcagttaaatttgaattttgaattagcaatggataacattttacttaaaatttaaacttaactggacattctgtgtttttctggcatgtgaatgtaagttggaaaagaagcaagtgtttttgtaaatcaaa

SEQ ID NO: 23092 - DNA, 927 bp, Homo sapiens
ttggtcaggctggtctcaaactcctgacctcaggtgatctgcccaccttggcctcacaaagtgctgggattacaggtgtgagccaacatgccaggccaacactggtaacttctatgttacgatgcatattttaccacagtaaaaaaaaaattcaatgatgcattattctttacagcagttttattcccctcagcattttctttttattttatttatttattttttttgagatggagtttcgctctcgttgcccagggtggagtgcaatggtgcaatctgggctcaccgcaacctccgcctcctaggttcaagcgattctcctgcctcagcttctcgagtagctgggattacaggcatgtgccaccacatccggttaattttttatttttagtagagacggggtttctccatgttggtcaggctggcctcgaactcccaacctcaggtgatctgtccgcctaagcctcccaaagtgctgggattataggcgtgagccaccatggctggcccccyggcattttcttaatctctgtctagttaactaaatctaactaggaatgtttgaaatactagtactttggatttatggagcatcttttataggaaatttaaaactgctggatgaaaaactattttttcattttattcttacatttgagttagaggaggagatactgatagtctttttgttttctattgtttcttgttcatggagtatataatctggagaggaatgcagatgtaaaataaagtgtgatcaatgtgtgttatgaaagagtgacgagcctcagatttatatgtgggagtacaggctcaggaagaatcatttctccaagagaaagaggcagagcaagacctaaactaaattcccttgtgtctagtatctgcggggtgaagttacccctcactgaaatggtccttgaatca

SEQ ID NO: 23093 - DNA, 580 bp, Homo sapiens
gatgagagaagtccttcagtgtcgactaaaaatccctacaagtttccttggtaccaaccaccaaattccgagactcccctggagctacccctgggaaacactaaacaacataaaatgtcagggccaggtcaaccgctacagcattactaaatgcacgctttccactccaggacttaattccttacagatagcccaggtccacgggccacrctctgggtagtaatctgatgattacttgcacccgactgtcctggtggctgccctgagatacccttcctaggcctaagcaagcaggcttccccaggtgtgtggatgagctaaggcgatagtgcaaagcaaattctgcagcggggagagtggatctgcccagggaccagctggagctgatggttgccatgctcctggggaggccacgtgggtgcaacggcctgagcccctgacggtcagctgcaggggctagagagtcacctgctgtgaaggaacataaaagctatctgaggccaggcacggtggctcctgcctgtaatcctaacactaggggaggccgagggaggtggatcacctgagctcaggagtttga

SEQ ID NO: 23094 - DNA, 580 bp, Homo sapiens
gatgagagaagtccttcagtgtcgactaaaaatccctacaagtttccttggtaccaaccaccaaattccgagactcccctggagctacccctgggaaacactaaacaacataaaatgtcagggccaggtcaaccgctacagcattactaaatgcacgctttccactccaggacttaattccttacagatagcccaggtccacgggccacactctgggtagtaatctgatgattacttgcacccgactgtcctggtggctgccctgagatacccttcctaggcctaagcaagcaggcttccccaggtgtgtggatgagctaaggcgatagtgcaaagcaaattctgcagcggggagagtggatctgcccagggaccagctggagctgatggttgccatgctcctggggaggccacgtgggtgcaacggcctgagcccctgacggtcagctgcaggrgctagagagtcacctgctgtgaaggaacataaaagctatctgaggccaggcacggtggctcctgcctgtaatcctaacactaggggaggccgagggaggtggatcacctgagctcaggagtttga

SEQ ID NO: 23095 - DNA, 1158 bp, Homo sapiens
tttatagcagtgtgagaatggactaatacactttacttagaacaaaactaaatagcaaaaaaaaaaaaaaaaaaaaagaaaagaaaaaaaaagaaaggaaacaaaacagcaacaacaacaacaacaacagaaaaccccaaatcaaaacaacaaaatccaggacaaattgaaaacataaatgcagatgcaaggaaacagcttgatattttagtgcctttgggtgatacatttttcctgattgttgaacaaggaatcctatgttttcatttggcgctaggtcctgaaaattatgtagctggccctgaatattgtacatttggaaatcatttctctgtggatttctagtatttgcttcatttgatggcttttggctgaagattttgtaaatatctcattctttgccacttctctgaatcccatgtgactggaggattgtgagayagaattccttctcttgctggagattttcactggaatcaggccatataccagagaaataaaggagctgctttccttttaggcaatttaatatttgttgggaattcctaccatacattttgatccagaaaggtataaatagtcataatcacaagaatcatgatgttcatcagcctcatggggcttcacattcgagaacaggtgttggtgggttaaatttggcctgctatgtgtttttgtacagactgtgagctaggaatggttttacatttttaaatggtcgaaaaaagttaaaagaagaagaatattccacgacaggtaaaaatatttacaattcaaatttcagcattaataaattaagttttattggaacacagtcatgttcattcattcatctattgtctacggctgaggtttgtagttgaaatagagactttacggcctgccatgcctaaaatatttactatctgggtcttcacaaaaaaagcttctgacccctgttctaggaaaagtgtcactaacacaagccatattgctgtggatttttccggagattatcctgtttagacgaggaatggtatcctgggtattgtggaaagaagagtttgagagaggctcttggtaaaataccaggaatgcgtcatctagtggtgagacttttcagtcacaggagaatttctgaagtttttgattatttgcccacatagacacgatgtgatt

SEQ ID NO: 23096 - DNA, 508 bp, Homo sapiens
cctcatttgagcagtctactcagagtgctgtttgtttatgccactcggagagcttgccaaatacagtgaagtcatctgaacagcctgagcgcttccagataaatacattggcctcctttccatggcccccatagtagctaacatgtactgaacagtgggccaggcactgagctcagcgctctacctggaggattgccttgggccttactgccatttttccaaggaagagactgaggcccagtggtttactagctttccccagttcacacaggtctagatgggaataacagggacttgaccccacacagcctgtcgggccctgctccctggtgatctaatggagcagacgttaaaccaataaccacaggattacgtacgtgattaaaaggagcactggaaagggaaagaacwgggtaggaggagggaggatggcagagaagacaattcataggggtggggtgggtgggggtcccgggaaggcctctggaagaacatttaagctgtgacc

SEQ ID NO: 23097 - DNA, 609 bp, Homo sapiens
catctttgagaaaataggtgctttttggtacaaaccacttgtatctttggcttattagaagcatctatatatcatagcctggggaaagaagataaaatagggcatctttcttgcatataaatcatggcttgtggatcatcgctgttaattaaaaatctttgcaaggctaaattcaacatgatggaagcttaggacatccttgctaaargacaaacctggaaggaaaagaatttttaaatttccatgagaaagaaagtagaatgagaacattatggatcctagctctggatatagggttaaaatatgctacgcatattatgctgcaccataatttgttgctgactggatgtgagcatggtaatttcttagtgtaattgggttacattttcttttgtttccgtgatgcttggtgtttcaatgttgtctggcaacataatcctagtattaactggagataggaaatatacagccttgatcataaaaagtgtgaatttcacaaggacagaacaatataagcagaatttttaccatcccatttcagtgacatattcaaaaaagaggcccattatccttgagtttggtttgcatggttatttgatacccttaatg

SEQ ID NO: 23098 - DNA, 609 bp, Homo sapiens
catctttgagaaaataggtgctttttggtacaaaccacttgtatctttggcttattagaagcatctatatatcatagcctggggaaagaagataaaatagggcatctttcttgcatataaatcatggcttgtggatcatcgctgttaattaaaaatctttgcaaggctaaattcaacatgatggaagcttaggacatccttgctaaaggacaaacctggaaggaaaagaatttttaaatttccatgagaaagaaagtagaatgagaacattatggatcctagctctggatatagggttaaaatatgctacgcatattatgctgcaccataatttgttgctgactggatgtgagcatggtaatttcttagtgtaattgggttacattttcttttgtttccgtgatgcttggtgtttcaatgttgtctggcaamataatcctagtattaactggagataggaaatatacagccttgatcataaaaagtgtgaatttcacaaggacagaacaatataagcagaatttttaccatcccatttcagtgacatattcaaaaaagaggcccattatccttgagtttggtttgcatggttatttgatacccttaatg

SEQ ID NO: 23099 - DNA, 515 bp, Homo sapiens
cctgaggtcaggagttcaagaccagactggccaacatggtgaaaccccatctctactaaaaatacaaaaaaaaaaaaaaaaaaaaattagccagccatagtggtgcatgcctgcaattccagctactcaggatgctgaggcatgagaatcgcttgaacccaagaggcagaagtttcagtgagccgagatcgtgccactgcactccagcctgggcgacagagtgagactctgcctcaaacaaagtggtggtggggggcgggggggcggtgagggaatcatgtggaacgaaggtggttccgtcagaatttgtgggaagaatgagggatggagggaaaggtggagagaaagagggagagatggaagatgttcctggccgtgcgagggggctcatgcctgtaagtccagtactttggaagtccaaggtaggaggatcactggagcccaggagtttggggcaagccagggcaacatagggagatccctgtctctacaaaagaatttttttttttttygag

SEQ ID NO: 23100 - DNA, 551 bp, Homo sapiens
tggctggtgtgtctctttgtctggctagagggatgggttctaatctctctgctacttgttggctgggtgaccttagcaggtcacttaccctctctgtgccttactttcctagtttctaaagagggtcagtaactccctctgcacatctgtcctgtgcttgcctgtcccagcgcttgcctgtaggcrtctcggccgggagtaggtgggtgtccccttttcatgggtgcacaaggcaggagtgagaggatgtctgaggaaactcgtgtctccccctgacaatccaggatgcgttagagcaagtaaaacagaatgttcagcaatggaagttcccatgaccagatttctcatctagaaagccaccaaggctggggaagcagtgttcacagtccattatagacccaactccttgttctactccttctcctcttttcactactgcacttgactagtgtttaaaaaaaaaaaaacctgagggagcaggacacctgggttctggaagaaacttggcttaatccacccctcccttttgggcccacattcctgagcccttc

SEQ ID NO: 23101 - DNA, 735 bp, Homo sapiens
ttgtaaatagaagacagaggcagaaagaaagaatgaaagggatggcatcaaaagaaagattygtccctacatcataagaaagattcatccttacatggctggctttgaagatggggctgtgaggcaaggaatgtgagtggaatctagaagctggaaaaggctagaaaaacagattctttcccagtgcctccagaggaacacagcgctatgggcaccttgatatttgcccagtgaaatcgatttctgacttctgacctccagaactataaaataataaattgttttaagccattaagtttggtacaaaaataagagaaaactaacctggcagctaggctggaagtaagagaatgagttacaggttgttttaatttaaaaaaaaaaaaaaaagagaggtgcagttggcctgatgctaatggcagtgggaatagagagaaaaaatagatatgaaatacaggaaaatcagaatcagcagaaataaaatcaaaaggcagggtttagaacaacaaaaaagatggaccacaagtcctgaagcatgaagcatttctcctaagaaaatgcttctcaaatatctgtatatgtgtgacctcatatagcacaatgttaagaaaggagctgggactcagagaagtctctcatcttcaattcatggaggactttaaaatctcagagagccgcccacacttggcccagcttacccgctgttggctttattctgcatgccccatataatac

SEQ ID NO: 23102 - DNA, 735 bp, Homo sapiens
ttgtaaatagaagacagaggcagaaagaaagaatgaaagggatggcatcaaaagaaagatttgtccctacatcataagaaagattcatccttacatggctggctttgaagatggggctgtgaggcaaggaatgtgagtggaatctagaagctggaaaaggctagaaaaacagattctttcccagtgcctccagaggaacacagcgctatgggcaccttgatatttgcccagtgaaatcgatttctgacttctgacctccagaactataaaataataaattgttttaagccattaagtttggtacaaaaataagagaaaactaacctggcagctaggctggaagtaagagaatgagttacaggttgttttaatttaaraaaaaaaaaaaaagagaggtgcagttggcctgatgctaatggcagtgggaatagagagaaaaaatagatatgaaatacaggaaaatcagaatcagcagaaataaaatcaaaaggcagggtttagaacaacaaaaaagatggaccacaagtcctgaagcatgaagcatttctcctaagaaaatgcttctcaaatatctgtatatgtgtgacctcatatagcacaatgttaagaaaggagctgggactcagagaagtctctcatcttcaattcatggaggactttaaaatctcagagagccgcccacacttggcccagcttacccgctgttggctttattctgcatgccccatataatac

SEQ ID NO: 23103 - DNA, 1384 bp, Homo sapiens
cgggctctttcagtgtactcagtctccttcagattacggaagttctcctttattaccttcctgcttttgctccttctggaacttccattattcacgttggctctccttaatgtgttttcaaatctctttcccacccttatttccatttcttggctttttaacctctttgttctgcaatatatcttctacttgatattccacattactaatttrgtcaccacggagaagtgtgcttttttgtctgggtcagtgcccgggctttcactactgtttctgataaagtctcttccatttaattgctacttcagtgagatctgccctattcccctccttctgagcctcctcaggtgagggttccccttttgtattgtgtctggttgctctcgatttttgtgttttcttaatgagtcagggctgctgagtagtagccaagcggggagtggttgaagttggcagtttctgctctctggaccgaggtgagaactggcaaaccatcagcccttgccgaggatggggtgggtgggggattgtttgcaggtctctctgacaaggggtgaccctctcctgacttcagcacacccaccccagcctggtcactctccaggtctctgagcaagtgggattgctgcccctcccagaggattcttaattcactgagatcctttctatttgggcagttggaggagaggattctctctcttcttcttttttttttttttttggtgttccttcaaggaaccatgaaattctgatttttgctccaggctttggggctactgctgcctagttttgcaggttgttaaccaaacaagagcatctggctaagtggatgcttaagtctctgctccttctacaaggctgtttgtggctgtccctggggagggagtgtgtttgcaggcaggaaagactacttgttgataatttgcacgaggacactcttttcttgccaggacaagtgtccccagggctgcattgaatctggagggtacttttctcatgaaggcactgctagtggctgccctaactggcctccaggggcttccttccctcctgtgctgcagtcccttggctctctgctggtaccaaggagagcctagttctggtctgtcctctttccagaacccagagtagaacctgcagtctcagatgcagcaaccctcttttttttattttttaaatcttatttatttttattttattttatttttttgagatggagtctccctctatcgccaaggctggagtgcagtggtgtgatctcgactcactgcaacctccgcctcccgggttcaagcaattgtgcctcagcctcccaagtagctgggattataggcgtgagccaccgcactggccgacttctacttaattatttcaaaaaagttgg

SEQ ID NO: 23104 - DNA, 1039 bp, Homo sapiens
acagagagggggctgcttccattgtgaagtctctaattggtgcagcaagaaccaaaacatatgtgcaagaacattctgtagttgatcatgtagagaaaacaatggaacttaaatctactaacatttcatttacaaataaggtttcagtagatgagagacttatagaaaagccacatcctcgggacagaaaaaaaactattttgactcaagaagccataatcactgtgaaaggagtcagcctcagcagttaccttgaaggactgatggcaaggctgagaagcaatggaatgggtaatacacaaattaaatgctgagattgaagaactgttggcctctgcaagaggaagcatagggactccgatggcagcagcagagcatttgcagagaaataatcatgaaagttgttagacaacgtcagttaccccaggtctctccaagctaactatatatttatttgttattttaaaaatagaactatcttttaggtagaatttttttaaaatatgctgatgtaaggctatgtgacttttgatcaaaacaaagagatgcagggcttctaaataaaagtgatcattagaaatttttaaaaagaaaagctaaaacaattttgaataagaagagtaatgggggagtaatcagtctacccaatttcaaggcttactctgaagctacagtaatcaagactgtgtagtgytggcgaagagagagacacattagacacatatattaatgtaatagattaaagaatctagaaatagacccctacagatatgtccagtggatttttgaccaagatgtaagaacagttcaatacaggaaagatagacttttcaacaaatggtgttggagcaactggatattcataggagaaaaaaaaaaaaggaacttggcctaactcacacaccttatacaaaaattaactcaaaagattgtgaacttaaatgggaaatgtaaaactataagattgtttagaaaaaataggagaaaatatttggaatctaagcttatgcaaagagattttagatttgacccacaaacg

SEQ ID NO: 23105 - DNA, 1039 bp, Homo sapiens
acagagagggggctgcttccattgtgaagtctctaattggtgcagcaagaaccaaaacatatgtgcaagaacattctgtagttgatcatgtagagaaaacaatggaacttaaatctactaacatttcatttacaaataaggtttcagtagatgagagacttatagaaaagccacatcctcgggacagaaaaaaaactattttgactcaagaagccataatcactgtgaaaggagtcagcctcagcagttaccttgaaggactgatggcaaggctgagaagcaatggaatgggtaatacacaaattaaatgctgagattgaagaactgttggcctctgcaagaggaagcatagggactccgatggcagcagcagagcatttgcagagaaataatcatgaaagttgttagacaacgtcagttaccccaggtctctccaagctaactatatatttatttgttattttaaaaatagaactatcttttaggtagaatttttttaaaatatgctgatgtaaggctatgtgacttttgatcaaaacaaagagatgcagggcttctaaataaaagtgatcattagaaatttttaaaaagaaaagctaaaacaattttgaataagaagagtaatgggggagtaatcagtctacccaatttcaaggcttactctgaagctacagtaatcaagactgtgtagtgctggcgaagagagagacacattagacacatatattaatgtaatagattaaagaatctagaaatagacccctacagatatgtccagtggatttttgaccaagatgtaagaacagttcaatacaggaaagatagacttttcaacaaatggtgttggagcaactggatattyataggagaaaaaaaaaaaaggaacttggcctaactcacacaccttatacaaaaattaactcaaaagattgtgaacttaaatgggaaatgtaaaactataagattgtttagaaaaaataggagaaaatatttggaatctaagcttatgcaaagagattttagatttgacccacaaacg

SEQ ID NO: 23106 - DNA, 2019 bp, Homo sapiens
ccaagtgggagctgtctcagtttgacagatgtcacatacaagctgtcaccgaggctggcttctgctccacatccatcctggggaacacaagatggggcttcccctcccagccacctcacacccattcccctcatttccacaaacctgaagtcttgatcaattaacagccaggattgcctgggtgtgggtgtgggaccttgattggctctgatgtcctggattcagagtatctcaggaccacaggcatctcagtggcaggttggtggcacctctttgcagaccctgtagccagcccctcatgccgaagtctcctgcctgcctgagaagccctagatctgcctcacttctctgctaacgcagcccctggaggtagctgggggacacctcatctcagggccaggtccccagggtgcctaacagggtgaaatctgtgcttgtgcctgagacctccccacccccaaacctcctctctcttgtcatgtggaaggcagtggatgtgctgaggggctgggtagtccagttcaacggaagatagaggtggccctgctgtggctggggctgttggtgatgtgagaaccccagcatcctggctggctgcaccccaggccccacaagccaacagcacacttgagggagctcagccattctcaggcttgtcagctggggctctgtgacttggtgcagggggagattggctgaattgttcacgcttgtttggaagagactggccttaggttgttgtggaaaacgtcggctccaaaccctgctaggttcctgactgtgtgacactggccaacttacagaatgcttggaggctcagcctcctcacctgtaagatgggtctggcagggggttttgagaatcaagtaaggtcatgaatgaatgacagtgtccattttactggaggtggttctgggctggtgttgtggcctctgctttctctagcccccagcttgactctctgacattggacttgagggaagtggctgtgtagctaggatccctcatgccatccttagaggtgggggaagaggtgtgaattttagtagcagggtagctcacagattgagcttggattcccaaaaagtgaggatggaggatgtaacccagtctccagcaaactctgcctctgcagggagctggcacttctgtccccagcttctgccccgagccattggtgtcctgggcccaccccacacagccttctggctcactgacacttggcacatgcctgctctgtcatcttcttctgagttttgggccagtcctactccctggcagaattgggactagctacttaagacttcaggggcaccaggacaacccctgcccaccaaatatcatcctgttcccccaaacctagccatctgatgcttaatatcccaccattagagacttatgactgtggttcatagtctcatgtcagttactaatccttaacatcaatgacttgttgagaagctttcagggccttggagaggagagaaagagaaggcagaacagagaggagggaaagagaagcttggggagtgtaggagagagaacattgtactttgccagcctcatagttctgcagagacaggcccagctgctaagctcaagaaggccccagggagaaggagaggcttggggcgagggggaaggggcaggcctcaggcagagaaagttgtgaatatcaagtgggaattctcggtgtgaatacagggygggtgccaggcctgtgtctgggttgggctccggcagcctgttcgagaggtgaaatagtccctgatgcaaaagcatcgtttcttttcatgctgctctacccgctgctcagaacacaccacgtggggtttggtgtgttctatgggtggtgccctctgcattagaagagtctggcctggtcacgctggctgtttaaaattgtcaatgataatttgttaggtcagcaaaatgacagagtataccctgcctggctgtgcctccctgaaaattcccctgtcactcccctcgccctttcttgaaagaagcaaaaatggc

SEQ ID NO: 23107 - DNA, 579 bp, Homo sapiens
ttctcaatatagccgtaaagtacattcatagctatggaattactaggtcatagaataattacatgtttaattttggtggattccaccaaatagatatgtacactcactcctaccaagagtatatgagagtgctgcrtcttacaaccttgtctgccagcatattctctgtgtgtgtgtgtgtgtgtgtgtgtgtgtgtgtgtgtgtgtgtgtgtctcagtctcagaaggggtttaccagttctacaggtggatattgtatgtttgttttttattcattaatttctgctgtcttattatttcttttctcctattatggggtttatttgcattctttttccactttcttgggctaggtacttagatggtttacttctagcccttcttttttttctaatatatgctcttaaggttatgattttccttctaagctaactttgctttacccaacaagttttgataagttatgtgtctatcattattcagttcaacagacaaagagaacatcttaaatttagtcagagaacaaaaggcacattaacttcaaagtaattctacatatagttcaaacccacaagataa

SEQ ID NO: 23108 - DNA, 507 bp, Homo sapiens
tttagagacaagttctcaccgagactgaagtcatgactcactacagccttaacctcctggactcaatcaattctcccaccttagcctcccaagtagctagactagaggggcgtaccaccacacatggctacaattttattttttatttttgtagaggcagggatctcgctatgttgcccagactggtcttcaattcctggcctcaagaaatcctccctgcttggcctaccaaagtgctgggattasagctaggcataagccactgtgctgggactctgatgggatttttacatgttaatgtataattattaaagaaaaataaaatgcttttcttaaccacattgcaggtacaaagaacagcatctctggagaacgactgttagggtttagatattatactgctgcctttttttcttattatgataaatatctgtttacaagcattttaatatttaccaaattacttttttcaagacacatttcttaaaatggaaatcttccgtggcc

SEQ ID NO: 23109 - DNA, 683 bp, Homo sapiens
ccagaggaaagggttaatttgtgctacccagagtacatcggggtaagtttagctcttgaataaggttagctccaagggttgaakatgtggagccctttacctcaatctgccacagttttggaaaaagagttgagcagctgagatgggcactagagaggggctcagcagaactgcagcatcaggactatggatgcatttcatccatgttatggtaaaagctcatcactggaatttatcttagtgtatcaagttttattgctataaatagtttgtctttatgcatcttattcattttaatccagggaaactattacatgattatgagtaaacatgctttaagattttagtgtttgtttcagaaatgactatatatccatataattctctatatagaagctctctctctatatagacgctccccaggtagagggcatgagttcaatgtgaaaatggaagacgaatttaagaaaaacgtcaataaagatggattatattcatagagattgatgttttgcacaattaacacttagagtatttccatgttattgccaataactagacttattctccatgttaattttattaataaactacaattaaaattaaagtttaacccttatatatacatatatatgtatatatatgtaatttcaaaacttgcttcctgaattaattattttaaa

SEQ ID NO: 23110 - DNA, 1106 bp, Homo sapiens
tttgccagggatcgggtaaaaccatgtcctaaaaagacagaatgattaggtaaaaaacagggtcacaaatggccagtactgcttacaaaccccagaaatcctgggacacggtgagagccttccactctggaaacatcacttgataccttggttggactgtctggaaattctacctttggatctcaatctacaaatctgggttgtcccaggggtgttgttgccataaaagggtcagaattgccatgcaaacagagaacagtgctgacaggtgttcaaaatcaagacgtaaaccccatctcaatggaatcctctagcccatgaagtgttggaatactcctgcaggcaactggacaggggatttcttctcattgttctgtctctctggaccaatgggagtttccaaatacagccgcctttgaagaataaaattagataattgggtggaatatcccctgaatatgtctggaagcaattacattctgccttgactcctgggagtgctgagtaaataatgccaccctcatttcatctaatagcgatgtggtcagctcattagttaagttcatatttttgttaagaaactcatggtgaactcggtttccaagcaaaatatttatttattttactttttattttagagacagggtcttgttctgtcactgaggctggactgcagtagtgcaatcacggctcattgcaacctcaacctcatgggctcaagtgaacctcccacctcaggctcccaagtatctgggactgcaggtgcacaccaccctgcctggcttatgtttttgaattttgtttttttggacataggatcttgctatgtcacccaggctggtcctggactcctggcctcaggcaatcctcttgcctctgcctctcaaagtgctataggattacaggtgtgaaccaccatgcctggccaggcaaaatagattcttcctttctggtgcagaagatgaaactagtgtgatgaaactagtgtgtctgctcagtgtgatcctgcaggcatcctctgcagctgttgtggaggtagatacagagtttccaggatgtgtatccaccttmccttaacttaggtggatacagagcctgcaggatcc

SEQ ID NO: 23111 - DNA, 983 bp, Homo sapiens
acacctcctcccgtcctgagccaaaggccacggaagtgacgtttgcacgccgtgcgtaacgtgcattctggcggtgccgggagcggggcgaggaggagggtgggtatgaggcggtagcggaccgcggagtcgagacctacccgaacgacgcgggcgagcggggctttggacgccggtggagacgcaggcgaggtacggagcggaaggactagggccaagagcagcgcggctctcagctccgggagcggggcggcgaggtgtctcgggccggggttggggggagcggttggtctgtgccgtccgcgcggcgggggcggttgcgcgtcggtgcctcccgctgtccttcgtcccacattccagcctcgtcagccccgcctgccccgttccaggccgccctcggctcccttaatcctcccagtgcgcggcttctcygtctcaggcgctggttgccggcgtctgcagcggccggccaagccccgaaggcgtgaggcggagcatttcttggccgcctccctctgcggcggcttccctcggcccggctcccacttccccgtccaggacgctggttccgaagcaacatttgtggtcgggcggggcctctcacagaacatccccggaacgctccgggatgggactctcggacccaaaccacagaccccggccgcggcaggggcgccgggacttgatcccgcgttgccctggggggacagaagcgtcccggagtggggaggggatttgaagcctgtggtcctgatttccaccccgtggctgagggcgaggctgcggggctggggttaggagcagaagtccctgcttccgaaccgtctgggaggagagccgaggggtgcccatcacggcagttgagggagagagaaggggggactctgccgctttggaggctaggtcataggcagctggcggtgtctcagcgcgggtgaccaatccttgcggttgggaaatgtgtcgtgggcgcccgtggactc

SEQ ID NO: 23112 - DNA, 983 bp, Homo sapiens
acacctcctcccgtcctgagccaaaggccacggaagtgacgtttgcacgccgtgcgtaacgtgcattctggcggtgccgggagcggggcgaggaggagggtgggtatgaggcggtagcggaccgcggagtcgagacctacccgaacgacgcgggcgagcggggctttggacgccggtggagacgcaggcgaggtacggagcggaaggactagggccaagagcagcgcggctctcagctccgggagcggggcggcgaggtgtctcgggccggggttggggggagcggttggtctgtgccgtccgcgcggcgggggcggttgcgcgtcggtgcctcccgctgtccttcgtcccacattccagcctcgtcagccccgcctgccccgttccaggccgccctcggctcccttaatcctcccagtgcgcggcttctctgtctcaggcgctggttgccggcgtctgcagcggccggccaagccccgaaggcgtgaggcggagcatttcttggccgcctccctctgcggcggcttccctcggcccggctcccacttccccgtccaggacgctggttccgaagcaacatttgtggtcgggcggggcctctcacagaacatccccggaacgctccgggatggractctcggacccaaaccacagaccccggccgcggcaggggcgccgggacttgatcccgcgttgccctggggggacagaagcgtcccggagtggggaggggatttgaagcctgtggtcctgatttccaccccgtggctgagggcgaggctgcggggctggggttaggagcagaagtccctgcttccgaaccgtctgggaggagagccgaggggtgcccatcacggcagttgagggagagagaaggggggactctgccgctttggaggctaggtcataggcagctggcggtgtctcagcgcgggtgaccaatccttgcggttgggaaatgtgtcgtgggcgcccgtggactc

SEQ ID NO: 23113 - DNA, 272 bp, Homo sapiens
tccgccccggggctctcaccaacgccgcagcacgcctgccggtggacaggagcctrtggagggcactgagccagccagtgagcgtgggcaggcagccctgtgctccccactgggctgtgagaggtgcacacacctcagcttacttctctgaggggagacacccatgttcaccagcaccgaccaggctttctcataaactcagagcccgtgtcagttacaccagcacctaccaggctttctcatagttacaccagcaccgaccgggctttctc

SEQ ID NO: 23114 - DNA, 810 bp, Homo sapiens
aaggaattcacatacagtgtacacacgttgtcatagaaacaatctaaacataaaaacaatctcaacagaatgcttaaaaacaaaaaaacccggtaccgattattttacggagtcatagaggcatcaacggcactgaaaatgtattagctgcattcagttcatcaagaacaatcttcaactccctccacctgamtcgatcatgcctgactgtgatggaaactgtagtattgtcaagtcaaccgatgtttgactcgggagcgcatttcgcaaatatttttcttaaatatcaccttaccgtatttttcttaaggtggttacaaaattaatctgcagcccaccacccaaagctacagtgccgaaggccgtgtgatgagcagagaaactgagccttctactgttaaccaatatggaagagagtaattgcgcctgagaggaaattacggcagcggaaacgcgggtattctacgtttaagaaatcccccaactgaggcagaaaaaggccaagttatttgtgtgatgcacgtgaaccgcccgagctggtcactaatgaagtggattcgccctattcctggcgactctacaaggttggagacccccgtagacttcgcagccatcgccccttgctgcagacccccaaagtcaccgacagccttacctagacctgaccttcctcacccacgcgccctcgtcccggaaggcccgccctctacccggctccaagctcgcgcaggcaactattacggggagcagtagagaaacggaagcttggcagctagagcggagccctagtgaacgacccggagttactgg

SEQ ID NO: 23115 - DNA, 810 bp, Homo sapiens
aaggaattcacatacagtgtacacacgttgtcatagaaacaatctaaacataaaaacaatctcaacagaatgcttaaaaacaaaaaaacccggtaccgattattttacggagtcatagaggcatcaacggcactgaaaatgtattagctgcattcagttcatcaagaacaatcttcaactccctccacctgactcgatcatgcctgactgtgatggaaactgtagtaktgtcaagtcaaccgatgtttgactcgggagcgcatttcgcaaatatttttcttaaatatcaccttaccgtatttttcttaaggtggttacaaaattaatctgcagcccaccacccaaagctacagtgccgaaggccgtgtgatgagcagagaaactgagccttctactgttaaccaatatggaagagagtaattgcgcctgagaggaaattacggcagcggaaacgcgggtattctacgtttaagaaatcccccaactgaggcagaaaaaggccaagttatttgtgtgatgcacgtgaaccgcccgagctggtcactaatgaagtggattcgccctattcctggcgactctacaaggttggagacccccgtagacttcgcagccatcgccccttgctgcagacccccaaagtcaccgacagccttacctagacctgaccttcctcacccacgcgccctcgtcccggaaggcccgccctctacccggctccaagctcgcgcaggcaactattacggggagcagtagagaaacggaagcttggcagctagagcggagccctagtgaacgacccggagttactgg

SEQ ID NO: 23116 - DNA, 1183 bp, Homo sapiens
attttttgtatttttagtagagacagggttccaccgttttagccaggatggtctcgatctcctgacttygtgatccgcccgcctcagcctcccaaagtgctgggattacaggcgtgagccaccatgcccagcccactttaagagttttataacggtttcatttccccttattccctgctccaacccatcctccactctatcaccagagctatttttgaaatcacgaatctggtcaaataatttttctgcttgaaaaattactagtgccccacttcctactatatgaaacttaaaatctagtcatcactgggccccaaactaccttcttttcagaatctctctgatcctttcccttcatcaagtcccctacattattattattattattattattattattattattgacagagtctcaccctgtcacctgggctagagtgcaatggcatgatctcggctcactgcaacctccacctcccaagttcaagtgattctcctgtctcagcctcccaagttgctgggattataggcatccaccattacactcagctaatttttgtgtttttagtagagatggggtttcaccatgttggccaggctggtttctaactcctgacctcaggtgatctgcccgccttggccttccaaagcactaggattacaggtgtgagccaccgcaactggccgtcccctatattgcagcacagtgaacaactgtttcctgaacatcacaagctctcttagacactacagtgtataagcaggtctctgtctaaactgctctcctcttgcccctctgcccaaccaatgtctgctcatccaaagaatgtatcccgtgtgttcattaacttagcaagttcccagtaaacagtttaattgatcactcgttaagagaaggcgggaaacctccatgaaaagagaaatcagtgggtatttcctacagcatttaacacatcgtaggccttcaataaacccttgtgaaataaacaaacctctttactcttcattctatgttgctaagaatctcacctaagtctgtctaccatgtgaaactgcagatgacctcacagaaaatggaaagaagtatctctaaaaataagtttatttggcaacacactacaggctacaggttcacttctgattttttttctttttttttttttgagatggagtcttgctgtgt

SEQ ID NO: 23117 - DNA, 602 bp, Homo sapiens
agatagaatactattgggataaagcatatgtgccacttttaaaaaytatattctcaaggcattgtaggtaactgtaatctaactaaagtttaaaatctcaattaaattatctaagaaaatatgataagcgatttctgcttaaaattataaaatgaaatcaccataaaactcataagcaacaggggaaagagttgaagtaaaaatttgtgctgggaagcaaatctcacaattaagcagaagaaacggagggcaggaaagagcgagcgtctgaaagatgcaggtgtgaaaggagccggaatgctggggaggactggaaacagcatggatgaacacgaggatgttcctcaaggatgatccagatggagcgccctttacccaaattgaaaagcgcttggctatactcttgcaccttgcacactgaacgcggtgcttctagggacattttaaagaatgttctggccgggcgcggtggctcacgcctgtaatcccagcactttgggaggcagaagcgggtggatcacgaggtgaggagattgagaccatcctggccaacatggtgaaaccccatctccactaaaaatacaaaaattagccaggtgtga

SEQ ID NO: 23118 - DNA, 602 bp, Homo sapiens
agatagaatactattgggataaagcatatgtgccacttttaaaaactatattctcaaggcattgtaggtaactrtaatctaactaaagtttaaaatctcaattaaattatctaagaaaatatgataagcgatttctgcttaaaattataaaatgaaatcaccataaaactcataagcaacaggggaaagagttgaagtaaaaatttgtgctgggaagcaaatctcacaattaagcagaagaaacggagggcaggaaagagcgagcgtctgaaagatgcaggtgtgaaaggagccggaatgctggggaggactggaaacagcatggatgaacacgaggatgttcctcaaggatgatccagatggagcgccctttacccaaattgaaaagcgcttggctatactcttgcaccttgcacactgaacgcggtgcttctagggacattttaaagaatgttctggccgggcgcggtggctcacgcctgtaatcccagcactttgggaggcagaagcgggtggatcacgaggtgaggagattgagaccatcctggccaacatggtgaaaccccatctccactaaaaatacaaaaattagccaggtgtga

SEQ ID NO: 23119 - DNA, 602 bp, Homo sapiens
agatagaatactattgggataaagcatatgtgccacttttaaaaactatattctcaaggcattgtaggtaactgtaatctaacyaaagtttaaaatctcaattaaattatctaagaaaatatgataagcgatttctgcttaaaattataaaatgaaatcaccataaaactcataagcaacaggggaaagagttgaagtaaaaatttgtgctgggaagcaaatctcacaattaagcagaagaaacggagggcaggaaagagcgagcgtctgaaagatgcaggtgtgaaaggagccggaatgctggggaggactggaaacagcatggatgaacacgaggatgttcctcaaggatgatccagatggagcgccctttacccaaattgaaaagcgcttggctatactcttgcaccttgcacactgaacgcggtgcttctagggacattttaaagaatgttctggccgggcgcggtggctcacgcctgtaatcccagcactttgggaggcagaagcgggtggatcacgaggtgaggagattgagaccatcctggccaacatggtgaaaccccatctccactaaaaatacaaaaattagccaggtgtga

SEQ ID NO: 23120 - DNA, 602 bp, Homo sapiens
agatagaatactattgggataaagcatatgtgccacttttaaaaactatattctcaaggcattgtaggtaactgtaatctaactaaagtttaaaatctcaattaaattatctaagaaaatatgataagcgatttctgcttaaaattataaaatgaaatcaccataaaactcataagcaacaggggaaagagttgaartaaaaatttgtgctgggaagcaaatctcacaattaagcagaagaaacggagggcaggaaagagcgagcgtctgaaagatgcaggtgtgaaaggagccggaatgctggggaggactggaaacagcatggatgaacacgaggatgttcctcaaggatgatccagatggagcgccctttacccaaattgaaaagcgcttggctatactcttgcaccttgcacactgaacgcggtgcttctagggacattttaaagaatgttctggccgggcgcggtggctcacgcctgtaatcccagcactttgggaggcagaagcgggtggatcacgaggtgaggagattgagaccatcctggccaacatggtgaaaccccatctccactaaaaatacaaaaattagccaggtgtga

SEQ ID NO: 23121 - DNA, 602 bp, Homo sapiens
agatagaatactattgggataaagcatatgtgccacttttaaaaactatattctcaaggcattgtaggtaactgtaatctaactaaagtttaaaatctcaattaaattatctaagaaaatatgataagcgatttctgcttaaaattataaaatgaaatcaccataaaactcataagcaacaggggaaagagttgaagtaaaaatttgtgctgggaagcaaatctcacaattaagcagaagaaacggagggcaggaaagagcgagcgtctgaaagatgcaggtgtgaaaggagccggaatgctggggaggactggaaacagcatggatgaacacgaggatgttcctcaaggatgatccagatggagcgccctttacccaaattgaaaagcgcttggctatactcttgcamcttgcacactgaacgcggtgcttctagggacattttaaagaatgttctggccgggcgcggtggctcacgcctgtaatcccagcactttgggaggcagaagcgggtggatcacgaggtgaggagattgagaccatcctggccaacatggtgaaaccccatctccactaaaaatacaaaaattagccaggtgtga

SEQ ID NO: 23122 - DNA, 558 bp, Homo sapiens
tgattgccctgcctctgcttctattgacctgtctacctgtgttgccttacttttacactgcttctttgcctttttcctttctacctttctttttctatcttttcctgttctcatcattttctawcattttgcttttttgctgctatatgtgaagtttgatttttgtgcatttttagtaaaagatgtttagttgaattcctgaaatcagcctttggtgaaaagaaccgcttcagtttgtagaaatttcttagggatagtcttctcatttagggtgggaaggtgtagatttctcagcacgattagtctatttggcaattgcccagttcaaaaataacttccctgaatattacctaaagtttttatttccttaacacaagtttccaattgcttgttctttgtaaatatttggatatctcaagaaaaattaaggttcttacataccttaatggatggttttaatcagattgctttcctcacagtgtctagcagaaataaactctactcttcttgcatgttttgaagcagtggaaaggcaataataattattaaacattaagt

SEQ ID NO: 23123 - DNA, 573 bp, Homo sapiens
gggtcagtgagcggtgagtgaatgtgaaggcttagggtattaccgtaaactactgtagactttctaagcactgcacatttaggttacactaagtttataacaaatacttttctttcttcagtaatgttaaccttagcttaccataacatttttacttcataaacttaattttgtttagctttttgagcctttcataataacacttagcttaaaacacaaacatattttacaaccataacaaactattcttattctgtaagcttttatttatttatttgtttatttatttcctttttagacttttttttaaagctaagacaaacatacacattagcctaggcccacacaagatcaggatcatcaagacatcactaggtaataggaatttttcagcttcattataattttatgggaccactgttaggtataccatccatcattgaccaaaacattgttatgcagcacataactatacatatactactaacttgatttcttttgtaggtaattcttttgtgtaaataacacactctgaaataaytgaataagttttcatattcatttttaagaaaa

SEQ ID NO: 23124 - DNA, 601 bp, Homo sapiens
ctagaagaatacctaggcaataccattcaggacacaggcacgggcaaggacttcatgtctaaaatacctaaagcaatggcaacaaaaaccaaaattgacaaatgggatctaattaaactaaagagcttctgcacagcaaaagaaactaccatcagagtgaacaggcaacctacagaatgggagaaaattttgcaatctayccatctgacaaagggctaatatccagaacctacaaagaacttaaacaattttacaagaaaaaaatcaaacaaccccatcaagttaactcgttaatggtttcttcctttactgaggaactgcaaacaactggggttctttgacttctaaggaactgcttcccaccaacagcattttttcctaaaattttggagaatttcaggcaacaaatttgcatcagttttctagagtggaatatagattcaactttttaatttatgcaaacttagcttccttttaggctaacaagcactacttacatactatttctgtcctcaaatttatgttagatactttctgagaaatctctgaaataatttcattctgaaagaaaattgtttttggttctaacagtcatttcagt

SEQ ID NO: 23125 - DNA, 601 bp, Homo sapiens
ctagaagaatacctaggcaataccattcaggacacaggcacgggcaaggacttcatgtctaaaatacctaaagcaatggcaacaaaaaccaaaattgacaaatgggatctaattaaactaaagagcttctgcacagcaaaagaaactaccatcagagtgaacaggcaacctacagaatgggagaaaattttgcaatctacccatctgacaaagggctaatatccagaacctacaaagaacttaaacaattttacaagaaaaaaatcaaacaaccccatcaagttaactcgttaatggtttcttcctttactgaggaactgcaaacaaytggggttctttgacttctaaggaactgcttcccaccaacagcattttttcctaaaattttggagaatttcaggcaacaaatttgcatcagttttctagagtggaatatagattcaactttttaatttatgcaaacttagcttccttttaggctaacaagcactacttacatactatttctgtcctcaaatttatgttagatactttctgagaaatctctgaaataatttcattctgaaagaaaattgtttttggttctaacagtcatttcagt

SEQ ID NO: 23126 - DNA, 531 bp, Homo sapiens
tatgccgcaaatataagttgtgattatcactttattataaaatatgctttgttgtgcacattgcatgttataagaagccaaagtggataaaatggtttatcatatgtgtcgagagagtaggtgactcaaagcattctaggattcactgtggaagacctgattcttcatccccttacattgtgtctgagagaggaaatccctctctgctctcttccctgattccataytgacctttgtcttctttcaatttgtaaagcatggtgacattacctttaatctgtgtatattagtcacaacatttcattagtctttcaaaagcagttttagctgctcttgcttttctttgtaagtacaggcaaggtgtcctttctatgtctattttcaggtgatcacatttttgtcatagtaaaatggaaggcataatgactagatttctgggtaaactctcataatttacatatgagaaaagaaaggtccataaagttagtgatttattctaggtgccaacaatgattggtgacaaatccagac

SEQ ID NO: 23127 - DNA, 556 bp, Homo sapiens
tacaaattcaatttcttcaatgcatatgaagctcttaaaaaatctttttttccctcagtttcttagttttagtcagttgagttttccaaaaaaaattgtcagtttatctctttgtcaaatgtattgtcatgaagtttcttgataacatatgtttacattgttaacacccacagaatctgctgtggtatcttcctgctctttttatcaattgataaaaaatcaatttttatcaattgtttgaaacttttaaagaaacaacagttgacttttaaaattatctttgttatctgttttgtattttattgatctttacactttttaaattatttcctttttccacttactttgaatttaatttktcttctttccctgtcttcctaaagtagattcatgagtcatttattttctaaatttcttatgttccaatatatgcattttaaactgcactttcctctaattacttcctctgcatcctacacattttgatatgttatatttcctttatcttttagttcaaatattttatgatttttattgtgatttcttctttgaccca

SEQ ID NO: 23128 - DNA, 549 bp, Homo sapiens
aataattttataacaacttttaaaatgaggttcatcttgtgagtttaaaaaatcatattcagttttccttgccttggttttctccaaaatctaagctcagcagcagagaaggctgtatgtctgaatgtactgtctttagacagacayttgtatcatttgaaacaagatcaagaagagaaagtaataggccagctgtggtggatcacacctgtaaacccagcactttgggaagccacagtgggcagagagcttgaggtcaggagttcaagaccagcctggccaacatggtgaaaacctgtctctactaaaaatacaaaaaaattagccaggcgttgtggcacatgcttgtaatctcagctactagtgaggctgatgcaggagaatcacttgaacctgagaagcggaggttgcagtgagctgagatcacaccactgcactccagcctgggtgacagagcaagactccatctcaaaaaaataaaaaataaaaaagtacaggagtctgatagctgcatttgtacatctaggagggtgagattccagtgagggg

SEQ ID NO: 23129 - DNA, 1142 bp, Homo sapiens
tcaaagcaaagggtgtgagggccttatccctggccaaatgagcactgaatttgagagagaccaggaaaccttctaattattgggacactttactcctgaatcctgaatcctggaagttggtttctggccagggargcaggtgtctttatatcttgtctgtctctgtgaggcctcttgtccctctgcccttcccatctttctacccccgttaatcccagaacagatagaaacattctgccttctttgatgcctcttgctataaacttcaatggcttttgattgaattaataagtgaaatcaactttaataaaacatgaggtttaaagaatggcatttgacatgggtttagaatgaataaatggatcaagtaatgaattttgagaaaatgcatgtaaaatttatctttaattcccaatggcattttattaacttgactgtggaattaataaatgattctaaatcaataccaaaacgtgcaatcacaaatgtgtgaatgcacagaagtgtgaatgaagggcagtgcacacaagaaaaaaagatgtgcacatgaagaacttcttcattccaggtttttactgatccctctggtcaagatgggataagagtccaaaaatatgctttcctcacatggtcaaatgattcagcataaaatacaactgattgaacacaattatctatgctttaaatatattagaaaaaatccataaggaaaaatgatcctacaatcactaagattttaatttataataaaataaagcctagaaatgtatcttttgttcccaattccaatgattataggatttcagtgtttggctttgataagaccatttaaaacaactcagggaagttttcttaacaaactctatagcaggaccacagctaaacctatgagcattagtagaagtaaacaatgacactgcctttaaaatttcactttgaaaaacatgtctgaaagtggctgactggctcctaatttaactatcattcgaggtcatatgttagattggcaaagttgttgtaatttgtatgtattttatttttgtaatgcaagtgcttcactctactatcagataaaataaaatgttaagctggacatggtggtgcacatctgtagtcccagctactcaggaggctgagtggga

SEQ ID NO: 23130 - DNA, 1206 bp, Homo sapiens
ccaagatctcaaacaatgtcatcagtgtcccagccccacttcttccctttgtctttttcttctcctttttcttatgtttatcttactctgatttatttctctctatttctgaactatgcctcccttttttggctcaattcttagagctggcagtgagagtctcatcagaagccactgagactgtgagatgaggttgtataaagaaaaatcaaggtgctattatcagaagagggataaatgttaagtgggcaaaaaaaaaaaaaaaaaaaaaargaaaaaaatcaattgtaggagtaaatgccacaaagcatgctcaagacacagatgtttgctaaagtgtaacaagaatgagaagagttaaatacggagcatttgttttgctgagtggatgatgctaatttggggccagagctgaattgttcaggacaacaaagtagaggaaaggaaggccacctgatcctactgatagtgtacaggcttttctgtatactaaaggaatgttacacaactacttatttaaaaatactagttcaaacagaggccattatcaacttaagagcttgttaagggaatcttaaaaattcctttagcactatctgtagaattttgatttctatacacattacatggctttgttactcaagatttaagtgggaagaattaaagaggtgtctatcagaaaatagcatcattaggttgaaactttctcacactttaattcttttggtagtactttgtgtgcatgactcagtacctttctctttatttaagaaataaaatcaaatatgtaaaaatatagacttttaaaatacagtctcccaggtgtctgttgcagcctcaagccccctttttttcctccattgttctcttgttacttcaaaacaattaggtattcatatgcaaatatatgcaaatgaaaggggtttaatataagtgatttttactactagttaatttctacttttgggtctactgataagatctggaaaactgctttatttggtacccttacaccttggggcataaaaaaaggatggtgtgaaagccacctaaatatctcaaaaatactgccattgttaagattgtacttcaacttgaaaagtgtttttgaattgttgtctccattgtctgccttgcactctctcagagagaatgttatgttgaagattacattatttgttactgagtagattagttattcaggat

SEQ ID NO: 23131 - DNA, 548 bp, Homo sapiens
tgagaaagtgctcccacttgtctgatctaaatttctcttctgaaagaagtccattcactcataaaagtcctcggagagaatgtgctcaacctctcacctccagacattcgcagttaccatccaccctgcctagaccccatggcagtatccccacgctgcccctgttctgagcccctgccctccctcccctaccagccactctgcacctggacaggcagtagcacaagcatggagggagccagggaagtagctctgagcttttagttacagccacttccttggacgttgcttcaygagtccagatggtgagccgggtaaacaagaagtccctgttctccatcagcatgtcagcgagcgcctcactctcaggcatctgccgagctgggggcatgatctccgtttacagtttggccctcctcagcgtaccagaaatgtgcccttgtgtaaacactcagatcccttcctccagggaggacacatggacaggacagtgaacaccttgctcctagtggcctggagagaatgaaaatatcgctgtccttcttcca

SEQ ID NO: 23132 - DNA, 536 bp, Homo sapiens
taaacatcttgtgggctgggcttcttatcctgcattgatagcttctagatcagcaatagggcccttggcatttgagtggggagcataaaaatctccaagtctgtgacttcagccgtagaagataattcccctacaaaatgcactgtgaaatagtaacactgctaccttataaacagtcgtgtctaataaataacacctctttccttttttccaagttccaaatcaagacaggagtcagatggctggagatagtgattgaagctggattggaggcatggcttaggcatatggccccaatgggctttctaatatttcatccctgagctagatgttcctaccyacccagaccctggcagaggcaaaggccccctctgccagggcgagagccttccatgtgtcagagaagcattgagaatgcactgccactctgtggccaacgtgagcccaggagggactgagctgagtatgcccggtttctcctgccaacctcaccaatcagaccagcaagccctgctcccaggagcagggcagaggtg

SEQ ID NO: 23133 - DNA, 647 bp, Homo sapiens
ggctgcaaactggcaatccaagattgcgtctggctcacagatgtgtgtcatttggcccaygaagtatccaaaacattttgaattcatttccaacatttcagatggggagatttcatttaaaaaatccagatttctggctactcttgaaatatcagagaatctggcacccctgggcccacattctcacgtggcagccattggccagggctaagtgcagggtctagttattctgcctgggtgtgagcacctacagaacacagcagcctcctgctggcccactttgaccatttgcattattgcctgacactggagcattttggtctatgaccacacaggagacctctggtgcctttgagtttaataatctagtgtttgttaagtagtccagaccattacttaattattgtgtagtagatgcctgtatcctcttttcccttccccttttctaaagtcctcagtccgtgctggaaagccatgtagtggttggggaaagacagcactactatgcactaagccaatcagcacatcctgtcccctcccttgccatacagttagttcagcattgattgggtgtacaattcatcaatgcgtcagagtggctctcagtcttggtgtggaaagctgggagagagctgtactctccttct

SEQ ID NO: 23134 - DNA, 551 bp, Homo sapiens
cacaaatttaaggtaaggaatgatcccataagtgatcaccataaaatatgcacagaaagttactgttagtgatgatatccaaacacaaatggcaaacacacttattgggaatccatcattacttccttagtcatggcaatacttaaaaattcaggacagcacatttggtttctaagtcagtgattaccagcactgcaacctgtttgatgtatcygtgtatcctgtaaggtatgttattagtatggtattgctggacaaggaggtacaggccgcagtgctgacaggtgcgaatgcagcagtaacatgggcgtggaaatggcatattctcccttagactttctttttgtttaaaagcacacacgccttggggttcttactgaggacataaaatttacaatcacccttgtacaagaagcctcggtgccactctttcttatctgtttctgagttttctcctctttcctcattaatacaatctctttcagtaaaaaaagaaaaatggaacgaaaaaaagaacaagacaaggagaaggaggaggcagggagggaagg

SEQ ID NO: 23135 - DNA, 539 bp, Homo sapiens
tttccaggcagctgtcagcatccttggagatgagttgccatgagataagagtgaaaacaggcagtgggagaggagctttttctccccagccacgtgcagccacaggagtgaggggcagagcagaaaagggtcagagtccagcagcgatgggatattccacaagaattgcatgaagaatataaaaaagagatttgcatgtgtgcagaaggaattgattctgaggattagccatggaaggtggccgggtgtaaaggtgaatctcagtgtaaaatggtagaattcctggagcgctggtcaccaaggaacggggggacattggtgtcaggtggggaaggggtcgcctggaagtcagggagctgatgtaggagatgggatgctgatctgatgggataaagtgattttggttattggtaatgagaagttcaatgggagtggaaggctgagggaggattggagaagaggtcaatatatggatcgtcragagggtttggaggatcattataatgggttttccaccttggtggtgtggaatatttgga

SEQ ID NO: 23136 - DNA, 1725 bp, Homo sapiens
cccaggccggtcgctccatccccagcctcaacctctccgagaccggccgcaccttccctggcctcaagggtcggttccttctgcaccagaaaacggggtgtcactgtcaccccgggacccagcctcctggcccgacttggctggagctcccctgcacctgccccgccccaagcagggctgattgccgggaacaaagggaggggccgggacgcgctggcaggtggggagggagggaggggcgaggctgcccggagcccgatcgataattcaggggatgagatcacagccggcgccgcccgcggggccggggaggtgggggaggggagcgaggcgcgcggtcgcgatcggccgtctctgccgcggcgcgtgtcggactcagcccctgcgcgtccgcgggaggagcagatcgtgggcgcgattggtcgggctggagccgcggctggacctgcgcgcggtgtgtgtgttgtgcgcagggtgtacgctgtgtctgggtgcgtgtccaggcatatgcaggggatccaggctgctgggtcctggggtgtgttcacctaatgggtaaagggtgggacaggtttggcggccctaggctgagggctgtgggctgaggagagagcagccccaccaccccctctctgcgccctgcatgcctcccaggctgcatccctcagggaggtcccggggcagtgtcgcaccctcccaagctccgggattagggtctttctggatgggaggtttgtaaggtggtccaggtgccatccctccctggcacacagagggctcagtcacacggcacccccggtgtgtttccttcctgtcccttggagacagtggcaggaactcagtccaacatccagagttcaaatcctgacatcagactgaggtgggggctcacagcatgccccaggacaaatgtccagtctctccaaagcaccatttcctctcagtagatgcccctggtcctgagttgctatgaagyctagatgatctttattaatatccaaaacatagcaagcagctactgatggcagatattagaatacctcaagctcctatacatccttcaaaacccagcttcaatattgcctcttccaggaagcctacctggctgcctgctcaaaagcttggctccacctccggcctcccctcgccctgggtctctcttctggtctctcagaccccctggccactggagggctacgggtctggctctggagggcggcgttcgggtctcttttctgtgacatcaatagacacgttaaggccgggctcggtggctcatgcctgtaatcccagcactttgggaggccaaggcaggaggatcacaaggtcagaagatcgagaccatcctggctaacatggtgaaaccccatctctactaaaaatacaaaaaattagccaggcgtggtggcgggcgcctgtagtcccagctactcgggaggctgaggcaggagaatggcgtgaacccgggaggcggagcttgcagtgagccgagatcgcgccactgcacttcagtctgggcgggagtgcgagactccgtctcaaaaaaaaaaaaaaaaaaaagacacattaaatgagtaagcacatgtgatgctgacagctctccagcccaggaaaggtttattggctaagcaactgtagaaggtggagtgggaaaggcacaggcctcggggctgcctccagcctgagtttgggctgggaccggggctaacccaagctgtgatgggg

SEQ ID NO: 23137 - DNA, 1725 bp, Homo sapiens
cccaggccggtcgctccatccccagcctcaacctctccgagaccggccgcaccttccctggcctcaagggtcggttccttctgcaccagaaaacggggtgtcactgtcaccccgggacccagcctcctggcccgacttggctggagctcccctgcacctgccccgccccaagcagggctgattgccgggaacaaagggaggggccgggacgcgctggcaggtggggagggagggaggggcgaggctgcccggagcccgatcgataattcaggggatgagatcacagccggcgccgcccgcggggccggggaggtgggggaggggagcgaggcgcgcggtcgcgatcggccgtctctgccgcggcgcgtgtcggactcagcccctgcgcgtccgcgggaggagcagatcgtgggcgcgattggtcgggctggagccgcggctggacctgcgcgcggtgtgtgtgttgtgcgcagggtgtacgctgtgtctgggtgcgtgtccaggcatatgcaggggatccaggctgctgggtcctggggtgtgttcacctaatgggtaaagggtgggacaggtttggcggccctaggctgagggctgtgggctgaggagagagcagccccaccaccccctctctgcgccctgcatgcctcccaggctgcatccctcagggaggtcccggggcagtgtcgcaccctcccaagctccgggattagggtctttctggatgggaggtttgtaaggtggtccaggtgccatccctccctggcacacagagggctcagtcacacggcacccccggtgtgtttccttcctgtcccttggagacagtggcaggaactcagtccaacatccagagttcaaatcctgacatcagactgaggtgggggctcacagcatgccccaggacaaatgtccagtctctccaaagcaccatttcctctcagtagatgcccctggtcctgagttgctatgaagcctagatgatctttattaatatccaaaacatagcaagcagctactgatggcagatattagaatacctcaagctcctatacatccttcaaaacccagcttcaatattgcctcttccaggaagcctacctggctgcctgctcaaaagcttggctccacctccggcctcccctcgccctgggtctctcttctggtctctcagaccccctggscactggagggctacgggtctggctctggagggcggcgttcgggtctcttttctgtgacatcaatagacacgttaaggccgggctcggtggctcatgcctgtaatcccagcactttgggaggccaaggcaggaggatcacaaggtcagaagatcgagaccatcctggctaacatggtgaaaccccatctctactaaaaatacaaaaaattagccaggcgtggtggcgggcgcctgtagtcccagctactcgggaggctgaggcaggagaatggcgtgaacccgggaggcggagcttgcagtgagccgagatcgcgccactgcacttcagtctgggcgggagtgcgagactccgtctcaaaaaaaaaaaaaaaaaaaagacacattaaatgagtaagcacatgtgatgctgacagctctccagcccaggaaaggtttattggctaagcaactgtagaaggtggagtgggaaaggcacaggcctcggggctgcctccagcctgagtttgggctgggaccggggctaacccaagctgtgatgggg

SEQ ID NO: 23138 - DNA, 1725 bp, Homo sapiens
cccaggccggtcgctccatccccagcctcaacctctccgagaccggccgcaccttccctggcctcaagggtcggttccttctgcaccagaaaacggggtgtcactgtcaccccgggacccagcctcctggcccgacttggctggagctcccctgcacctgccccgccccaagcagggctgattgccgggaacaaagggaggggccgggacgcgctggcaggtggggagggagggaggggcgaggctgcccggagcccgatcgataattcaggggatgagatcacagccggcgccgcccgcggggccggggaggtgggggaggggagcgaggcgcgcggtcgcgatcggccgtctctgccgcggcgcgtgtcggactcagcccctgcgcgtccgcgggaggagcagatcgtgggcgcgattggtcgggctggagccgcggctggacctgcgcgcggtgtgtgtgttgtgcgcagggtgtacgctgtgtctgggtgcgtgtccaggcatatgcaggggatccaggctgctgggtcctggggtgtgttcacctaatgggtaaagggtgggacaggtttggcggccctaggctgagggctgtgggctgaggagagagcagccccaccaccccctctctgcgccctgcatgcctcccaggctgcatccctcagggaggtcccggggcagtgtcgcaccctcccaagctccgggattagggtctttctggatgggaggtttgtaaggtggtccaggtgccatccctccctggcacacagagggctcagtcacacggcacccccggtgtgtttccttcctgtcccttggagacagtggcaggaactcagtccaacatccagagttcaaatcctgacatcagactgaggtgggggctcacagcatgccccaggacaaatgtccagtctctccaaagcaccatttcctctcagtagatgcccctggtcctgagttgctatgaagcctagatgatctttattaatatccaaaacatagcaagcagctactgatggcagatattagaatacctcaagctcctatacatccttcaaaacccagcttcaatattgcctcttccaggaagcctacctggctgcctgctcaaaagcttggctccacctccggcctcccctcgccctgggtctctcttctggtctctcagaccccctggccactggagggctacgggtctggctctggagggcggcgttcgggtctcttttctgtgacatcaatagacacgttaaggccgrgctcggtggctcatgcctgtaatcccagcactttgggaggccaaggcaggaggatcacaaggtcagaagatcgagaccatcctggctaacatggtgaaaccccatctctactaaaaatacaaaaaattagccaggcgtggtggcgggcgcctgtagtcccagctactcgggaggctgaggcaggagaatggcgtgaacccgggaggcggagcttgcagtgagccgagatcgcgccactgcacttcagtctgggcgggagtgcgagactccgtctcaaaaaaaaaaaaaaaaaaaagacacattaaatgagtaagcacatgtgatgctgacagctctccagcccaggaaaggtttattggctaagcaactgtagaaggtggagtgggaaaggcacaggcctcggggctgcctccagcctgagtttgggctgggaccggggctaacccaagctgtgatgggg

SEQ ID NO: 23139 - DNA, 1725 bp, Homo sapiens
cccaggccggtcgctccatccccagcctcaacctctccgagaccggccgcaccttccctggcctcaagggtcggttccttctgcaccagaaaacggggtgtcactgtcaccccgggacccagcctcctggcccgacttggctggagctcccctgcacctgccccgccccaagcagggctgattgccgggaacaaagggaggggccgggacgcgctggcaggtggggagggagggaggggcgaggctgcccggagcccgatcgataattcaggggatgagatcacagccggcgccgcccgcggggccggggaggtgggggaggggagcgaggcgcgcggtcgcgatcggccgtctctgccgcggcgcgtgtcggactcagcccctgcgcgtccgcgggaggagcagatcgtgggcgcgattggtcgggctggagccgcggctggacctgcgcgcggtgtgtgtgttgtgcgcagggtgtacgctgtgtctgggtgcgtgtccaggcatatgcaggggatccaggctgctgggtcctggggtgtgttcacctaatgggtaaagggtgggacaggtttggcggccctaggctgagggctgtgggctgaggagagagcagccccaccaccccctctctgcgccctgcatgcctcccaggctgcatccctcagggaggtcccggggcagtgtcgcaccctcccaagctccgggattagggtctttctggatgggaggtttgtaaggtggtccaggtgccatccctccctggcacacagagggctcagtcacacggcacccccggtgtgtttccttcctgtcccttggagacagtggcaggaactcagtccaacatccagagttcaaatcctgacatcagactgaggtgggggctcacagcatgccccaggacaaatgtccagtctctccaaagcaccatttcctctcagtagatgcccctggtcctgagttgctatgaagcctagatgatctttattaatatccaaaacatagcaagcagctactgatggcagatattagaatacctcaagctcctatacatccttcaaaacccagcttcaatattgcctcttccaggaagcctacctggctgcctgctcaaaagcttggctccacctccggcctcccctcgccctgggtctctcttctggtctctcagaccccctggccactggagggctacgggtctggctctggagggcggcgttcgggtctcttttctgtgacatcaatagacacgttaaggccgggctcggtggctcatgcctgtaatcccagcactttgggaggccaaggcaggaggatcacaaggtcagaagatcgagaccatcctggctaacatggtgaaaccccatctctactaaaaatacaaaaaattagccaggcgtggtggcgggcgcctgtagtcccagctactcgggaggctgaggcaggagaatggcgtgaacccgggaggcggagcttgcagtgagccgagatcgcgccactgcacttcagtctgggcgggagtgcgagactccgtctcaaaaaaaaaaaaaaaaaaaagacacrttaaatgagtaagcacatgtgatgctgacagctctccagcccaggaaaggtttattggctaagcaactgtagaaggtggagtgggaaaggcacaggcctcggggctgcctccagcctgagtttgggctgggaccggggctaacccaagctgtgatgggg

SEQ ID NO: 23140 - DNA, 424 bp, Homo sapiens
aatcacagccaactgcaaccttgaacacctggcttcaggcgatcctcccacctctgtgtcccaaactgctgtgtgagccactgtgcccagccaaaagctgtttttcaatggaggaccaacatctgaaaagtacattgacaaactgaggctcttatatgtttaattcaacgcctacagggcagtggcagtggctcacgcctgtaatcccagcactttgggaggatgaggcaggaggatggcttgaggccaacctggtcaacatagtgagactctgtctttacaaaacaaataaaatattagctgggtgtgctggcacgagcctgtagtcccagctactcagaaggctgaggygggaggatcacttgggctaggaggtagaggctgcagtgagctatgatcgtgtcattgcactccagcctgggca

SEQ ID NO: 23141 - DNA, 692 bp, Homo sapiens
tgcactgcaagttacaagctccaggctgccatgaactcttcagggtgctgaggaagaagygcactcctacagacattagaggtcaaaagaaaattgcagtcattgactattcttgtgtctgtgcccctttccacagcagggaaacaatttgatatcagtttttctttctttctaatcaaatactcccccaccataacccaccctttttccactccctcccccatccctctatttattttgcttattttgccgatttagatatgatgggtttggagtacttgagctagtcaactaatacagcaggagatgtcagttgacacatcagtttactcttagacaaaggataaacactaataaaagtaactgcaaagcactataaaaatataacatgttccaaatgctgagtccactcaaaataatgatataatcataagggaagcaaaagaaccttctgtcattgcagggacaaggccccaacaagagcattctaatgctttaaaattatgaataagctttcatatgtctctgcttacagctttgttaaccacaaggtagaaagtcaaaattgcatgtttgtataacttgtatttagcacttaactaaaattcaaaaaccaatgcgaaagcagaaggagggcacgagtgtgttttcctaagctgccacatagccacttagggttctcccaactctag

SEQ ID NO: 23142 - DNA, 692 bp, Homo sapiens
tgcactgcaagttacaagctccaggctgccatgaactcttcagggtgctgaggaagaagtgcactcctacagacattagaggtcaaaagaaaattgcagtcattgactaytcttgtgtctgtgcccctttccacagcagggaaacaatttgatatcagtttttctttctttctaatcaaatactcccccaccataacccaccctttttccactccctcccccatccctctatttattttgcttattttgccgatttagatatgatgggtttggagtacttgagctagtcaactaatacagcaggagatgtcagttgacacatcagtttactcttagacaaaggataaacactaataaaagtaactgcaaagcactataaaaatataacatgttccaaatgctgagtccactcaaaataatgatataatcataagggaagcaaaagaaccttctgtcattgcagggacaaggccccaacaagagcattctaatgctttaaaattatgaataagctttcatatgtctctgcttacagctttgttaaccacaaggtagaaagtcaaaattgcatgtttgtataacttgtatttagcacttaactaaaattcaaaaaccaatgcgaaagcagaaggagggcacgagtgtgttttcctaagctgccacatagccacttagggttctcccaactctag

SEQ ID NO: 23143 - DNA, 545 bp, Homo sapiens
caaagacacacacacacacacagacacagagtcacacatccttgagaatgtttatttttcattccatacaatccacatttaccccctcttcctgaatttttgtgactcgatctctttttcctttagttcctgtgcataagaccatgctgagtactgccgtcctgcatatggctgtaactttttaggagttctgctgtattaggtaaaatctgatgctccatcatattcaactcaacaactgggagtcccctagagaaacacaaactcatgttaaaacgcattttctctgagccatactttgmaatgtttcaattgtggggcccgctgagaaaaggatatcccttccccatttgtgatcccttaaacttcctcctaccacgtgttacaaactgttctgcgcaatccctgccccattcccagtattgtctgtgaggggagtcagctaacaagatgcactgggccctaaaagcacacacaagtctgatggggcaacagcttaaggaaatccatcaatctaaacagtcctttgtggtttggggcaagga

SEQ ID NO: 23144 - DNA, 597 bp, Homo sapiens
cccccttgtaataattccacagttccaaggggccaaggtctccaggttgagtcactattgtaaacacacccatagatgaatccacatgccatacctccttgagtaagtggggactcaaactaggtctgtcaattgttccagaaaattaagcatctaaataatttaatgataatttaaaagaagcacaatgaaatatttcaaggaatgtcacatacaagattctgtacctcttctgctttggttagactcattcagaataggttcctgctttgatcttaagagggaggtagagattctggagaagccctagggaagagcaaaaggaaaggaataaggagccaagaggaaacccagggtaaggctgaggagggactgtttcgtgtaggtgatttattggaagggttggaaggaaacatggaatgacaattacctttggttattgtcaggttagtatgagacttacaagaaaagcactgctcagacgcaattaccattcaagataagaaataakaggaaaggctagcacacttagctttttatttaaaaaagtgttaggtaggctgagcacggtggctcactcctgtaatcccagcactt

SEQ ID NO: 23145 - DNA, 635 bp, Homo sapiens
ttaacaatcacagcaacaatacctaaggcagtcaaagctcattacttctctagtttctttctgattcacttatgaaacaatttatccctgatttataatattcctcctaagtcttaaagaaaatgcacatagttgtgtagttataaataagctctgttcagagcagaccacattataagccagtatgattaagattccagaaatggcaaattgccaccaaataattatagcctttggtaacaaacagaacaaaacaaaaaagaaaacaatgacacttttaactaccagatccaggatttgataaaatgatcatgcccagaacgagctttgtcattttgtggcaaattgttcttaaagcctcaactgaactcaacaaagctttaaaatcatcttttgattttaaaagtggcgtcccagaaaagcttatatataattatatatatatatatattwttttttttttaatgctgccttattcagttttcaggaaatttttacatgtatggtattattatcatttgccccttcaactactctccttggtagacaggaaaggtattagtatacctttttttttttgagatggagtgcagtcacacaatctcggctcactgcaacctccgcctcctgggttc

SEQ ID NO: 23146 - DNA, 570 bp, Homo sapiens
cccttatgattggctctatcaggctctgcgggtatattaggtcgtttccacaccgctataaagaatcccccaagactgggtaatttataaaggaaagaggtttaattgactcacaattctgcttggctggggaggtctcaggaaacttacaatcatgccagaaggggaagcaggcatatcttacatggcggcaggtgagagaaaagtgtgtagaaggaaatgacaaacacttataaaaccatcagatttcatgaaaactcactcactatcacaagaacagcatrggggaaacggcccccatgatccaatcacctcccacaaagtcccaccctcaacacgtggggattatggggattacaactcaagatgagatttgggtgggggcaaaaaacctaaccatatcagcaggacttacatgagcttgactcctgggtgagggtcaggtgttattgctctgtcacaaactacagtttgtgtgtgtgtgtgtgtgtgtgtgtgtgttgtgaatgggattgtgttcctgatttggctctcagcttgaatgttgctggtgtataggaatgttagtga

SEQ ID NO: 23147 - DNA, 1852 bp, Homo sapiens
acgagagctccaggtcttgaatctgcctgcaccccgcttgaaaagacagaggaatcagaaaactggagtcagtccaagacaactcaaagagcagacagcagaggcatgatgtgatgtgctgagaaaasagccctggggttcaaatcccagccctgatacccgaatgttctgagcctcatttcctcttctgtaaaatgaagacgtgagtgcattttacagcaagtacctcactcccaggtggtggtgaggacaggctgatggagagaatgaatagctcctcccagagccgtacaggctctcaggaagtggcaattattcctaggattatttctgaaacactatgatttcctgatgaagcttcccaattgccaagagcttctctgattaaaaatgacagggaaatgatgacgctgaaattatatccaaagaactgagcaaagtccattattaacacagcattttattaagatcaggtcagcaaaaactctcaaaagttattaaataaccacttcaatgatatttgaagtaaagttaatgagcatttataatatacacaggcctaaatagtaatcaagccaattatcactgtttcagaaatgttttacaaagcatctttaatcatggctcttgacggtattaggcccgtcctgctgcttaatgctaagtgactcaatggcccctgcctgggacatactgggacaggcacacacctttggctagtgataaacaagcacgccacgctttgcttccttagtctctttatttgtaaaatctgatgactctgtgttatttaaaagtcgggaggcatcagggtggcattacaaaaaatctatacactacaggttctgggaaaacacagctctaatatgacaagagcgaacaaatggtagtaaaacacccaaatgagatatagatatattaaaaataaaattccattagctaaccttctgtatttatcataaggccaaccatattcagcaagaggaactgaatttttgttaagatgaattatttctgtgtgaacgtggtaaggggtggcaactggtaaaaggacaaaaaggggaaagagaggtcatcaaaaagagtggatcctcaggattctttaaacttaaaaagtgaaataacctgcaacagcagctctgatgttttctttgccttcatgccagttttcctgttcgtcgattccagctgcctttttgccgaggccaactagcaccacgctggggaagtcctgtcccacagatacaccaaatcaaccactttatttctttcaagcattcatttccagcaaggaattctacatgtggagactcactgagctcccacacaattactttaactgcagcaacagggctaaacgcacggtgaaatttggttgtggcttttttttcttaaaacctttgtgtcctggcaaaattgtataacttataggtttgagaggcagagtaagtgaggatactcttgcaaataattctgtgtaagccagagccacaaccggataaagaaagccttcagattgaggaatataagataggcagtagtttttgacagcaaatcgcctcttaatcttaaatgttctgcttaatagtggaataaaatcatacaatccaacacataatgtttagtatgactagacagccccaatacttggtgtacagtagatgctcattgagggtttaccaaatgatcacgttcttctcatacctgatgcagaccataaaaggttcgagtcttccctgccttcagaggtggtccagatctaaaacaagaggaaatagtcgttttaaaacaagtattttgctcggttcacttgggaaggcacacttacatactcggcattatcacactattc

SEQ ID NO: 23148 - DNA, 612 bp, Homo sapiens
tttttatggctgcatagtattctatggtgtatatatacaacattttatttatccatgctatcattgacaggcatttgcgytgattccatgtctttgctgttgtgaatagtgctgcaatgaatatatgtatgcttgtatctttataacagaaggagttatattcctttgggtatatacccagtaatgggattgctcagtcaaatggtatttctgcctctagatctttgaggaattgccacactgtcttccacaatggttgaactaatttacactcctaccatcagtgtaaaagcattcctttttccttctccacaacctcgccagcatctgttgtttattgactttttaataatcaccactctgactggcatgagatggtatctcattgtggttttgacttgcatttctctaatgaccagtgatgttgagcttttttcctgtttgttggctgcagtcaaaatgctgttgaaaaaccaaccaacaaaaaacaaaaaagcaaacacaaaaacaaaccacaacaacaagaaaaataagtatgtgttctgtttctttaaaacattaagaatattttaaatggctatgattccaactttgtattgattagagaggtca

SEQ ID NO: 23149 - DNA, 560 bp, Homo sapiens
ttatctgtttatttttgttttttgtaattacaaaatgtgtaatttatttaagaactaaattttttttttttttttttttttttttttttttttttttttttttttttttttactggaggaagagaatcaaagcacgggcagtttacatagagacccatcataatcccagaggctttccacctaggaatgtttctcctggcctcctcaccctgctgcctcccatctgctccatggggccatccacccaccctctaacatscaacagaaccccagaaatgcaacagatgagccctgaagaggaaaggcctctgttaatttttattgagccttgtcagttgaaaagaaacacacacacacacacacacacacacacacacacacacacactgaccaagaagtccttaacagtcccttcagctctactcaactttagacagatttcctcctgactatagcccctgacttccctttccttggagcatttactttagaaaatttgcaattataaattctttctctgccccttagagatgtaaatcttctcccagcctcctgccagt

SEQ ID NO: 23150 - DNA, 520 bp, Homo sapiens
taaagtttatattttgatatatattgctaaattgcctttcagaaaggcaactaatcaattttctgttatttataactttttttttttactttatgatttaaatatttcaggaagtttaaaatcttttactttgtggttctgccycagggacagtggtatgttggagtaaaagcacaacagcttatgaaagcctactgtcaaattttcagaaattttcaactacttgtaaaatgtagccattattttaaaattatggaaaattattaaattatataaaaaaacaaaggtaataaatactcaaagtatagtagttcctaattatttgctattatctatgctcttgaagtcagttatgactatcacatctggatagtgggaatacctggcagtggtgtactgccctgcatctcttcccaattccacactcagtgactatgtcgatagcttaatattggtcatggtggaagtatttatactatggaaatcagcaagtgctagaaatcagggcctgatttagtgc

SEQ ID NO: 23151 - DNA, 812 bp, Homo sapiens
ttcctggcctaacggtgtcctaatccggaagccagtgaccaagcctgtgagcctatcctggaccccacccctagggcttggcactttctgcacacagaggaaatgtccatgggatatagactttaaaaaaaaaaaatcatgcttaatgtagtatcttgtaaagtctcttcagtatgagcaaggtcacattaagtaaataaaatatctcaagtggaacatcaaagcaaaaacacttggagtgacattatkcaatgtgattacccagaggtatagcaggactcctctctgatcctcctttggggacttgtcttttactttttattatgaaaattttaaacaaaccaaaagtagcaagaacatcaaaacatctccatgtagccatcatcctgtttcaggaattatcaatatatagcaaatcttgtttcatctacatacctcgccatttctcctttcctccactgtattattttaaagaaaatccacacagaaaattatttcatctgtaagtattttggtatgaatctctaagagagtcctgtatttcttaacataaccacaagatcattatcctatctcaaaaagtagcaataatttcttaatcataaaatattcagtcagtgttcaagtttctttggagtatttcttggaacaatgagggtcaggcaatagaagacaagctgagagttctactaatagatggaaagaatacaaataatagcagtagcaaaataaataaaacaactaaccttgaagtgcatacatagttacaccagaaatgcttcctaaaccaacagcctgcagtctacagccag

SEQ ID NO: 23152 - DNA, 812 bp, Homo sapiens
ttcctggcctaacggtgtcctaatccggaagccagtgaccaagcctgtgagcctatcctggaccccacccctagggcttggcactttctgcacacagaggaaatgtccatgggatatagactttaaaaaaaaaaaatcatgcttaatgtagtatcttgtaaagtctcttcagtatgagcaaggtcacattaagtaaataaaatatctcaagtggaacatcaaagcaaaaacacttggagtgacattatgcaatgtgattacccagaggtatagcaggactcctctctgatcctcctttggggacttgtcttttactttttattatgaaaattttaaacaaaccaaaagtagcaagaacatcaaaacatctccatgtagccatcatcctgtttcaggaattatcaatatatagcaaatcttgtttcatctacatacctcgccatttctcctttcctccactgkattattttaaagaaaatccacacagaaaattatttcatctgtaagtattttggtatgaatctctaagagagtcctgtatttcttaacataaccacaagatcattatcctatctcaaaaagtagcaataatttcttaatcataaaatattcagtcagtgttcaagtttctttggagtatttcttggaacaatgagggtcaggcaatagaagacaagctgagagttctactaatagatggaaagaatacaaataatagcagtagcaaaataaataaaacaactaaccttgaagtgcatacatagttacaccagaaatgcttcctaaaccaacagcctgcagtctacagccag

SEQ ID NO: 23153 - DNA, 534 bp, Homo sapiens
gaagacacatatgaggcaaataaatgrcaaggtatattcccttcacgttctgacaggaaaagaacaagaggctggagcctttgtgtcctaaacctcaaagccctccaaactgttcctggttcgtagagcctggggctaagaggaacttcagtgaccaaagataattttcagatgtcttatgaatcacgagaagatataaaagaacaggaggcagggattaagcccaaaaccccctgtgttccttcttacacaactgagatacaggactaaatgccatgaaaaaattgctgaattaaagagaaaggtgtagaaattcaagctgttctaaggtaagaaatctccctaagttaccccctagcttaggcttacactgtagagtctgctcaaaaatgtgctcaagccccatcaccttcattcaagccctcgctaaaactttcaatgagttattatatgcattaaattgtcatttaatcgtacccaagcactgtcataaaagcaaatgaagcaagtcaagcagcattggaataaaaaata

SEQ ID NO: 23154 - DNA, 534 bp, Homo sapiens
gaagacacatatgaggcaaataaatgacaaggtatattcycttcacgttctgacaggaaaagaacaagaggctggagcctttgtgtcctaaacctcaaagccctccaaactgttcctggttcgtagagcctggggctaagaggaacttcagtgaccaaagataattttcagatgtcttatgaatcacgagaagatataaaagaacaggaggcagggattaagcccaaaaccccctgtgttccttcttacacaactgagatacaggactaaatgccatgaaaaaattgctgaattaaagagaaaggtgtagaaattcaagctgttctaaggtaagaaatctccctaagttaccccctagcttaggcttacactgtagagtctgctcaaaaatgtgctcaagccccatcaccttcattcaagccctcgctaaaactttcaatgagttattatatgcattaaattgtcatttaatcgtacccaagcactgtcataaaagcaaatgaagcaagtcaagcagcattggaataaaaaata

SEQ ID NO: 23155 - DNA, 534 bp, Homo sapiens
gaagacacatatgaggcaaataaatgacaaggtatattcccttcacgttctgacaggaaaagaacaagaggctggagcctttgtgtcctaaacctcaaagccctccaaactgttcctggttcgtagagcctggggctaagaggaacttcagtgaccmaagataattttcagatgtcttatgaatcacgagaagatataaaagaacaggaggcagggattaagcccaaaaccccctgtgttccttcttacacaactgagatacaggactaaatgccatgaaaaaattgctgaattaaagagaaaggtgtagaaattcaagctgttctaaggtaagaaatctccctaagttaccccctagcttaggcttacactgtagagtctgctcaaaaatgtgctcaagccccatcaccttcattcaagccctcgctaaaactttcaatgagttattatatgcattaaattgtcatttaatcgtacccaagcactgtcataaaagcaaatgaagcaagtcaagcagcattggaataaaaaata

SEQ ID NO: 23156 - DNA, 516 bp, Homo sapiens
aggggatggtgagattttaggtcatttctttcattatttctattatttttattataaagtgtgcagttaacatgtaaaaactggaatgtctccataccacaccagggcatgggtatgaacaaggtcacaataatattaatcgcacacatttcatcagcttcaaaaccctacttgctaatataggaacaccaggccttggaagagttcccacccctcytccagcatcactgagattcccctcctgtggctggatgagctgtggtggacacggaaatttgacacccagatcccctcaaagggagtactcatctcagtgcttagctccctccaaatctgccttagctacagagagatgctcctttcctggcacagcccacacccagtgactgatgggggtggatgtaaaggtccaaccatattagctcactcggaacaactctggcaggcacatgcagtccagagctcccaaaggggctggtcgagttattattgggcctgtattgaagtttatttaac

SEQ ID NO: 23157 - DNA, 516 bp, Homo sapiens
aggggatggtgagattttaggtcatttctttcattatttctattatttttattataaagtgtgcagttaacatgtaaaaactggaatgtctccataccacaccagggcatgggtatgaacaaggtcacaataatattaatcgcacacatttcatcagcttcaaaaccctacttgctaatataggaacaccaggccttggaagagttcccacccctcttccagcatcactgagattcccctcctgtggctggatgagctgtggtggacacggaratttgacacccagatcccctcaaagggagtactcatctcagtgcttagctccctccaaatctgccttagctacagagagatgctcctttcctggcacagcccacacccagtgactgatgggggtggatgtaaaggtccaaccatattagctcactcggaacaactctggcaggcacatgcagtccagagctcccaaaggggctggtcgagttattattgggcctgtattgaagtttatttaac

SEQ ID NO: 23158 - DNA, 516 bp, Homo sapiens
aggggatggtgagattttaggtcatttctttcattatttctattatttttattataaagtgtgcagttaacatgtaaaaactggaatgtctccataccacaccagggcatgggtatgaacaaggtcacaataatattaatcgcacacatttcatcagcttcaaaaccctacttgctaatataggaacaccaggccttggaagagttcccacccctcttccagcatcactgagattcccctcctgtggctggatgagctgtggtggacacggaaatttgacacccagatcccctcaaagggagtactcatctcagtgcttagctccytccaaatctgccttagctacagagagatgctcctttcctggcacagcccacacccagtgactgatgggggtggatgtaaaggtccaaccatattagctcactcggaacaactctggcaggcacatgcagtccagagctcccaaaggggctggtcgagttattattgggcctgtattgaagtttatttaac

SEQ ID NO: 23159 - DNA, 552 bp, Homo sapiens
gtaaaggcaggggcagggtagtggtggcaagatctacacacactggcaaaggagtaggggaagctgtcggtgagcacatgccggcagggatgtctctgtcaaagctctctgatggttacgcarggtttgctggtgaagatgctacggagagggccactgggaagcacgccagttgggcagctgaggctgtactgcatgcaggtgtggccagtcacagggaccctgggaggggccagcagatggagggtgctcagatcaaactggtctcatcccacaggcaagatagccctgtttcatccatgtctgacagtcaacaaaggccaaagccacctagaagagcatggcaaaccttgaggaatgggcatccctggctatgctccactgcagccatgcccactccaaacactgggctccacacaggcttggagtctggttcttgcttattctccaagaagttctccctgtcaactcaaatgtccatgagggttatgaagtcttctgcagctggaattccagagatccgtggtgagaatgggccactccatgcctact

SEQ ID NO: 23160 - DNA, 547 bp, Homo sapiens
agggtggttacttctgggtggagagaagaggatacgattggggaagggttctctgtggcacacttacacggctgttcattttattaccacagtattccttacgatatgcttgttttatatattcttctttaagaatgttttaaattaagaaagattccagatgcctttgatgggctctctgggcagctcagtcttcagctccctccctcctcctgtgacagcagcaggtaaatgggagrggccacccgcaccacatcagtcgcagaacacggacaggcacatctcagagcacacacattttaacagcacagactctattcttcctcattatctcacataaggaaaacgcatcgtgcatttaacacttgccatgatttttcaggccttttgatgttcactggctttagtgcttttagtatttggaataaattggatttttaaggtccagcatttcaaattctgttatttggtttgtataatttctaagaaactcccctactcaactgtggctcactatcaagactggaatgagttttagagtcacatg

SEQ ID NO: 23161 - DNA, 516 bp, Homo sapiens
tgtggttctggattagagttagaggcatcaataagaacttatgttcattctttttttgaactttgaatatttctttatgacttctttccttaygtctctgtaaatattgtctgaagttggtagaaccttccccttcaaccccagaagaaatttattgctaattgtcacaataggactgacagctgaattagtgaggagatccacatgcctataggaaaggtgtttttgagcctaccacctgctgttcaggtttgtcccttattaaaaggctgcatactgggctgggcacagtggctcaagcctgtaatcccagcactttgggaggccgaggagggtggatcacctgaggtcaggagttcaagaccagcctggccaacatagcaaaaccccatctctactaaaaatacaaaaattagctaggcgtggtggcgggcgcctgtagtcccagctactagggaggctgaggcaagagttttgcttgaacttgggaggcgcaggttgcagggagccaagatt

SEQ ID NO: 23162 - DNA, 1160 bp, Homo sapiens
tggtctcctgctcagtaactgagtaactaccaggaactcttcacctcctcttgatgtaataaagataatgcctaactttgacaggctactttaggtgtgtaaataaggtaacatacgcaaaccactttaggtagcatgtgacgcttactaaaggctgcctgcatgatggattctagaggaagaaactaatgtaaagatatcaggagagaaaataataatgaaagagaagagcggaatgccagaccatagccattctgtaaagattatatagctacattgagkcaaccaagaaaataatgttaagctgatattttcagacaaaataaaggcaggtataagttgataaaattattctgttcttatatcaaccctgataggtgacttttactgtcttcattttactgatgtggtaattgaagttcatagacagacctgaggtcacagaagtcaggaatggtggagatgtgctacgagctgcattctttttgctacatgacagctgcctctcactcatatccacatagtggacacaatgtgtgtgattcatggtcacatgttttgttttgattttatcccaatacacgatttagtatttgacaaagttacttttgcaaatcttaataaaacaaacgtaaggggtcattttaacatctgaacattaattttacttttctctcacaactcagcaagggaaacagaatggacatcatttttcccattttactcaactggaaactgagtcccagagagcatgaagacccagggaattaccaattagcataatttatacagagatcaaacatctctagggagcttacatacattttgcttccctattttgttcctaatcatatcataagatgaaatcagcatttcctaaggattattaggcagggcatacatgtgaaaacaaactctcctttttatctcccaagagtagaagcagtcaccttctgcctaaactgaaagaggctctaggaaataaacactttccctcaacacaggcacgggagctcccaagtgggatatttcgtgttcaagatattcagccctcagttcccctgtccccctgctgtgtccctgagcagcagtaacacactatctgccatggtgaataacagccttcttcactgtgccccttagggtggaaatgattcaag

SEQ ID NO: 23163 - DNA, 543 bp, Homo sapiens
tctccgtgttgcctctctcatgctcatcctttctgaattgtaatttttctaaaggatgaaaaaatcctcaataatgatgagcacaaatctgtatctaatcagaacagcaacattaatttaaaagatagtgtatgcctccttcttcttgragagaaacagcaaacatactacagtcttgcacagcacaacgtttcaatcaacgatggcacacagatatgacagtgatgtcttagcattataatagagctgaaacatttctattgccttgtgacatcatagccattgtaatatcacagtgcaatgcattgctcacatgtttatggtgatgttgatgtaaacaaacatattgcacttccaatcataaagcacattaccatcatgtactgtatattatacttgataatgataataaatgactatttactggtttgtgtatttactatactatgcttttattgttattttagagtatacgccatctacttttttttaaagttaactataaaacaggctgaggcagatccttcaggaggtattccagaa

SEQ ID NO: 23164 - DNA, 543 bp, Homo sapiens
tctccgtgttgcctctctcatgctcatcctttctgaattgtaatttttctaaaggatgaaaaaatcctcaataatgatgagcacaaatctgtatctaatcagaacagcaacattaatttaaaagatagtgtatgcctccttcttcttgargagaaacagcaaacatactacagtcttgcacagcacaacgtttcaatcaacgatggcacacagatatgacagtgatgtcttagcattataatagagctgaaacatttctattgccttgtgacatcatagccattgtaatatcacagtgcaatgcattgctcacatgtttatggtgatgttgatgtaaacaaacatattgcacttccaatcataaagcacattaccatcatgtactgtatattatacttgataatgataataaatgactatttactggtttgtgtatttactatactatgcttttattgttattttagagtatacgccatctacttttttttaaagttaactataaaacaggctgaggcagatccttcaggaggtattccagaa

SEQ ID NO: 23165 - DNA, 543 bp, Homo sapiens
tctccgtgttgcctctctcatgctcatcctttctgaattgtaatttttctaaaggatgaaaaaatcctcaataatgatgagcacaaatctgtatctaatcagaacagcaacattaatttaaaagatagtgtatgcctccttcttcttgaasagaaacagcaaacatactacagtcttgcacagcacaacgtttcaatcaacgatggcacacagatatgacagtgatgtcttagcattataatagagctgaaacatttctattgccttgtgacatcatagccattgtaatatcacagtgcaatgcattgctcacatgtttatggtgatgttgatgtaaacaaacatattgcacttccaatcataaagcacattaccatcatgtactgtatattatacttgataatgataataaatgactatttactggtttgtgtatttactatactatgcttttattgttattttagagtatacgccatctacttttttttaaagttaactataaaacaggctgaggcagatccttcaggaggtattccagaa

SEQ ID NO: 23166 - DNA, 1447 bp, Homo sapiens
tgtgtgtcactgttcttggatctttacgatcccaagagttaacataaggttttacgtggtctgcaatcctgaacttagaggaaagtgctgtaggttctggctaaatgagggtcttacttgatggactgggtccagttactcacttcctctgttatgactctgggaaacagagcaactgtctttcggaactccttttcgggagcatccacaagtgccttacaaaagttccatccccaacacccctcctcactccactggcaaacctatctctccccaactcctccctggtacctgggtgtctgccccaaacaaccaacccgccaagtctgtccttctgctactgctgcctgcaaagtgatccatctctcctttctctcgacttgcaagccttaataacaggattgctctctgtcctaaattcgcggaagtttcccctacctgcaagaattcaaactcgggaaaacacaaacggtggcagccactgttcccgggtggcgggagagttcatatgaaaccggaagaggaagtgactagcacagaaggccagccctgccccacctccccttggcgggtaggagggggtttggcctgaggctctgggcatgctcagtggagcgcgtctgggaattcaaggtgttccgtccaccttggcagctttaaagtgtttggatgtcagtgttttggggattttttttccaaattttaagatgcatttcctgtatgtggagtcggtagctttaacggttgaaactggggtgctgaatgctagtggcgaaaactcccacacgccgaaaattgaaccaatgtaacttcgtctggggacactaacaaatattccctatattgaggaaaatatggcgctttaaccctcagggctggcactcatcactttcaatctggggaggaatgaggaaaaaaggcattaggatcttttttgcacctagctcactattaggggctcttttttttccgctcgtttaatctttcagcgacctataaggtcctataagatcgtattacccccatttggcagatgagaaaacaagttacaagatcctcgttagtttgcccgtctacatacaatacatatkttgaatttcgtattgggcggcaagcccctactggcaggttccacgttcaattcgctccccgctctccggcaatgcctcgcacagaggaagcgcgcagctgaattatctgtggaatgaactagaatgaatgaaagaaggcacattcgcaggaatcgctctgcaatctacaggaattagaagaacccagcctcggagggaaggtagggtggaagaagatgaagcactggaaatcacgcggacgtgccgcttactttccagatgtccgactgcagactcacaagcggggcgtcagagccaccacaccagttctccgctgtctgtaagattttcgagaactggaaattaacttcactcgt

SEQ ID NO: 23167 - DNA, 1046 bp, Homo sapiens
ataaattggaaaagaatgaaagtgctataaagttcggctgaaattttcagaggttttattggttgtatctggtggagagagtgggcaagtcttctctgaacatccatgaggacgaagaacagtcactgaggtgacggtaccaagtcaccggccacctcccagggatcctctcatccggtcctcacagcagcgctgcatggtcggacctcatcacccacattccaccaagaggaagctgaagcccggggccttcatccactcatgtcctccagacccctggcacccatcctgggccccaccccatcatccaggccttgggccttcgacctggggagagtccctgtctcctccatgagccgccctgggcctgaagaggtatccaataaacaagaaagcagaacacaaagagctgtgatggagtggatcttatgtagtaagaataaacttattttgagaaatttctgggtcatgtatttacccacagaaaaacagaagcaaacacacacacacacacacrcacacacacacacacacacaccacacaggctgtcacgtgtcctaagcacaaagtgccttgagcaaggccattgctggccccacacttatcctgactgtgatcttgctgtgatcagcacatcccatcagtgtggcaacaggtgtggccagagtgggaaccaggccttttcttcagatttgctctttgttcctgaatagccaccgtcagaacagacaccctcctagaagtcacttgattaaaaatttccttttggatatttaggttgatgttttatccatcggttaaagtataaatgtatatttattataaaagtgtaattatggctctaattaatgattatggtgaattttaataactatagctatgaaaatattccaatagataaaaacagtgctaaaatatacagttaatataagagtgattactttaagataaatcttgtaatttttgatctaataaatcttcataaaatatacatgatcatgaagcacatcaatagaattaatcctaatatttatagcaatacttg

SEQ ID NO: 23168 - DNA, 892 bp, Homo sapiens
tatcaaagaagaaattactgtccataggtttgaatcaaataattaaaactcaggagtatatggtaaaggagaaagattactgctaaattaaaggtagtttgagaaactccrcacgtttcaaatggaattaggctaccaaatggctgagtgaatcaggatctttggaaggactccatagaagttgcatccaagggtgatattgaagagtgattgaatgttgctttttcctccttccccagtagacacaacagctacatggaagcagaaaaccttacagaattatcagaattcctcctcttaggactctcagatgatcctgaactgcagcccgtcctctttgggctgttcctgtccatgtacctggtcatggtgctggggaacctactcatcatcctggccgtcagctctgactcccacctccacagccccatgtaattcttcctctccaacttgtcctttgtggacacctgtttcatctgcaccacagtccccaagatgctagtgaacatccaggcacggagcaaagacatctcctacatggggtgcctcactcaggtgtatttttaaatgatgtttgctggaatggatactttcctactggctgtgatagcctatgaccggtttgtggccatctgccacccactgcagtacatggtcatcataaacccccatctctgtggcctcctggttctggcatcttggttcatcattttctggttctccctggttcatattctactgatgaagaggctgaccttctccacaggcactgagattccgcatttcttctgtgaactggctcaggtcctcaaggtggcccgctctgatgctctcctcattaacattgtcttgtatgtggccatggcactgctgggtgtgtttcctgtagctg

SEQ ID NO: 23169 - DNA, 892 bp, Homo sapiens
tatcaaagaagaaattactgtccataggtttgaatcaaataattaaaactcaggagtatatggtaaaggagaaagattactgctaaattaaaggtagtttgagaaactccgcacgtttcaaatggaattaggctaccaaatggctgagtgaatcaggatctttggaaggactccatagaagttgcatccaagggtgatattgaagagtgattgaatgttgctttttcctccttccccrgtagacacaacagctacatggaagcagaaaaccttacagaattatcagaattcctcctcttaggactctcagatgatcctgaactgcagcccgtcctctttgggctgttcctgtccatgtacctggtcatggtgctggggaacctactcatcatcctggccgtcagctctgactcccacctccacagccccatgtaattcttcctctccaacttgtcctttgtggacacctgtttcatctgcaccacagtccccaagatgctagtgaacatccaggcacggagcaaagacatctcctacatggggtgcctcactcaggtgtatttttaaatgatgtttgctggaatggatactttcctactggctgtgatagcctatgaccggtttgtggccatctgccacccactgcagtacatggtcatcataaacccccatctctgtggcctcctggttctggcatcttggttcatcattttctggttctccctggttcatattctactgatgaagaggctgaccttctccacaggcactgagattccgcatttcttctgtgaactggctcaggtcctcaaggtggcccgctctgatgctctcctcattaacattgtcttgtatgtggccatggcactgctgggtgtgtttcctgtagctg

SEQ ID NO: 23170 - DNA, 892 bp, Homo sapiens
tatcaaagaagaaattactgtccataggtttgaatcaaataattaaaactcaggagtatatggtaaaggagaaagattactgctaaattaaaggtagtttgagaaactccgcacgtttcaaatggaattaggctaccaaatggctgagtgaatcaggatctttggaaggactccatagaagttgcatccaagggtgatattgaagagtgattgaatgttgctttttcctccttccccagtagacacaacagctacatggaagcagaaaaccttacagaattatcagaattcctcctcttaggactctcagatgatcctgaactgcagcccgtcctctttgggctgttcctgtccatgtacctggtcatggtgctggggaacctactcatcatcctggccgtcagctctgactcccacctccacagccccatgtaattcttcctctccaacttgtcctttgtggacacctgtttcatctgcaccacagtccccaagatgctagtgaacatccaggcacggagcaaagacatctcctacatggggtgcctcactcaggtgtatttttwaatgatgtttgctggaatggatactttcctactggctgtgatagcctatgaccggtttgtggccatctgccacccactgcagtacatggtcatcataaacccccatctctgtggcctcctggttctggcatcttggttcatcattttctggttctccctggttcatattctactgatgaagaggctgaccttctccacaggcactgagattccgcatttcttctgtgaactggctcaggtcctcaaggtggcccgctctgatgctctcctcattaacattgtcttgtatgtggccatggcactgctgggtgtgtttcctgtagctg

SEQ ID NO: 23171 - DNA, 892 bp, Homo sapiens
tatcaaagaagaaattactgtccataggtttgaatcaaataattaaaactcaggagtatatggtaaaggagaaagattactgctaaattaaaggtagtttgagaaactccgcacgtttcaaatggaattaggctaccaaatggctgagtgaatcaggatctttggaaggactccatagaagttgcatccaagggtgatattgaagagtgattgaatgttgctttttcctccttccccagtagacacaacagctacatggaagcagaaaaccttacagaattatcagaattcctcctcttaggactctcagatgatcctgaactgcagcccgtcctctttgggctgttcctgtccatgtacctggtcatggtgctggggaacctactcatcatcctggccgtcagctctgactcccacctccacagccccatgtaattcttcctctccaacttgtcctttgtggacacctgtttcatctgcaccacagtccccaagatgctagtgaacatccaggcacggagcaaagacatctcctacatggggtgcctcactcaggtgtatttttaaatgatgtttgctggaatggatactttcctactggcygtgatagcctatgaccggtttgtggccatctgccacccactgcagtacatggtcatcataaacccccatctctgtggcctcctggttctggcatcttggttcatcattttctggttctccctggttcatattctactgatgaagaggctgaccttctccacaggcactgagattccgcatttcttctgtgaactggctcaggtcctcaaggtggcccgctctgatgctctcctcattaacattgtcttgtatgtggccatggcactgctgggtgtgtttcctgtagctg

SEQ ID NO: 23172 - DNA, 892 bp, Homo sapiens
tatcaaagaagaaattactgtccataggtttgaatcaaataattaaaactcaggagtatatggtaaaggagaaagattactgctaaattaaaggtagtttgagaaactccgcacgtttcaaatggaattaggctaccaaatggctgagtgaatcaggatctttggaaggactccatagaagttgcatccaagggtgatattgaagagtgattgaatgttgctttttcctccttccccagtagacacaacagctacatggaagcagaaaaccttacagaattatcagaattcctcctcttaggactctcagatgatcctgaactgcagcccgtcctctttgggctgttcctgtccatgtacctggtcatggtgctggggaacctactcatcatcctggccgtcagctctgactcccacctccacagccccatgtaattcttcctctccaacttgtcctttgtggacacctgtttcatctgcaccacagtccccaagatgctagtgaacatccaggcacggagcaaagacatctcctacatggggtgcctcactcaggtgtatttttaaatgatgtttgctggaatggatactttcctactggctgtgatrgcctatgaccggtttgtggccatctgccacccactgcagtacatggtcatcataaacccccatctctgtggcctcctggttctggcatcttggttcatcattttctggttctccctggttcatattctactgatgaagaggctgaccttctccacaggcactgagattccgcatttcttctgtgaactggctcaggtcctcaaggtggcccgctctgatgctctcctcattaacattgtcttgtatgtggccatggcactgctgggtgtgtttcctgtagctg

SEQ ID NO: 23173 - DNA, 892 bp, Homo sapiens
tatcaaagaagaaattactgtccataggtttgaatcaaataattaaaactcaggagtatatggtaaaggagaaagattactgctaaattaaaggtagtttgagaaactccgcacgtttcaaatggaattaggctaccaaatggctgagtgaatcaggatctttggaaggactccatagaagttgcatccaagggtgatattgaagagtgattgaatgttgctttttcctccttccccagtagacacaacagctacatggaagcagaaaaccttacagaattatcagaattcctcctcttaggactctcagatgatcctgaactgcagcccgtcctctttgggctgttcctgtccatgtacctggtcatggtgctggggaacctactcatcatcctggccgtcagctctgactcccacctccacagccccatgtaattcttcctctccaacttgtcctttgtggacacctgtttcatctgcaccacagtccccaagatgctagtgaacatccaggcacggagcaaagacatctcctacatggggtgcctcactcaggtgtatttttaaatgatgtttgctggaatggatactttcctactggctgtgatagcctatgaccggtttgtggccatctgccacccactgcagtacatggtcatcataaacccccatctctgtggcctcctggttctggcatcttggttcatcattttctggttctccctggttcatattctactgatgaagaggctgaccttctccacaggcactgagattccgcatttcttctgtgaactggctcaggtcctcaaggtggcccgctctgatgctctcctcattaacattgtcttgtatgtggccayggcactgctgggtgtgtttcctgtagctg

SEQ ID NO: 23174 - DNA, 1649 bp, Homo sapiens
atttttgtaaattttaagtttaggggtacaagtgcaagattgttacataggtaaacttgtgtcatggaggtttgttttaggattatttcatcacccaggtattaagcctggtacccactggttattttttctgatcctctctttcctctcagcctccacccactgaaaagccccattgtgtgttcttcccctctatttgtctatgtgtcctcaacattcaatattttcttactgtgtacagttgtttatttacaattaacattgcagaagagttagaaaagatataacataaagataaaaggcaaaccttatttaattttttctttttrgaaccatatacattagccagtcacttattctgcatctttgcaatgtgttttcatgtggaaggacttgtagctgactgcaagctgttcacattacttgtacctgaaattcttatatccaagtacgtattagatgtattcattctgccagaaatgcttctctttgttttccttttttcttttttacccttgtcccttcctatacatctttttaaactcatttaaattctatctctacaaaaggtttcccctgatctattctctctccatcctggctgatttaattcctcactttgatgacttatcagagctctgtacctctctcactttgttttctgcattcacccttaaccaaattctgtcttgtaatattgcccatctaaagtgggacatactgccgttgctgactgtatcttaggttcccggagagctggagcaatgttatctctgtgacctgtatcccttaccaggtctagcatggtttgttgtatggtagttaatattcttttgttgttgttgttctgtttttgctcctgctgtagtcataagtggcctttttaatattgcctttataagtctttttgttatctggttaaaggaagagagcaaacatgatgtcctcaagactaaaaagattcagacttccctgttttcctgtaagacagaactgaaagaagcatcgatttacattaaaatgaaaataataacaacattatttattcatgtcaaggctatgaaataaaatcaagggtttgtcatgaggagttgaaaactaaaaaataagaaatgtatctgaatctgttgtctcctagagtataggtatcaacaaggccactgttcaggagtatggattttaggtactcttatggactgaattttgtccctcgaaaatgcatatgttgaagtcctaacttccaatgtgatagcatttgaaaatggggcctttaagatataattaaggttagatggggtcatgagggtggtgcctccatgatggagattagtgcccttataagaataagaagtgattagtgttctctcagtatcttgctttaatatgtgtggctacagtgagaagatagcagtctgtagacaaggaagagtcccctccctaaaacctgactacgtgggaaccctgatcttaaacttgacaacatttagaattgtgagaaataaatgtctgttgtttaagccacacagtctatggtattttgtcatagaagcctgagcaaactaagacgggtatattgtttaaaacggcactgataattcacctggaagtataaaatattcagagctgcctgaaagttagttatactaact

SEQ ID NO: 23175 - DNA, 1649 bp, Homo sapiens
atttttgtaaattttaagtttaggggtacaagtgcaagattgttacataggtaaacttgtgtcatggaggtttgttttaggattatttcatcacccaggtattaagcctggtacccactggttattttttctgatcctctctttcctctcagcctccacccactgaaaagccccattgtgtgttcttcccctctatttgtctatgtgtcctcaacattcaatattttcttactgtgtacagttgtttatttacaattaacattgcagaagagttagaaaagatataacataaagataaaaggcaaaccttatttaattttttctttttggaaccatatacattagccagtcacttattctgcatctttgcaatgtgttttcatgtggaaggacttgtagctgactgcaagctgttcacattacttgtacctgaaattcttatatccaagtacgtattagatgtattcattctgccagaaatgcttctctttgttttccttttttcttttttacccttgtcccttcctatacatctttttaaactcatttaaattctatctctacaaaaggtttcccctgatctattctctctccatcctggctgatttaattcctcactttgatgacttatcagagctctgtacctctctcactttgttttctgcattcacccttaaccaaattctgtcttgtaatattgcccatctaaagtgggacatactgccgttgctgactgtatcttaggttcccggagagctggagcaatgttatctctgtgacctgtatcccttaccaggtctagcatggtttgttgtatggtagttaatattcttttgttgttgttgttctgtttttgctcctgctgtagtcataagtggcctttttaatattgcctttataagtctttttgttatctggttaaaggaagagagcaaacatgatgtcctcaagactaaaaagattcagacttccctgttttcctgtaagacagaactgaaagaagcatcgatttacattaaaatgaaaataataacaacattatttattcatgtcaaggctatgaaataaaatcaagggtttgtcatgaggagttgaaaactaaaaaataagaaatgtatctgaatctgttgtctcctagagtataggtatcaacaaggccactgttcaggagtatggattttaggtactcttatggactgaattttgtccctcgaaaatgcatatgttgaagtcctaacttccaatgtgatagcatttgaaaatggggcctttaagatataattaaggttagatggggtcatgagggtggtgcctccatgatggagattagtgcccttataagaataagaagtgattagtgttctctcagtatcttgctttaatatgtgtggctacagtgagaagatagcagtctgtagacaaggaagagtcccctccctaaaacctgactacgtgggaaccctgatcttaaacttgacaacatttagaattgtgagaaataaatgtctgttgtttaagccacacagtctatggtattttgtcatagaagcctgagcaaactaagaygggtatattgtttaaaacggcactgataattcacctggaagtataaaatattcagagctgcctgaaagttagttatactaact

SEQ ID NO: 23176 - DNA, 650 bp, Homo sapiens
tgtatatccacaaagaaaaaaaatttttttaaagtcttctttattgagtgataatttgctcagtaaaaaatactgatcataaactcaattgagaatttttttttaattttattattattatactttaagttttagggtacatgtgcacaatgtgcaggttagttacatatgtatacacgtgccatgctggtgtgctgcacccatcaactcgtcatttagcattaggtatatctcccaatgccatccctcccacctcccctcaccccacaacagtccccagaatgtgatgttccccttcctgtgtccatgtgttctcattgttcaattcccacatgagtgagaacatgctgtgtttggttttttgttcttgcgatagtttactgagaacgatgatttccaatwtcatccatgtccctacaaaggacatgaactcatcattttttatggctgcatagtattccatggtgtatatgtgccacattttcctaatccagtctatcattgttggacatttgggttggttccaagtctttgctattgtgaatagtgccgcaataaacatacgtgtgcatgtgtctttatagcagcatgatttatagtcctttgtgtatatacccagtaatgggatggctggatcaaatggtatttct

SEQ ID NO: 23177 - DNA, 578 bp, Homo sapiens
ttgttcaattaattgaaggcttaaaggccagctacctagtcagcctttcttctctttgaaaagaaatacatgtgacagtggggagagagggggaaccccatagatgtgttattatacctatttaccttctgaagtgcctgccgtatagatgcaagttttaaaaggtttatcaccatgcttatactgcttactaataattcattgctgaccatacctttacggcatctctctacttggtgagccatttcagaaggatgagttgaaacaataatgggagatgtagggcagttwttcttgaagactgcgaatggaagctcgctaaattattgtgtatttctgtcagcattttataaacttgttgtccagctttcctccttagtgcaaaaaaatgctgagctgtgaaaactgtttagtagcactcctttgggtctggatagagctgtggattccaatacaaatatgaatggattaaatgcatactaactacccaaagtgggaaactataatgaggggaagggcaaattctagctctttagaatttctgtctgttcctcagaaccaggcctcagttccggctg

SEQ ID NO: 23178 - DNA, 1213 bp, Homo sapiens
tgcatcagagttagatgctcacactataagaaacccatggaacttaatccyaactcatggaacagtagaatcatgattatcatttcatactcactctgggacatatttttgctcattgaatggaacaggtagcgaacttagccctatttgtctaaactgtcatcttcccttactttctgatatacacaaacacactcccacaagaacacacaccaacctaaatgtgatgatgatgattaactctactgctcttcgtttagttcatagtttcacaatcctatcctcatattccctcagaactctaaaattaaaactacccagacttggtaattctttttcatccactttgataaaataaaaggcctgatggagggtgcccagaggtatgctgataagggagccctgatcttatgtgtctatgaatgtggaatgttcatggctccatcaaagcacaacattgacaagagccaaatctggagttccttaagttatctaggccctccacccctctgatctccccaaaaccaactctgctcagaatatgcccatgacttttctcacctattcaatatggcccacagcaggctaatcaggggtctaccttcacccattcaagcagcctgcagagtgcacccttgacatccttattgtggaggctatacacaaatgggttggccaaaggtgtaatggcagtatacattactgaagccaccatgtcctgatactgagagttctggaagggaggctggaagtagacacaaatgatggtgccgtagaggaaaccaaccatggtgaggtgggatccacaggtggagactgctcggcggcgaccagcagctgaaggcaaacgtagaatagcggccccaattcggacataagagagtacaatgagggcacaggggcccagcataaggaagccaccctcaaagaatatggccagctcattagaatgtatgtcagaacaagaggctcgcagaagtggccggtggtcacaaaagaagtgaggaaggttaacgttgcccccagcatccccagtccagcaaagaggcaggacgagtcccacacgcaacatggtgtgcagtatggacaccacccagctcaaggctagtaagcaggcacaccgttggtgattcattaccaaagcatagtgcagggggtcacagatggccacatagcgatccagagccatgacagcaatgacaagtgtatctgt

SEQ ID NO: 23179 - DNA, 1213 bp, Homo sapiens
tgcatcagagttagatgctcacactataagaaacccatggaacttaatcctaactcatggaacagtagaatcrtgattatcatttcatactcactctgggacatatttttgctcattgaatggaacaggtagcgaacttagccctatttgtctaaactgtcatcttcccttactttctgatatacacaaacacactcccacaagaacacacaccaacctaaatgtgatgatgatgattaactctactgctcttcgtttagttcatagtttcacaatcctatcctcatattccctcagaactctaaaattaaaactacccagacttggtaattctttttcatccactttgataaaataaaaggcctgatggagggtgcccagaggtatgctgataagggagccctgatcttatgtgtctatgaatgtggaatgttcatggctccatcaaagcacaacattgacaagagccaaatctggagttccttaagttatctaggccctccacccctctgatctccccaaaaccaactctgctcagaatatgcccatgacttttctcacctattcaatatggcccacagcaggctaatcaggggtctaccttcacccattcaagcagcctgcagagtgcacccttgacatccttattgtggaggctatacacaaatgggttggccaaaggtgtaatggcagtatacattactgaagccaccatgtcctgatactgagagttctggaagggaggctggaagtagacacaaatgatggtgccgtagaggaaaccaaccatggtgaggtgggatccacaggtggagactgctcggcggcgaccagcagctgaaggcaaacgtagaatagcggccccaattcggacataagagagtacaatgagggcacaggggcccagcataaggaagccaccctcaaagaatatggccagctcattagaatgtatgtcagaacaagaggctcgcagaagtggccggtggtcacaaaagaagtgaggaaggttaacgttgcccccagcatccccagtccagcaaagaggcaggacgagtcccacacgcaacatggtgtgcagtatggacaccacccagctcaaggctagtaagcaggcacaccgttggtgattcattaccaaagcatagtgcagggggtcacagatggccacatagcgatccagagccatgacagcaatgacaagtgtatctgt

SEQ ID NO: 23180 - DNA, 1213 bp, Homo sapiens
tgcatcagagttagatgctcacactataagaaacccatggaacttaatcctaactcatggaacagtagaatcatgattatcatttcatactcactctgggacatatttttgctcattgaatggaacaggtagcgaacttagccctatttgtctaaactgtcatcttcccttactttctgatatacacaaacacactcccacaagaacacacaccaacctaaatgtgatgatgatgattaactctactgctcttcgtttagttcatagtttcacaatcctatcctcatattccctcagaactctaaaattaaaactacccagacttggtaattctttttcatccactttgataaaataaaaggcctgatggagggtgcccagaggtatgctgataagggagccctgatcttatgtgtctatgaatgtggaatgttcatggctccatcaaagcacaacattgacaagagccaaatctggagttccttaagttatctaggccctccacccctctgatctccccaaaaccaactctgctcagaatatgcccatgacttttctcacctattcaatatggcccacagcaggctaatcaggggtctaccttcacccattcaagcagcctgcagagtgcacccttgacatccttattgtggaggctatacacaaatgggttggccaaaggtgtaatggcagtatacattactgaagccaccatgtcctgatactgagagttctggaagggaggctggaagtagacmcaaatgatggtgccgtagaggaaaccaaccatggtgaggtgggatccacaggtggagactgctcggcggcgaccagcagctgaaggcaaacgtagaatagcggccccaattcggacataagagagtacaatgagggcacaggggcccagcataaggaagccaccctcaaagaatatggccagctcattagaatgtatgtcagaacaagaggctcgcagaagtggccggtggtcacaaaagaagtgaggaaggttaacgttgcccccagcatccccagtccagcaaagaggcaggacgagtcccacacgcaacatggtgtgcagtatggacaccacccagctcaaggctagtaagcaggcacaccgttggtgattcattaccaaagcatagtgcagggggtcacagatggccacatagcgatccagagccatgacagcaatgacaagtgtatctgt

SEQ ID NO: 23181 - DNA, 1213 bp, Homo sapiens
tgcatcagagttagatgctcacactataagaaacccatggaacttaatcctaactcatggaacagtagaatcatgattatcatttcatactcactctgggacatatttttgctcattgaatggaacaggtagcgaacttagccctatttgtctaaactgtcatcttcccttactttctgatatacacaaacacactcccacaagaacacacaccaacctaaatgtgatgatgatgattaactctactgctcttcgtttagttcatagtttcacaatcctatcctcatattccctcagaactctaaaattaaaactacccagacttggtaattctttttcatccactttgataaaataaaaggcctgatggagggtgcccagaggtatgctgataagggagccctgatcttatgtgtctatgaatgtggaatgttcatggctccatcaaagcacaacattgacaagagccaaatctggagttccttaagttatctaggccctccacccctctgatctccccaaaaccaactctgctcagaatatgcccatgacttttctcacctattcaatatggcccacagcaggctaatcaggggtctaccttcacccattcaagcagcctgcagagtgcacccttgacatccttattgtggaggctatacacaaatgggttggccaaaggtgtaatggcagtatacattactgaagccaccatgtcctgatactgagagttctggaagggaggctggaagtagacacaaatgatggtgccgtagaggaaaccaaccatggtgaggtgggatccacaggtggagactgctcggcggcgaccagcagctgaaggcaaacgtagaatagyggccccaattcggacataagagagtacaatgagggcacaggggcccagcataaggaagccaccctcaaagaatatggccagctcattagaatgtatgtcagaacaagaggctcgcagaagtggccggtggtcacaaaagaagtgaggaaggttaacgttgcccccagcatccccagtccagcaaagaggcaggacgagtcccacacgcaacatggtgtgcagtatggacaccacccagctcaaggctagtaagcaggcacaccgttggtgattcattaccaaagcatagtgcagggggtcacagatggccacatagcgatccagagccatgacagcaatgacaagtgtatctgt

SEQ ID NO: 23182 - DNA, 1213 bp, Homo sapiens
tgcatcagagttagatgctcacactataagaaacccatggaacttaatcctaactcatggaacagtagaatcatgattatcatttcatactcactctgggacatatttttgctcattgaatggaacaggtagcgaacttagccctatttgtctaaactgtcatcttcccttactttctgatatacacaaacacactcccacaagaacacacaccaacctaaatgtgatgatgatgattaactctactgctcttcgtttagttcatagtttcacaatcctatcctcatattccctcagaactctaaaattaaaactacccagacttggtaattctttttcatccactttgataaaataaaaggcctgatggagggtgcccagaggtatgctgataagggagccctgatcttatgtgtctatgaatgtggaatgttcatggctccatcaaagcacaacattgacaagagccaaatctggagttccttaagttatctaggccctccacccctctgatctccccaaaaccaactctgctcagaatatgcccatgacttttctcacctattcaatatggcccacagcaggctaatcaggggtctaccttcacccattcaagcagcctgcagagtgcacccttgacatccttattgtggaggctatacacaaatgggttggccaaaggtgtaatggcagtatacattactgaagccaccatgtcctgatactgagagttctggaagggaggctggaagtagacacaaatgatggtgccgtagaggaaaccaaccatggtgaggtgggatccacaggtggagactgctcggcggcgaccagcagctgaaggcaaacgtagaatagcggccccaattcggacataagagagtacaatgagggcacaggggcccagcataaggaagccaccctcaaagaatatggccagctcattagaatgtatgtcagaacaagaggctcrcagaagtggccggtggtcacaaaagaagtgaggaaggttaacgttgcccccagcatccccagtccagcaaagaggcaggacgagtcccacacgcaacatggtgtgcagtatggacaccacccagctcaaggctagtaagcaggcacaccgttggtgattcattaccaaagcatagtgcagggggtcacagatggccacatagcgatccagagccatgacagcaatgacaagtgtatctgt

SEQ ID NO: 23183 - DNA, 616 bp, Homo sapiens
aagtagagatgaaaagagacgtgacacctcaaaaccctgccaagctagggataaacataagaaataaaccatatgtgttgtgggaggcaaatccacaaagaaactgttaggcaaaaataaaaccaaactatgacatgatccagatgttcactaatataaaggcctcagcaaaatctgatggacttcaaggtctggtaggaaaggataaaagttccaaaagttccaaatgtgtgaacactgattggcttcaattatttggtaatcttttttaaataattgcttttgtttgaagtattgtcgtctttaagctttaactattttggaaattgataaaaagcagcacaaaaagatgaaacaaaagtgcaggctttgaagtacaatcattttgttcatagtaacttcaagagaccatttgggctggcccccaraaaagacaattgtatacattagagtttagacaatctggaagggagaaaaagggtaaggcctgtacacaaatattttatactgtccataacttgaaagagaattaattaaaaaacccaataggctatactaagtgtgtataaatatagtcatggtagatagcactgagtataattttcagataaaattt

SEQ ID NO: 23184 - DNA, 595 bp, Homo sapiens
tggcattttaaaatttggctttctatccaagccaaactgcttcttttagtggttttctttattttctatcagagcattttaacccaactcgaacaaaaccagatataaaacttttgaatagagagatcctcacaacctttgtatgacaaatgtgctttgtttctcattaggtttagctataaggtactgtctctagttcttctaaagggataaaaacataaaattggtagattatcctataggccactcagaaaatggctaattactttgtaattttctctaaatcctggctatcacagtgacattgacaaattattttcacttttgttagattgatgacaaatttgatgcttgttttaatataaacttgaatataagggtagtggttaagaagtgggccttgaaatcagatcattgacattcaagtctcaacactgccactgttgggtctgtgatcctgggcacrctaataatgtctgtagtaagattaccatctacaaaatgtagataatatttaccacttgatagaattgaactaaaacgacatgagataaagtatgtatagaatctggttcagcataagatctccatggaa

SEQ ID NO: 23185 - DNA, 1044 bp, Homo sapiens
catcctactggtgtacaactggtaccagtaaagaaatatcgccttttttttttttttttttyttttgagacggagtcttgctctgtcactcaagctggagtacactggcgagatcttggctcattgcaagctccgcctcccgggttcacgccattctcctgcctccgcctcccgagtagcttggactacaggcatccggctaatttttttatttttagtagagacggggtttcaccgtgttagccaggatggtctcgatctcctgacctcgtgatccgcccgcctcggcctcccaaagtgctgggattacaggcgtgagctgccgtgcccggccaataccgcctaatattttcttgggttattcatgctgcctttatccgacccttgctttttttttttctgaatgcaaacaaattcccagatgcccagctggtctgactttaggcaactttgagcttttgttctttcctgactccggtgttaacccaggcaccccttgttatttgtccactcagtgccgtgcgcgaggggcagtgtcatctttccaggcttagatttacctagtacaccttccttgcgacatctcttctactcgccatggcttccctcctgatttttcttcttcctgcttgttcccacagaacattcgtttgccagcgtcccattttagaacactttcggtctttagaaaaacccacggtttggttcttttgaacctgaacgtgaaaattcacacagccgtgttcctatctatatgcaaagttacatcccattgtgtcacccctgacattccagcttgcctggcttgcatgcctgaccaattgtcaactgtctaatttttcttcacaatcaatagaagcctgagaaaaagatatgctaacatctgctgagttattaggcaactcattattatatgaattcactactggggttttctgcagaaagagaaatgcttctgagagagaagcatctcctcaaatcttccccaggaagagagttcacagggggctctagattcatctattcattggggaattgatgcag

SEQ ID NO: 23186 - DNA, 1044 bp, Homo sapiens
catcctactggtgtacaactggtaccagtaaagaaatatcgcctttttttttttttttttttttttgagacggagtcttgctctgtcactcaagctggagtacactggcgagatcttggctcattgcaagctccgcctcccgggttcacgccattctcctgcctccgcctcccgagtagcttggactacaggcatccggctaatttttttatttttagtagagacggggtttcaccgtgttagccaggatggtctcgatctcctgacctcgtgatccgcccgcctcggcctcccaaagtgctgggattacaggcgtgagctgccgtgcccggccaataccgsctaatattttcttgggttattcatgctgcctttatccgacccttgctttttttttttctgaatgcaaacaaattcccagatgcccagctggtctgactttaggcaactttgagcttttgttctttcctgactccggtgttaacccaggcaccccttgttatttgtccactcagtgccgtgcgcgaggggcagtgtcatctttccaggcttagatttacctagtacaccttccttgcgacatctcttctactcgccatggcttccctcctgatttttcttcttcctgcttgttcccacagaacattcgtttgccagcgtcccattttagaacactttcggtctttagaaaaacccacggtttggttcttttgaacctgaacgtgaaaattcacacagccgtgttcctatctatatgcaaagttacatcccattgtgtcacccctgacattccagcttgcctggcttgcatgcctgaccaattgtcaactgtctaatttttcttcacaatcaatagaagcctgagaaaaagatatgctaacatctgctgagttattaggcaactcattattatatgaattcactactggggttttctgcagaaagagaaatgcttctgagagagaagcatctcctcaaatcttccccaggaagagagttcacagggggctctagattcatctattcattggggaattgatgcag

SEQ ID NO: 23187 - DNA, 1044 bp, Homo sapiens
catcctactggtgtacaactggtaccagtaaagaaatatcgcctttttttttttttttttttttttgagacggagtcttgctctgtcactcaagctggagtacactggcgagatcttggctcattgcaagctccgcctcccgggttcacgccattctcctgcctccgcctcccgagtagcttggactacaggcatccggctaatttttttatttttagtagagacggggtttcaccgtgttagccaggatggtctcgatctcctgacctcgtgatccgcccgcctcggcctcccaaagtgctgggattacaggcgtgagctgccgtgcccggccaataccgcctaatattttcttgggttattcatgctgcctttatccgacccttgctttttttttttctgaatgcaaacaaattcccagatgcccagctggtctgactttaggcaactttgagcttttgttctttcctgactccggtgttaacccaggcaccccttgttatttgtccactcagtgccgtgcgcgaggggcagtgtcatctttccaggcttagatttacctagtacaccttccttgcgacatctcttctactcgccatggcttccctcctgatttttcttcttcctgcttgttcccacagaacattcgtttgccagcgtcccattttagaacactttcggtctttagaaamacccacggtttggttcttttgaacctgaacgtgaaaattcacacagccgtgttcctatctatatgcaaagttacatcccattgtgtcacccctgacattccagcttgcctggcttgcatgcctgaccaattgtcaactgtctaatttttcttcacaatcaatagaagcctgagaaaaagatatgctaacatctgctgagttattaggcaactcattattatatgaattcactactggggttttctgcagaaagagaaatgcttctgagagagaagcatctcctcaaatcttccccaggaagagagttcacagggggctctagattcatctattcattggggaattgatgcag

SEQ ID NO: 23188 - DNA, 1044 bp, Homo sapiens
catcctactggtgtacaactggtaccagtaaagaaatatcgcctttttttttttttttttttttttgagacggagtcttgctctgtcactcaagctggagtacactggcgagatcttggctcattgcaagctccgcctcccgggttcacgccattctcctgcctccgcctcccgagtagcttggactacaggcatccggctaatttttttatttttagtagagacggggtttcaccgtgttagccaggatggtctcgatctcctgacctcgtgatccgcccgcctcggcctcccaaagtgctgggattacaggcgtgagctgccgtgcccggccaataccgcctaatattttcttgggttattcatgctgcctttatccgacccttgctttttttttttctgaatgcaaacaaattcccagatgcccagctggtctgactttaggcaactttgagcttttgttctttcctgactccggtgttaacccaggcaccccttgttatttgtccactcagtgccgtgcgcgaggggcagtgtcatctttccaggcttagatttacctagtacaccttccttgcgacatctcttctactcgccatggcttccctcctgatttttcttcttcctgcttgttcccacagaacattcgtttgccagcgtcccattttagaacactttcggtctttagaaaaacccacggtttggttcttttgaacctgaacgtgaaaattcacacagccgtgttcctatctatatgcaaagttacatcccawtgtgtcacccctgacattccagcttgcctggcttgcatgcctgaccaattgtcaactgtctaatttttcttcacaatcaatagaagcctgagaaaaagatatgctaacatctgctgagttattaggcaactcattattatatgaattcactactggggttttctgcagaaagagaaatgcttctgagagagaagcatctcctcaaatcttccccaggaagagagttcacagggggctctagattcatctattcattggggaattgatgcag

SEQ ID NO: 23189 - DNA, 1044 bp, Homo sapiens
catcctactggtgtacaactggtaccagtaaagaaatatcgcctttttttttttttttttttttttgagacggagtcttgctctgtcactcaagctggagtacactggcgagatcttggctcattgcaagctccgcctcccgggttcacgccattctcctgcctccgcctcccgagtagcttggactacaggcatccggctaatttttttatttttagtagagacggggtttcaccgtgttagccaggatggtctcgatctcctgacctcgtgatccgcccgcctcggcctcccaaagtgctgggattacaggcgtgagctgccgtgcccggccaataccgcctaatattttcttgggttattcatgctgcctttatccgacccttgctttttttttttctgaatgcaaacaaattcccagatgcccagctggtctgactttaggcaactttgagcttttgttctttcctgactccggtgttaacccaggcaccccttgttatttgtccactcagtgccgtgcgcgaggggcagtgtcatctttccaggcttagatttacctagtacaccttccttgcgacatctcttctactcgccatggcttccctcctgatttttcttcttcctgcttgttcccacagaacattcgtttgccagcgtcccattttagaacactttcggtctttagaaaaacccacggtttggttcttttgaacctgaacgtgaaaattcacacagccgtgttcctatctatatgcaaagttacatcccattgtgtcacccctgacattccagcttgcctggcttgcatgcctgaccaattgtcractgtctaatttttcttcacaatcaatagaagcctgagaaaaagatatgctaacatctgctgagttattaggcaactcattattatatgaattcactactggggttttctgcagaaagagaaatgcttctgagagagaagcatctcctcaaatcttccccaggaagagagttcacagggggctctagattcatctattcattggggaattgatgcag

SEQ ID NO: 23190 - DNA, 1165 bp, Homo sapiens
gcctactctggttgacagggtactgtcccatggagtacaggtaacaaatggtgctggcggttttgagacgtcacagtcctcaaagcagctagggagtcagaaattacatgttaagtgcagtttttagttccctggatatgaaatacccactactatatatttgaggactgacttacctaagtcctagtgaataaaaagagaggaaaagaaagaccaaaatcataaggcaaaatctaatcaagtgctagttttgaggcatgatctaattatttgacagcttgtatgtgcctttgaaaggctcgataaggccaggtgtagtggttcatgcctgtaatcccagcattttgggaggccgaggcaggaggatcacgaggtcaggagatcaacaccatcctagctaacatggtgaaaccccgtctctactaaaaatacaaaaattagctgggcttggtggcgcacacctgtagtcctgctactagggaggctgaggcaggagaatcgcttgaacccagaggtggaggttgcagtgagccaagatcgtgccactgtactccagcctggtgacagagtgagactccgtctcaaaaaaaaaaaaaaaaaaaaaagtcttgataaatagattcccccaaaccccgttttagtcttcctgctctttctccttgttctaaacaggaagaacaaattctgatgattgtgaatgagaagacacagtccctggtgggatgaaaacttgtaattctatttcaccccattcataaaccttcctaggtaagctattggttggattctagttctgaattattcagagsagacagcattgaaatatcatgtgaaataagagagagcctgtaatacatatttagtattcttttaatctgctgtcctatgtcaaacctccctaatcctccctgctcccccaggctcagtaatctctccagtgacacacacacaacccactctaaataatcccctcacttcttctgcagcagaaggcagccttctttaacagatttcattcccataatgtaatacaatccttcttttaaaaagctatttttaaaacgaacagttgctttcgaggaaaattataaatagtacctcattaattgggacccagcctcaataacggtatgtatgtgagaaggctgtaaaaacatgtcacatc

SEQ ID NO: 23191 - DNA, 1165 bp, Homo sapiens
gcctactctggttgacagggtactgtcccatggagtacaggtaacaaatggtgctggcggttttgagacgtcacagtcctcaaagcagctagggagtcagaaattacatgttaagtgcagtttttagttccctggatatgaaatacccactactatatatttgaggactgacttacctaagtcctagtgaataaaaagagaggaaaagaaagaccaaaatcataaggcaaaatctaatcaagtgctagttttgaggcatgatctaattatttgacagcttgtatgtgcctttgaaaggctcgataaggccaggtgtagtggttcatgcctgtaatcccagcattttgggaggccgaggcaggaggatcacgaggtcaggagatcaacaccatcctagctaacatggtgaaaccccgtctctactaaaaatacaaaaattagctgggcttggtggcgcacacctgtagtcctgctactagggaggctgaggcaggagaatcgcttgaacccagaggtggaggttgcagtgagccaagatcgtgccactgtactccagcctggtgacagagtgagactccgtctcaaaaaaaaaaaaaaaaaaaaaagtcttgataaatagattcccccaaaccccgttttagtcttcctgctctttctccttgttctaaacaggaagaacaaattctgatgattgtgaatgagaagacacagtccctggtgggatgaaaacttgtaattctatttcaccccattcataaaccttcctaggtaagctattggttggattctagttctgaattattcagaggagacagcattgaaatatcatgtgaaataagagaragcctgtaatacatatttagtattcttttaatctgctgtcctatgtcaaacctccctaatcctccctgctcccccaggctcagtaatctctccagtgacacacacacaacccactctaaataatcccctcacttcttctgcagcagaaggcagccttctttaacagatttcattcccataatgtaatacaatccttcttttaaaaagctatttttaaaacgaacagttgctttcgaggaaaattataaatagtacctcattaattgggacccagcctcaataacggtatgtatgtgagaaggctgtaaaaacatgtcacatc

SEQ ID NO: 23192 - DNA, 419 bp, Homo sapiens
ttttaaataaatgctacctttttgagagcaatctaggctgccaaaatatttctccagttgaagtccttgaatcaattggcttaggggcttgttaaaaatgcagattctagggcgccactctcagatctactggctgcaaatctctgagggatagggccagatattggaaatgtctcaacctctttgggaagttcctatgcatgtaaaaatttgaaaaccactggcaggataaattaattcatgggctttggagccagaagaaaacaggatttgaatctgaccctaccttcccagtttaataaacaagggaaatcagctaccatgaagaaagcrgatgcatttaatccttcttgatttaattaggtaaacaaaagttctagatgaatatcagtggctctaggatgtcagtttcacaaaga

SEQ ID NO: 23193 - DNA, 1102 bp, Homo sapiens
tgccccgctgtgccggcctgctgactgtttttacagacaatgtgattagtgaacacctgctttcctattgggaatctggaatcttgttagttgtggtgggcagagagtgtgcctacgtgaccagccccaacctctgccccagctctgagcttctacttccctggggagatgcagggcgcagggtatgctctgtgcagccttcatgggagggagagctcagcgagtctgtgccctgacccctccagaccccgctgtgtccttgctgtgtgttggccgtgggtataactgtctgcttagtctggtgagtcctagtgaagctctgacagcagaggtgccatgaggtgtcacgggtgttcagagaggtgtcctgcaggcgttggcggcaagtggtgacccagtgtgttccagtggggcacatgctcaggggaaaacagagcaggggcatgtggtgggggcagggcctgacctttcagaaaggggactcctcttctcctcaatgtggtgaaggagtgggccacaaggatgcctggtggcgggggcatttcaggctgaagkagcaaggaatgcaaagtccctgatgcagagtgaggggactgctgtcgccaggggcaagtggtggcaggtggattcagagagtgaccaaacgccctcgcctccaaggctgtcactgggattttactctgagccacttgggaagcctctgtcaggttcgtgcagaggccaaaactgacctgcctctagcaagtgctatctggaggtgctgggggagacagaatgcaaaagagtgaaggctgcaatgatggcaggagcagagagcaggccggggggtggttgcaatagtcttggggggcaaggctggttgccaggtcagggttgcaggggtggaagtgatgagaagtggccacattctggatgtagctggaagggaggctgggggagatttgctgagggctgggatatgagactccagagagaagagccaggtgaccccaagttcgggcagaggttctgctctgctggggcagccaggagctgagtcaggatgcttcagtgtgtgagcatggctggctgctggctgagcccacttctggactttgatgct

SEQ ID NO: 23194 - DNA, 1102 bp, Homo sapiens
tgccccgctgtgccggcctgctgactgtttttacagacaatgtgattagtgaacacctgctttcctattgggaatctggaatcttgttagttgtggtgggcagagagtgtgcctacgtgaccagccccaacctctgccccagctctgagcttctacttccctggggagatgcagggcgcagggtatgctctgtgcagccttcatgggagggagagctcagcgagtctgtgccctgacccctccagaccccgctgtgtccttgctgtgtgttggccgtgggtataactgtctgcttagtctggtgagtcctagtgaagctctgacagcagaggtgccatgaggtgtcacgggtgttcagagaggtgtcctgcaggcgttggcggcaagtggtgacccagtgtgttccagtggggcacatgctcaggggaaaacagagcaggggcatgtggtgggggcagggcctgacctttcagaaaggggactcctcttctcctcaatgtggtgaaggagtgggccacaaggatgcctggtggcgggggcatttcaggctgaaggagcaaggaatgcaaagtccctgatgcagagtgaggggactgctgtcgccaggggcaagtggtggcaggtggattcagagagtgaccaaacgccctcgcctccaaggctgtcactgggattttactctgagccacttgggaagcctctgtcaggttcgtgcagaggccaaaactgacctgcctctagcaagtgctatctggaggtgctgggggagacagaatgcaaaagagtgaaggctgcaatgatggcaggagcagagagcaggccggggggtggttgcaatagtcttggggggcaaggctggttgccaggycagggttgcaggggtggaagtgatgagaagtggccacattctggatgtagctggaagggaggctgggggagatttgctgagggctgggatatgagactccagagagaagagccaggtgaccccaagttcgggcagaggttctgctctgctggggcagccaggagctgagtcaggatgcttcagtgtgtgagcatggctggctgctggctgagcccacttctggactttgatgct

SEQ ID NO: 23195 - DNA, 527 bp, Homo sapiens
ttggtgcacaccaccatgcccacctactttttgtatttttttggagagatgaggttttgtcatgttacccaggctggtcttgaactcttgggctcaagtgatctgcctgcctcggcctctcaagggattagaggcatgagccactgtgcccagccaaaagtccattttcaatacacatttatttacacattctgttccattaagaatagaaagttattgaaaatatttcaagaaaattacatcctgatatataatacattctggctttttgaggacatttagttttaaaagtgactcttattttcttcaccttttttcctatgtatcactttctaggggatataaaacaggtaaatgyctatttctaattgtgttctttttccatttgtctctggatatacaagaaattttaaaatctttaaaattttttatgtggccattattcaccaaaccaagtaggtaggtgaccaaaacagctgaaggaaagaaaacatgtggatatgcatttgatcataaattttaagcaa

SEQ ID NO: 23196 - DNA, 527 bp, Homo sapiens
ttggtgcacaccaccatgcccacctactttttgtatttttttggagagatgaggttttgtcatgttacccaggctggtcttgaactcttgggctcaagtgatctgcctgcctcggcctctcaagggattagaggcatgagccactgtgcccagccaaaagtccattttcaatacacatttatttacacattctgttccattaagaatagaaagttattgaaaatatttcaagaaaattacatcctgatatataatacattctggctttttgaggacatttagttttaaaagtgactcttattttcttcaccttttttcctatgtatcactttctaggggatataaaacaggtaaatgtctatttctaattgtgttctttttccatttgtctctggatatacaagaaattttaaaatctttaaaattttttatgtggccattattcaycaaaccaagtaggtaggtgaccaaaacagctgaaggaaagaaaacatgtggatatgcatttgatcataaattttaagcaa

SEQ ID NO: 23197 - DNA, 598 bp, Homo sapiens
atttcctactatgaagcttaaatgacgcctttgcattatttttayttttttgagacagaatctcacctgtcacccaggctggagtgcaatggtgcgatctcagctcactgcaacctccacctcccaggttcaagtgattctcctgcctcagcctcctgagtagctgggattacaggtgtgtgccatcatgcccagctaatttttttttttttgtatctttagtagagacagggtttcaccatgttggccaggctggtctcgaactcctgacctcgtgatctgcccgcctcagcctcccaaagtgctgggattacatgcgtgaaccaccgcacccggctgcctttgcattatttttaaagtcacttctcagctttatcctcaactgattaataatactgttcatttttttcttttacgctttatgaatatctatcccttttccatacttctagcacttgaacttgtcttcactgcctctctcagttttcactaccaacaacatcctaggttggccttcttcaccctaaattttctgtcaatccatctgtatttcactgctaattgattttttctttaaagccattttcatcaagttagt

SEQ ID NO: 23198 - DNA, 550 bp, Homo sapiens
ttaatataataagctcttgggaatggatgcaggctaatcaataaaaaagccatccactaatttacaaggtaaactataagaggaagaacattttttccccacactggatctcactttctttacccagcagaatttttacttgggaaaaatgttttgagttgaaaaaaaaaagtggacaacatacaagtactatgtacttaacttataaatacaaagcatatatagaggatactcttacaagctaayctatatacaatactttatgtaagtaatatgcataaaagaatgattctagagaggggaggcaaagcaagatggccaaagagaaccctccagtgattgtccccaccaccaacaggaatatcaaattgaaaaaatatccacacaagaaagaactgtatgagaaccaaaaatcaggtgaataatcacagtatctgattttgacatgatatcaagaaaagaggcacggaatagggttacaaagaccgtcttggattcccaacactactactcctccatcccctggcagtgctgtgtgtcatagagagag

SEQ ID NO: 23199 - DNA, 600 bp, Homo sapiens
accttcaaatgttagtacttcagcttgtactttctaagcataatgacattttcccataacacaaagcgttatacagtacatattcatatttcctaattgtccctgaaaggtctttagctattttacttcttgtataagctcatactcaggtatcagacagtgcattttgttgttatgttctttaaactcttataatcttgagttcctcactgtcttccatgatgactttgacctgttaaacagtgtaggtcagttgcctttggaatggcccacatttcatttcatcctgttttcacacattattcttctaatccctgaatttgctataaacaggagatacagtttaaacattctttggagacaatttcttcataggtgatactgattgtttcatattacaccctggcagtaggcccctaagtcagatggaccctctattagtgacgttcagtttggtcatttggtgacagtaatgtctgccaggtttttctttctaaagatakatatatatatatatatatatatatatatatatatatatatatataaattttttttccctttgcaacttgtggagtgatattttaatatgtgcaaata

SEQ ID NO: 23200 - DNA, 654 bp, Homo sapiens
agctctgaaaacagatttcctttcttagagcacccgcagtcctttgcagggtgccattcactgtgacggagaaggtgcgcttttcctctttccttctttgcttcgcgcgcgctgatgagtgagtcagagaagccatcatggccttgaagaaagatgagctatttgagcagcaggcaatgtgagaggctgaagggctggcagaggtgtcttctgccaggtgttcccttttctccctgggcaggcaggttagggagcccagcatagaggctgggtccctggagagatgagcagaggtgagtagtacatggacggatgcttagaggcaaaatcgtgcccttggcagtttgacattcactctacttgctccagttctcggaactggaaggcgagaggtatcacccccagcttctggcattccagacctacagtcctgaacttggacccttcccaggagagacctttgggctctggtcctcgccctccttgccatcacctcatcccctcaaccaaaactttgctatcytaggggctgtgccccccaggccttcactctgatcattaattcatgctagagtcttattatccaataacaggacttggtgtttctcctgagagtattttaacttgggattcttgggactatgaatgcctcca

SEQ ID NO: 23201 - DNA, 594 bp, Homo sapiens
taagcttatgaaaagccggaaaggattatatatgatgtgtcaggtacagacaagtaagggagaggatggggggaatgtgaagtttatactcagttttccttcttttgtgaaattgaggccactgacttccctccattgcagcttgtacaattctctttactcccatagccccaccaaaggccctcaatgcccatcccctggaggatggccatgctgttctaactggtcactgatctccctgcctmcatccatactcctctgccctgcccattaccaatcctccatgaagtcgccagtgagagagctctaacatgcctcccccgataggataatgtctatattccccagcatggcaaataagaccttccttagcccatccatagcctgcatccatctcccctccaagatgtgacctcacacaagaagctctgtggtgctctcccacctgctgggccccacggtgctctgtcttgtcatcttggcttctggtcatgctattccagctactggagcagcctggtgcattctgtgcaatgggggcagggcaaggtctctctattcatcctttagagcaaaagtcagttccaaagcttt

SEQ ID NO: 23202 - DNA, 1258 bp, Homo sapiens
tcctcaagaccttcaagcctgaatttgaagcccctcatagattttcctgcagtagtcttagtgtatcagtcagctcttgctgtacaaataaacaatcatgatatctcagtgtaatacaactagaagcattatttatcattcatccatctgcaggttggctggaatagcccttgctccaccagtagagatgcataagctcaaggacttggtagggcacagtggctgatacctgtaatctcaatactttggggggctgaggagggtggatcacttgaggtcaggaattctagaccatcctagccaacatggtaaagccccattcctactaaaaatacaaaaattagctgcgcatggtggtgcacatctgtaattccagctactctggaggccgaggcacaagaattgcttaaaccctggggaggcggaggttgcagtgagccaaaatcgcaccattgcactacagcctggacgacagagtgtgactctgtctcaaaaaaaaaaaaaaaaaagactcaaacccaacctagcaagcccatttcaagcctctgcttgtatcccactgatcaaggcaagccacacagccaaaaaactccagcaccaagggcagggaagtacattctacccactatgaggccayggaaagggtggatatgtaatagtactacttactacgcaatcattcagtctttcccacctatactaacagtgtctatcacagtgtattgtcatcctctgcataaagccccctttaggctattaccttcttaaaaacagaggccatgttttttcatctttgtatttcctatctggtatacaataggcacttgaagatatttgagtgagtgagtgaatgaatgaattggaagcaggtagtattctaccaggctctgttcctgatccttcataatacccctcctatgtgcctactcaacgtttttactacagttaccaaaatgagaacaaaattattatgaatgagcctggtttatgtaggggtagagagtgagggagaagagaaccacatcgtaagtcactttacctactttggcttttgtccttgattgccattggtagcctccccaaaaagatatctaacctaagtggatcccaggctacaagcggtgggactctagaacacattttaaaaagatatttcagaatcctatcttgctgttcagtaattttattttagagcaaacacaggaaatggaacacatttctaagcaaatacttccctgattacttacacatgcaaatt

SEQ ID NO: 23203 - DNA, 991 bp, Homo sapiens
tgctctcctgcttgaacatttaactgaaaggaaaagaacggaggaagccagagtaacaataaccacatgccttttccayaaatgattcttgcacaggatttcaaataccagaagatggaaggttaataaatgtaggaagattttatccatacaagttgagaaaaagttaacatatgtaaaatatggaaatgatcttctaagtgtctattgcctttgaaaggtatcattctcaagttaattcaccagttaatttcatgtcatctgaagtttctctattaaaatttaagtaagagattctcatttgggaaacaacttctaaatatttcagaaacacttaccaacataaccacagtgtactgaatttagcttgtaccaactcaagagagctaattgtgcatgtatattcacaactcttgtgtttcagtgctgtcacaatagtgcttggaatcgagtgtggtgggagattttacaacacagaaataaaaaattactatttttaaatattttatttaattattcctatcagcctatgagtatatttctatatttttatacaatttttattcctgttttacaaacagagaaactgagatggagaggtcatcagcccaaagtcatagtgtgaatggtggagccaggatttatgctcaggcagtgtaacttcatagcctttggtcttagccacaatgctactctgcttcccaataaatatttagtcaaagtttattcatcagtatagaatgatgacattatttattatttattgactgcataaacccaaattatcaaacactttttcaacattctctcaaagaagtaaattcaatatatctaacttgaaatttaggagcattaaaaaattaggaaaactattttatagaaccagagtttttcatggggacaggtgctagggttctctgctccagaattctgatgcttaaaatgttgcatatttgttttagatggaaaaagagggtgctggcagaaggat

SEQ ID NO: 23204 - DNA, 991 bp, Homo sapiens
tgctctcctgcttgaacatttaactgaaaggaaaagaacggaggaagccagagtaacaataaccacatgccttttccataaatgattcttgcacaggatttcaaataccagaagatggaaggttaataaatgtaggaagattttatccatacaagttgagaaaaagttaacatatgtaaaatatggaaatgatcttctaagtgtctattgcctttgaaaggtatcattctcaagttaattcaccagttaatttcatgtcatctgaagtttctctattaaaatttaagtaagagattctcatttgggaaacaacttctaaatatttcagaaacacttaccaacataaccacagtgtactgaatttagcttgtaccaactcaagagagctaattgtgcatgtatattcacaactcttgtgtttcagtgctgtcacaatagtgcttggaatcgagtgtggtgggagattttacaacacagaaataaaaaattactatttttaaatattttatttaattattcctatcagcctatgagtatatttctatatttttatacaatttttattcctgttttacaaacagagaaactgagatggagaggtcatcagcccaaagtcatagtgtgaatggtggagccaggatttatgctyaggcagtgtaacttcatagcctttggtcttagccacaatgctactctgcttcccaataaatatttagtcaaagtttattcatcagtatagaatgatgacattatttattatttattgactgcataaacccaaattatcaaacactttttcaacattctctcaaagaagtaaattcaatatatctaacttgaaatttaggagcattaaaaaattaggaaaactattttatagaaccagagtttttcatggggacaggtgctagggttctctgctccagaattctgatgcttaaaatgttgcatatttgttttagatggaaaaagagggtgctggcagaaggat

SEQ ID NO: 23205 - DNA, 440 bp, Homo sapiens
attgagagctcatctttgttgtctgccgctttaacattgggggtccccagagatgcattcttgacactttgttcttctcactctcctttctgctaggaagacttcctcygacttcatttaccatgtgtatcctgcaggctgaggtcacctaattatatatttcaaatccaggctcctatctttgcctctagaacaaattgtcaaatgacttttccaaataaataatccatgggaaattcaaacttcacctgtaatgagccccgtccctagattctatattttagataatggatgtattcacaaaaactcaaactacctttcactatccctcatccttacttgcacattccactaatcacagagtcccactcattttttctcctaaatattgcccaaatttattacatatttttcatccctacttactaccttaacccaag

SEQ ID NO: 23206 - DNA, 440 bp, Homo sapiens
attgagagctcatctttgttgtctgccgctttaacattgggggtccccagagatgcattcttgacactttgttcttctcactctcctttctgctaggaagacttcctctgacttcatttaccatgtgtatcctgcaggctgaggtcacctaattatayatttcaaatccaggctcctatctttgcctctagaacaaattgtcaaatgacttttccaaataaataatccatgggaaattcaaacttcacctgtaatgagccccgtccctagattctatattttagataatggatgtattcacaaaaactcaaactacctttcactatccctcatccttacttgcacattccactaatcacagagtcccactcattttttctcctaaatattgcccaaatttattacatatttttcatccctacttactaccttaacccaag

SEQ ID NO: 23207 - DNA, 1110 bp, Homo sapiens
ttttttcccactccactaattttcataaacgtggtcactagagctccttttcctttgcctcatactttttaaacctggcaatttgcttttatggaaaaaagcaaaaataaaccagattgcttttagttgccaaaaatttaagagtaattatgtgaaacatctgaaatagtggaagcttttttaagagtgtgatttcattttggtatagactctagatttgaagcctgactctgccatttataacttttgggaacttgaataagttacgtattttatgatgagtgcctcattttcctcatctatgaaatgggaataaagatagtacctatctcagagggatgttttgagaattaaatgaattaacagtacctggcatacgctaagcattaatgtgtgttaaaaaaaaacacaacaaaaccaaaaggaaacaaacaaatacaagttttagaattcaatgagaacacgacagtttaaaaaaaatgaaatttgattagaaatataagctagagattgctctcaagccagtatagtaatagtacttttaaaaagttattaatgaaaaatatgaaagtaaagtctttaaatcttttagttaagtgtttcaaatttttaaaaacttgcagttctttaaatcttatgtcctcctttaattccatttgaaatttgaggtaaatagtccgacttggaaaaaaaagtaaaaaaaaaaaaaagatgggataaagctttgctttgttttcataccatcctttcccctgagaaacagtgtttaactgatagagtaaatagatgtgtgtgtacacagtctccaagtttatggtcttaaatttaaggtttagcaggtaatttttgaacaayttaggaacctgtaggtagaagtattgaaaattgttactttatttaaatgaggcagatgcttgtagaaaaacaaaactgtgtgcctgaaatacaaattaattggcaaacaattagttggcattaaattgacagcttgttgccctttcctcatgtcataatatttataaaagtaagctcatggtgggacaaattaatacatctccaagtcttacattagtatgtgtttttattctgaaaacttataattctgtactt

SEQ ID NO: 23208 - DNA, 1110 bp, Homo sapiens
ttttttcccactccactaattttcataaacgtggtcactagagctccttttcctttgcctcatactttttaaacctggcaatttgcttttatggaaaaaagcaaaaataaaccagattgcttttagttgccaaaaatttaagagtaattatgtgaaacatctgaaatagtggaagcttttttaagagtgtgatttcattttggtatagactctagatttgaagcctgactctgccatttataacttttgggaacttgaataagttacgtattttatgatgagtgcctcattttcctcatctatgaaatgggaataaagatagtacctatctcagagggatgttttgagaattaaatgaattaacagtacctggcatacgctaagcattaatgtgtgttaaaaaaaaacacaacaaaaccaaaaggaaacaaacaaatacaagttttagaattcaatgagaacacgacagtttaaaaaaaatgaaatttgattagaaatataagctagagattgctctcaagccagtatagtaatagtacttttaaaaagttattaatgaaaaatatgaaagtaaagtctttaaatcttttagttaagtgtttcaaatttttaaaaacttgcagttctttaaatcttatgtcctcctttaattccatttgaaatttgaggtaaatagtccgacttggaaaaaaaagtaaaaaaaaaaaaaagatgggataaagctttgctttgttttcataccatcctttcccctgagaaacagtgtttaactgatagagtaaatagatgtgtgtgtacacagtctccaagtttatggtcttaaatttaaggtttagcaggtaatttttgaacaatttaggaacctgtaggtagaagtattgaaaattgttactttatttaaatgaggcagatgcttgtagaaaaacawaactgtgtgcctgaaatacaaattaattggcaaacaattagttggcattaaattgacagcttgttgccctttcctcatgtcataatatttataaaagtaagctcatggtgggacaaattaatacatctccaagtcttacattagtatgtgtttttattctgaaaacttataattctgtactt

SEQ ID NO: 23209 - DNA, 1190 bp, Homo sapiens
gtgtggtgtgtgcacatgtgcacacttaggtggggaggaaaggcacataggagatacatctccaagcaatgcatttaaaaaggttgcacatctccccagccagtcagaggactgtcggcctcaatgctcacttcctctcttttgcatggatgtgtaaaagtgcagaaagaattcaatctcaaagagatgaagagaacatcacaataacaacaacacacgcatgcccaaagcaaaatgagcaagagcttcaaacagctcttcatcccacacagatgaaagtaattcgatatttgacacaactaagtatctaaaatgcaggcaagagtgacatgacttagatgccaatcacgctgcttttaacgagttcttccattgtgtttatgtctgaggccacagtagccccagaggactcctgggtcagttatctatatttggaacattgtgtgtactctctttgcacaaagcagggcccacttccaggaagatattatgttttccccatcaataaagcttgatttttatgggtgtttaaaaccatactagcaaaacccattggtattatgggtaggtgttgaaccagttgcaggatgcaagtcagccatcktctatcatcctcgtgagctcaaatgccctaaaatattgcccttgaggttcttcccagagagaccagccttgccaattttgcagtattgttgaaataagaaagaatttctggaagattgcaaggcatttggaaagaaccatgcattttcttgagggatgctggctgagtctatttttaggctgccttattgaaaggccacttctacttcatctccttactacaagtcctcctgttttctcttttagtattcatgtggtttctaatatggggtggtgtaaaacttaaaattaaggtctaatattatctgtaccttgacatccggtaatattgggagggtctcaaatgcctaatcacaagttcccattcccactctagagtcccacagagtcccgtggccaaaggacccttcttgttaaatgagccaggtgtagctcttgcttatccctgagtagccagtttcagttctctgctagtctgcagaattatctaaacaagccaatctatcctctcgtgggaaccaaggaggaccccaccctcttgatactacacaacctgccttccacaacctcttatggttcactctgct

SEQ ID NO: 23210 - DNA, 2270 bp, Homo sapiens
atgataaggtattataattaactcagccaggaagcctgaaatttcatggttacttaatgtcccaccttcctccccttttcctctcaacgttaacatctcaacagtttatttatacagtactcaaaaatgcctataggaaaatacataaactttaaatgagatgcaaatttgacatctgccagttcagtcttgcacagttttatcttctccatcttagctgaatttgagagttttctttaggtacaaattcatttccttctaaatattatgggttaaacattaaatacaaaaagaacaaacagaatagtaaaaagctatgtttcaatactggaaaatgcaaatatcactgtgtgacctttgatataatagttttttagtctaacaccagaaataattatatcagtggcctgcttcctgccatctctacagaggtgtaatgaagaaatcttagttaatatgtactagacaagaaagtagcttagaagacaatgcttttaattactaaacaggaagcaaaaaacagttgtggacaggaatattaaatagagatcatcacttgaccttcaaatacaagagaatgactaataattttgtcagctcttttgtcagtaaagggatttgataggggtatgtaagaatgttcatagtccgaaagatactgaccctttaataaaaataataaaaacactgaggcattcaccaagttaataattcttgtcatttcagtatcaatcaaaagacattatgtcaagcaactatattctctgaaccattttcagtacagtgaacttaactgttccctgaatgccttctgatctatttagatgtttcttcaccagcatcatcaaaaacattatatagagtctcaccttcatatattatggaataggataaaatgccaaatgcagagaattaaatcaacattgcctttgatctctaaggacctagaatctgaaattgtacatactgggctgagcatggtggctcatgcctgtaatcccagagctttgggaggtcaaggccagtggatcacccgaggtcaggagttcaagaccagcctggccaacatggtgaaaccccgtctctactaaaaaatacaaaaattagctgggcatggtgatgagcacctgtaattccagctacttgggaggctgaggcaggagaatcacttgaacccaggaggcagagattgcagtgagccgagattgcaccactgcactccagcctaggcgacaagagcgaaactctgcctcaaaaaaataaaaataaaaataaaattgtacacactataattctggatatctttatgaacaaatcagataagccatttgtcaatctactgtcatatttcttaactattcaaaattggttgatgagtgacagatgcacaacactaacgcaaaaatggcatgaccaatggaaagaaacaaaggaaccaatttgatactttttttatcccatcaacaagttacaaatatgtaagtgggctttaagtgaactaatgaatgacaatctttttaaagtttacatatatagacagtgggtagttgacaactctggagactatttgattataatttatttatgtttatttataatttatttatacactgcctggacttaaggcagctaacagagctgtgaaaatataatgaaaaaataactttaaaatgaaaaagataaagcagagagaatataaagatagaaaagtaataaagagataataattaatatataaattccagtcaatatagccctgctaggcaaaactgctaaaagcactcacagattccactttcagctttcagacacaaagattacaacagctataaggtaaaacaaaatttgcgtctctgtaaaagaacaactatttggcttgctagttagcctactcagccaaaacaacaaaagaaatccttgattttttccatttccctcacctgtcagactcwatccattagtaaattctatgggctttacttcctaaatatatcctcaaaatatgcccattcttcatttctaatgacacaaccctagtccaatatactaccctttctcatctggattcttccaaaagcctcttatctggtctctgcacaatttattccctacatagtaaccagtaagatcatttaaaaacacaaatcaaatcttgtcactcctctgtatacaactgcctgtggctttctactgtactttcaacaaaatccaagctctttcccatgatatttgtgatccagaccttgaccatctctctaaacacatctcta

SEQ ID NO: 23211 - DNA, 606 bp, Homo sapiens
ttttttttcccacataaacttttaatcaaaccactcaggtaatagcttatttatggacrttttcatcctgggaatattattcctaaagcagaaactcagtactccagaacaactgaccagcttcggattgatcattctagaaactactaaaaagaaataattacaatccggctttattttcttcatgaactcaccgtggcatcttccatttagatactaataaactcatattctataatgcgtttattagtatttaattccttagatatatatattacagaaactgtagaaaatagaataaaatggattattacactactctaatactactattatgatttttcagtgtttcttcttgtgctctattgtgtaagtataatatcttaaggtttttaaagtcttagagataaacttaggaacaatctatattctcaccattataacataattagtatttagagtaaaattaatacaaattttgggctaaatgtttcctttctttttttaaagtaagcattttaatgcaattagcacatatgcaatttcatatactactttttaatattatatgtgattacatggtatttgtaactatcattttcaggt

SEQ ID NO: 23212 - DNA, 820 bp, Homo sapiens
gttcatttcctagggctgctgtaccaaattaccacaatcttggtggcttaaaaccacagaaatttattctcttactgttctggaagccagaagtttgaaagtcagggtgttggctgtctctgggagagagtctgtcccggcttcttgtggctgccaacaatccatccttggctttccatggttacagccgcatcactccagtagctgcctccatcttcacattgctttcccctctgtgcatgtgtcaaatttccctctgcctctctaaggatacttgaggtgacatctagagcccacttgtataatstacataatctcataatctcttcctttcaaaaccttcaatttaattatatctgcaagggcttcttcttcaaatatgttatgattttcaggttctggggatcaggacatggacatatatttgggaggccattttgcaacctaccacggaggcacattgactcaagcattaggagacttggatcaagttctcacttagctacgagctcctcggtcccaggaagaggcagcaagggtgtttaaaccaggagtcaggcctatttcctcacccctcagaacttcagtgtcctcagctgttagtgggatatacctgtatacttcctaggcgtattataaaattaaatgagataaaacttgtggtgcacttagcacaagtgaatatcaagtaaatattggcttactgttatatatttttactactgctgtgttgctgccactgttatcatgttccttctctttgagtcttattgtcaaatgaagtgattaaggctaactctggcccaagaattgtcaagga

SEQ ID NO: 23213 - DNA, 559 bp, Homo sapiens
ccatggcttcccaatgtgctagattacaggtgtgagccactgtgcccggcctgacttgtgtatgttaaaccaaccctgaatccctggtatggagcccacttgatcatggtgtattatctttttgataygctgttgaatttggttagctagtattttgttgaggatttttgcattgatgttcataagagatatttataaatatgtgtatgaaaagtttcagacacttgtttgtttcccactgaaatgttggttccaacagatctactgcattcccagtagtgttccgtggtattgatattctagagtttagaaatcatttcccatgtagatgaacactgaagttgttcccaggatgttactattcaagcaatactagcatgaacttttttttattgttatattaaattctggggcgcatgtgcaggatgtgtaggtttgttaaataggtaaatgtgtgccatggtggtttgctgcacctatcaacccatcatctaggtattaagcccagcatgcattagttatttttcctgatgctgttcctcccactgtccccagaacg

SEQ ID NO: 23214 - DNA, 559 bp, Homo sapiens
ccatggcttcccaatgtgctagattacaggtgtgagccactgtgcccggcctgacttgtgtatgttaaaccaaccctgaatccctggtatggagcccacttgatcatggtgtattatctttttgatatgctgttgaatttggttagctagtattttgttgaggatttttgcattgatgttcataagrgatatttataaatatgtgtatgaaaagtttcagacacttgtttgtttcccactgaaatgttggttccaacagatctactgcattcccagtagtgttccgtggtattgatattctagagtttagaaatcatttcccatgtagatgaacactgaagttgttcccaggatgttactattcaagcaatactagcatgaacttttttttattgttatattaaattctggggcgcatgtgcaggatgtgtaggtttgttaaataggtaaatgtgtgccatggtggtttgctgcacctatcaacccatcatctaggtattaagcccagcatgcattagttatttttcctgatgctgttcctcccactgtccccagaacg

SEQ ID NO: 23215 - DNA, 559 bp, Homo sapiens
ccatggcttcccaatgtgctagattacaggtgtgagccactgtgcccggcctgacttgtgtatgttaaaccaaccctgaatccctggtatggagcccacttgatcatggtgtattatctttttgatatgctgttgaatttggttagctagtattttgttgaggatttttgcattgatgttcataagagatatttataaatatgtgtatgaaaagtttcagacacttgtttgtttcccactgaaatgttggttccaacagatctactgcattcccagtagtgttccgtggtattgatattctagagtttagaaatcatttcccatgtagatgaacactgaagttgttcccaggatgttactattcaagcaatactagcatgaacttttttttattgttatattaaattctggggcgcatgtgcaggatgtgtargtttgttaaataggtaaatgtgtgccatggtggtttgctgcacctatcaacccatcatctaggtattaagcccagcatgcattagttatttttcctgatgctgttcctcccactgtccccagaacg

SEQ ID NO: 23216 - DNA, 804 bp, Homo sapiens
ctggtgacagccccgttyccattcacactggaacctcaccaccatccctgagtgtctgctctgagtatggcactgtccagatgctgtggacatagaagggaagaagacatggaggggacagttaatagacatgaaaacaaatagcacctatgtgaagtcagcatgtttgcctacaaggaaaacaaaatggtgatgtggatggggtggggggctgcacctgatgatgagtcccgtgtgtcctgtgacatcctggccaccacatctgtgggagggtaactgcaagaccagagaccctccgtggatattcctgaaggttcatccccggccttcacggtctgtctgcagggcgccttctgacgccacctccagccgccatccaccagacgccagcttccccgctgccctgaacttcctccagcgcaccaggccttcctctgtcctgtctgaggatttgctcatgcaacgtgctgtggccaaacaccctgccctcctcccttcgcagatgtcttcctctcctttaaggcctggctcaggtgtcgtcttggtggcttcgggtgtcagctgctctgttttgctcacgcacctgcttgtgcttctgttgttgcctcctctccctggctgggctcgagctgcttcagggcaggaaccacgtctttacagtttgatgttcccagagctgacccagtgtttggcataggggtgtgctcaatacaatcgagttgacatgaatgagcagatgctgcctcgttgcagtctggtagtataattccaggctgcgcatgtggacctcgacttctggccctg

SEQ ID NO: 23217 - DNA, 804 bp, Homo sapiens
ctggtgacagccccgtttccattcacactggaacctcaccaccatccctgagtgtctgctctgagtatggcactgtccagatgctgtggacrtagaagggaagaagacatggaggggacagttaatagacatgaaaacaaatagcacctatgtgaagtcagcatgtttgcctacaaggaaaacaaaatggtgatgtggatggggtggggggctgcacctgatgatgagtcccgtgtgtcctgtgacatcctggccaccacatctgtgggagggtaactgcaagaccagagaccctccgtggatattcctgaaggttcatccccggccttcacggtctgtctgcagggcgccttctgacgccacctccagccgccatccaccagacgccagcttccccgctgccctgaacttcctccagcgcaccaggccttcctctgtcctgtctgaggatttgctcatgcaacgtgctgtggccaaacaccctgccctcctcccttcgcagatgtcttcctctcctttaaggcctggctcaggtgtcgtcttggtggcttcgggtgtcagctgctctgttttgctcacgcacctgcttgtgcttctgttgttgcctcctctccctggctgggctcgagctgcttcagggcaggaaccacgtctttacagtttgatgttcccagagctgacccagtgtttggcataggggtgtgctcaatacaatcgagttgacatgaatgagcagatgctgcctcgttgcagtctggtagtataattccaggctgcgcatgtggacctcgacttctggccctg

SEQ ID NO: 23218 - DNA, 813 bp, Homo sapiens
agcagtcccactcctaagtatgtgctcaaggaaaagtaagagtttagatcatacaaagccaacatttccagcagctttactccatttcaccaaacccagaaacaayacagatgtccttcaaccagtgaacgaataaacaagtcccagagcagccgtgcctggagcatcactcagcaacgaaaagcagcgctgcgattcacacagccacgcggtgagtcccaaatgcacctccatgagccaaagatgccatatttgtatgacgttctggaaaaggcaaaatcaccagacagaaagcatgctggggtggccagggaggggagtctggggtggtggggccgcaagtcagccccaggcatgtgaaaatgcgcagctgcacagcagaagggcaaatgaggctgtatagacagttttttttaatcaaccagaatgaaaaagactcaaaatgaaacaccagctctaagcggtaaacctaagggaaccacaaacaaagaacacaacaccaggcagtgggaaacacaacggcacccacggtgctgagaaaacgccacttccactgggaacggtaggccaaggacagaacggcctgtccacagacactgcaccctcgcaagtcaacctctcctcacagagccatggattagcaattccagaaagaccctgtgcgcacgtgaggactggatgggtaagtaaaacatggtgtgtgctgacacctgggcttctcaagaccaaggagacagcacaggaggcgaggacagcccaggggtgctggatggagccagtgtcagggtgtccaccgaggggccctggggccct

SEQ ID NO: 23219 - DNA, 813 bp, Homo sapiens
agcagtcccactcctaagtatgtgctcaaggaaaagtaagagtttagatcatacaaagccaacatttccagcagctttactccatttcaccaaacccagaaacaatacagatgtccttcaaccagtgaacgaataaacaagtcccagagcagccgtgcctggagcatcactcagcaacgaaaagcagcgctgcgattcacacagccacgcggtgagtcccaaatgcacctccatgagccaaagatgccayatttgtatgacgttctggaaaaggcaaaatcaccagacagaaagcatgctggggtggccagggaggggagtctggggtggtggggccgcaagtcagccccaggcatgtgaaaatgcgcagctgcacagcagaagggcaaatgaggctgtatagacagttttttttaatcaaccagaatgaaaaagactcaaaatgaaacaccagctctaagcggtaaacctaagggaaccacaaacaaagaacacaacaccaggcagtgggaaacacaacggcacccacggtgctgagaaaacgccacttccactgggaacggtaggccaaggacagaacggcctgtccacagacactgcaccctcgcaagtcaacctctcctcacagagccatggattagcaattccagaaagaccctgtgcgcacgtgaggactggatgggtaagtaaaacatggtgtgtgctgacacctgggcttctcaagaccaaggagacagcacaggaggcgaggacagcccaggggtgctggatggagccagtgtcagggtgtccaccgaggggccctggggccct

SEQ ID NO: 23220 - DNA, 813 bp, Homo sapiens
agcagtcccactcctaagtatgtgctcaaggaaaagtaagagtttagatcatacaaagccaacatttccagcagctttactccatttcaccaaacccagaaacaatacagatgtccttcaaccagtgaacgaataaacaagtcccagagcagccgtgcctggagcatcactcagcaacgaaaagcagcgctgcgattcacacagccacgcggtgagtcccaaatgcacctccatgagccaaagatgccatatttgtatgacgttctggaaaaggcaaaatcaccagacagaaagcatgctggggtggccagggaggggagtctggggtggtggggccgcaagtcagccccaggcatgtgaaaatgcgcagctgcacagcagaagggcaaatgaggctgtatagacagttttttttaatcaaccagaatgaaaaagactcaaaatgaaacaccagctctaagcggtaaacctaarggaaccacaaacaaagaacacaacaccaggcagtgggaaacacaacggcacccacggtgctgagaaaacgccacttccactgggaacggtaggccaaggacagaacggcctgtccacagacactgcaccctcgcaagtcaacctctcctcacagagccatggattagcaattccagaaagaccctgtgcgcacgtgaggactggatgggtaagtaaaacatggtgtgtgctgacacctgggcttctcaagaccaaggagacagcacaggaggcgaggacagcccaggggtgctggatggagccagtgtcagggtgtccaccgaggggccctggggccct

SEQ ID NO: 23221 - DNA, 471 bp, Homo sapiens
tgcctgcggttctctgtcaatctgaaggacaaatattaggttacagaatttggtccaagtctaaaagaagaatcctacaaatgtcatcacaagaattctggaaaytcgaacacctgaaactgcatgacacctttggcttctacgtaggacaaggttatggacttttgatcatttgatatatactggaacgtcttcaaaagagtgctaagtaatacaatattttaagaatagaaatcaatagtaagaaggcgatgggaacactgttgtggggaggcctggctccactgaccactccagcagtgcaggtcaccgtgatcaggaagcggtaatgatggaacaaatcacagcactcagagggctcctccccttcatgttaccatttgagctccccaccatgcaagtccacacctcacatgcgtaagaacccgcaaaaactaagagactgagaagagaaaagcagcacagcatgct

SEQ ID NO: 23222 - DNA, 510 bp, Homo sapiens
ttttttgagacagagtcttgttctgtcgccaggctgaagtgcagtggcacaatctcggctcactgcaacctctgcctcccaggttcaagcgattcccctcctcagcctccctagtagctgggactagagatgggcgccaccatgcccggctaattttttgtattttagtagagacggggtttcatcatgttgaccaggatggtcttgatctcctgacctcgtgatccgcccacctcgacctcccaaagtgctgtgattacaggcgtgagccaccacrcccagccagatgtaattaattgtgttatttctttattttagaacatttaggtttttttttttttgagatagagtcttcctttgtagcccaggatggagcctgatctcggctcactgcaacctctggcttgcgggttcaagcgattctcccgcctcatactcctgagtagctgggactacaggcatgcgccaccacatccagctaatttttgtatctttagtagggacaaggtt

SEQ ID NO: 23223 - DNA, 540 bp, Homo sapiens
attatagtagggacttccagcgctcaccaagatctggtttttctctacttctaggcagaatgaaaaaatgcatgtcttaccccctcacacrtagggtcatgagacgttttttggccaataataattgaaaattattattaaaaattgaaaataagttagataaactcatcataaattttgaaaataagtagaaaaggaaactattaaattctcatctatttgaatgtacatatttatgaagggaataaaattaagatgggatttaaagaataagtatgttaatctgcttgatagtggtgatcatttcacaatgtacacatgtatcaaaaacatcaaatcctatgccttaaatacatgcagttttatttgtcaactttactcagtaaagctgacaagaagaatcagttgttgagatgagatggagtaaagaaaagtatatttcaggttttgaaataacataaaataattaacatcccttcatgttaaaaactctcaatgaactaggtattgaaggaacataactcaaaataataagtgcca

SEQ ID NO: 23224 - DNA, 606 bp, Homo sapiens
aatagaaagaaagagaataaattcagatgccttgtgaatgccttttctggattccagacagagggtgttttttcggtctctctccctacctaactcaaagtgagctcttcctattttgaagctaaggaacacagtatttctaacttgtgctggattcttgatttccttccttgaacctttctgtgcttccctgagtaatgacttccagccatttgaaaatctgccctgaattttttcaagggactctggtcacagtaaagtataagaaggacacatttcaatggaacctaacagcctagaaagataccaataagccagggctgctgtcgcaaccaggcgggacaaactgcaggctggaatgagggggaaccaccatgaaacgcaaggcccaacaggagaccyggcgcctgttcttaaaaatactttccctaaagccccaggggaagaagaatatcacgtgaatccaaaagagcagaccctcagggaaaagagaaacccagcaggcaggcaaagttaagagccagtgttgagtgaggatgctggctccggccaggggtcagaaagccccccaaaaggagcagcccagaggcccccgaacagcctaga

SEQ ID NO: 23225 - DNA, 842 bp, Homo sapiens
cctcctttycctcccactcactctctcattcagttttaccttttaagatatttctcaatctccacctcccaccacatggaaatttagcacatgataaaaacagcatttcaaactagcaaggaaaagaaaccgtgctggaataagtggctatccatctatgaaaaataaatacttaagtcagatctatacataacaatgaattccagatggattaactaagtacataaataactacaaaagcaccaggaagaaatacaggagggtttggttttttttgtttttatttttttatttttttgtttgttttgttttaatcagacagtgccagaagaaggagaacattttttgtaatttggggataagaaggactttcataagacatgaaattcataaactataatgaaaaatatcaaaagatttgattacagtaaaagacaccataaagtaaaaaaagggaatgctaggccgggggcggtggctcacacctgtaatcccagcactctgggaggccgaggcgggcggatcacctgaggttaggagttccagaccagcctggccaacgtggtaaaaccctgtctctactaagaatataaaaattagctcggcgtggtggaacatgcctgtaatcccagctactcaggaggctgaggcaggagaatcacttgaacccgggagtcagagggtgcagcgagccaagatcgtgccactgcactccagcctgggcaacaaaagtgaaactccatctcaaaaacaacaaaaaagtgaatgctaaagtaggagttttgcaatatttaaagcacagatagagttacctgctaattattatccctaatatacaaaag

SEQ ID NO: 23226 - DNA, 842 bp, Homo sapiens
cctccttttcctcccactcactctctcattcagttttaccttttaagatatttctcaatctccacctcccaccacatggaaatttagcacatgataaaaacagcatttcaaactagcaaggaaaagaaaccgtgctggaataagtggctatccatctatgaaaaataaatacttaagtcagatctatacataacaatgaattccagatggattaactaagtacataaataactacaaaagcaccaggaagaaatacaggagggtttggttttttttgtttttatttttttatttttttgtttgttttgttttaatcagacagtgccagaagaaggagaacattttttgtaatttggggataagaaggactttcataagacatgaaattcataaactataatgaaaaatatcaaaagatttgattacagtaaaagacaccataaagtaaaaaaagggaatgctaggccgggggcggtggctcacacctgtaatcccagcactctgggaggccgaggcgggcggatcacctgaggttaggagttccagaccagcctggccaacgtggtaaaaccctgtctctactaagaatataaaaattagctcggcgtggtggaacatgcctgtaatcccagctactcaggaggctgaggcaggagaatcacttgaacccgggagtcagagggtgcagcgagccaagatcgtgccactgmactccagcctgggcaacaaaagtgaaactccatctcaaaaacaacaaaaaagtgaatgctaaagtaggagttttgcaatatttaaagcacagatagagttacctgctaattattatccctaatatacaaaag

SEQ ID NO: 23227 - DNA, 842 bp, Homo sapiens
cctccttttcctcccactcactctctcattcagttttaccttttaagatatttctcaatctccacctcccaccacatggaaatttagcacatgataaaaacagcatttcaaactagcaaggaaaagaaaccgtgctggaataagtggctatccatctatgaaaaataaatacttaagtcagatctatacataacaatgaattccagatggattaactaagtacataaataactacaaaagcaccaggaagaaatacaggagggtttggttttttttgtttttatttttttatttttttgtttgttttgttttaatcagacagtgccagaagaaggagaacattttttgtaatttggggataagaaggactttcataagacatgaaattcataaactataatgaaaaatatcaaaagatttgattacagtaaaagacaccataaagtaaaaaaagggaatgctaggccgggggcggtggctcacacctgtaatcccagcactctgggaggccgaggcgggcggatcacctgaggttaggagttccagaccagcctggccaacgtggtaaaaccctgtctctactaagaatataaaaattagctcggcgtggtggaacatgcctgtaatcccagctactcaggaggctgaggcaggagaatcacttgaacccgggagtcagagggtgcagcgagccaagatcgtgccactgcactccagcctgggcaacaaaagtgaaactccatctcaaaaacaamaaaaaagtgaatgctaaagtaggagttttgcaatatttaaagcacagatagagttacctgctaattattatccctaatatacaaaag

SEQ ID NO: 23228 - DNA, 537 bp, Homo sapiens
tgctgcctcaatctttgtcagtaatcatgatctgtttcttttgtaggcagaatccagagaccacatttgaagtatatgttgaagtggcctatcccaggacaggtggcactctttcaggtactttgcatgtttgattatgatatggtgtgttacttattgtttgagatagctatgcacgtgagataatatgtgaatatgagtaaattgttatttgtctttaagtatgtttaagtgcctttttccttttattcatgcycacattatcctaggaagaatggagaatgaaaacacagtgaatagtctgaattaagagttcaagcataataggcttgaagtatggctttattcattgtaatcattgggtcttggtttgcatctttcacagatgcctggaagtcaactatttagtgtgaaatattgtcaccttgctaatgagcagggcttcacctctagtctaccaatctaatggtagaattagattataggatacaaaataatataaaggaaattctctgccactaatctagaaggagatgc

SEQ ID NO: 23229 - DNA, 558 bp, Homo sapiens
tggccactcctcctcaccccctctgctggacctctgagcgtaggtggcctggagctgggtcctgagccctctttggtctatacygacactacccaatatggtagccaccagtcacgctggacacttgaaaagtggccgatcctgactgagaagggccacgagtgggaaaaacacaccagacctcagtgacttaggcagaagtatgttttgttccagactattgactgagcccgcagctgagttggctccagcaccctggccccctgctccatccactcactgggactccccactgcacagggcaacctctccaggggcacttgggctgcgaaggggagagtgggtggcatcccaggctgaagcttcctgagcagggccagaggaggagccagtccctgtgggcctctgttctgacagtgtcaacctcagccaggcttgtgtgggccaggtgtactgttctggttcagatttcaaggagatagtcagggcaggccgcgccaaagccctccgatgggctcccctactgcctggcagacctgtccagctttggactctggc

SEQ ID NO: 23230 - DNA, 1111 bp, Homo sapiens
cttttctaacttgctggttgtttagatagaggaaccaattcctgaagtttcctacgttgccagcttcatgaggatcattccctagtaactcttttcagacaaaaagcttcattgatttactgtaggactagcatcaaagagtctatgccacctagtctgtctccttaaaacacagaaataatcagtatgcattggggtaggagtttggcattagatctgccrtaaatcaagagctggggacagcccatgtcttaaactctgacccaagggctaaaatatcctttggtagcaacaacagctacaaactattgaacaacttgtatgtgccaagagccttacctgcattatcccattgaatcctctcaacagccctgtgaggtagtagaattgttgcctgccccttactgaggcctagaaacattaaggaatttgcccgaggccctagagccagtgagtggcaaagccagtctccagactcaggctggagatcctacagttctgtgttaccccagtgttatcctgcctctcagcacagagtcttggatgattctcctaacccctccctaggcaatgcacagggctgctccctgcacccttactcatgctctgctcttcaaccccaacagtgctggccttaggctttatccctgacacccagccccaggctccattccatctgttgacagaggcaaacactggggcaaaactgacctctgtggataccactgtgtccacctccaccagcttcagctgaagcctctgaacatctccagcatggaagaagccccaaaggatatttcctgtcccccagcatatgcttgaccctgaagccctccccatctagtcaagaagaccaaactgttaacaatcctggagtcagagtgacccatgggtgaatcttagccaagtcactcatagctgttgcatcctagtaaatcccttaactcccataggcttcagtttccctgcatataaaatgacagccttcagctcatcggccagtttcaatccatctaaagggtctagcacatcccctggcatgtggaagccacagggcacacactagttgtggtcatttgatcctggcatgctctgctgtctctcggctctc

SEQ ID NO: 23231 - DNA, 861 bp, Homo sapiens
ctaaataaatgcctaaacctgaattatcagaaagaaaaaatagttttttcagattcctgatcaaaaaatctacgatgcacagaatacatatagtacctcaacagtgctagctggaaatccttttttgaggggtctgcaactctgaagaggatagggaagaatacgatatgaaggctgcttactgctccaaaagagtcagaccctaatcttaaatgagtctaagtttgagggcaattttatctgggaagctcagacttcaacagtgggcacagaattctgcataaataggaaaaggaagaggtgggaaagagagaacaagctagaggaggagtagggtcccagtagaaaggagaaagctgggtgctatgtgaggtgaggcatggcagccaggccagcacacgcacagaagttggagggtcttcttaccttgttctttgacagaagctctagtgcctttcgatgagcgctccacaatcagttgactcgtgaaggtcatgaattcctgaacgctaagaaacacaaaatgtatttattgcctacttcttatcaccttgtccccaacacagtggaaagtgacctctgggcttatacattaagtagacattgcttcttggtttcattcctttccctcccatccctagtaacaaacactctataaatgagcacaaatactgataattatgaattatcatcaccatgaaagctccatctgtttgctacctrgctcaccaaaacaggtgaattttctggggggtttttccacaggatacagtcaattttacattttggtgaatgcataatttggaatgcaatggaaaaacaagaggcaggtcctgctctcaaggtcccaataacttccaa

SEQ ID NO: 23232 - DNA, 2082 bp, Homo sapiens
ttttacactcattgagtcaggcatcatcatacatgctagagtaagcaataatgtttttcttctggaaactctttagggaactatttaagtgcttattgttaacgtgtcttaaatcttacagagtagctttgagattgaggtctaaaaacatcaacagcaagataataccacacagaactcccatctcacaggtctctggatctcaaactatgcaaaactaaaaactaagcaacattctatggatccaacacttccattatgcttaatgtttgtcaacgttgttttaaataattggtctactccattttcaggaatctatcggtaggtcttttattttcttcacagattacttaatatcatggaaaatatcctcttatatactgtttaagctgcacactattcaattgtataatcttactgcagtcagagctgcaggagtctctccccaaatgtggggctatgctcctagaaattagcatggttgagaaaaaaaaatctgtctgtgtttggcaagaacaacgtatcataaaataggaggtttggtgggaagtaataaaggcgttacatatataagtgcacctacacacgcagagaaatttagtttcagaaggcagctgcttccaaaacgaacaagacataattcatgttacaaaccaggttctaccagtaactgtcctctttaaccaccttatatttttcagaaaaacttggtgtacttttattttcttccaaggcagaatctccaaaaattttggtattatgtaactctatcactttaagcattttattaaaactagtccttgctggatttaaatgccatgcccttttccttgaaatgcctccttctccccagtcccttaacaccctttcactaatttccgtttttcagattttagcaaattgcttatatcctcaagcaaattgcttgagaaaatgtccacatgacattttctcaaaattgcagttggcctttgaacaacrcgaggtgttggggtggcagtctcccccgctgtttaaaatccatgtataattttgactccccagaacttaaatactaatagcttactgtggacaagaagccttatcgataatataaatagttgattaacaaatattttaatgttacatgcatcgtatactgtatttgtaaaatacagtaatctagagaaaagaaaatgttcttaagaaagttataaggaacagaaaacatatttactagacaataagtggaagtgggccacagtaagtcttaattctccttgtcttcacatggtgtaggctgaggaggaggaggaagaggagaggttggtctcactatctcagaggtggcagagaaagaaaatccatgtacaagcggatccatgcagtaccaaccctgttgttcaagagttaactgtagtataatgcataggcactttttcttgccctgctcttctagccattcttaccaacacaacatcatggtttgcgctacactgagcatatttaaaaatgactgaggacttaaacgtttgtgatacaaatccagtgctatatcatctcagcactatttctggaaaaacaagttgctgaactaaaagtgggaattcacccaaaagtcttgtgaaatctattcatgggtctagtgtgatctaccagatgaggctagtgtgattctgtgtgttcgttttattgaaatgcaatgtgaaggtggttttatggagctctaagaggacatcttggtcttagaagtgtacagcatggactctgactcaaatgctgcttagctggccttcttctggggacttgtgtatatacagagacaaacagcagacaaaagccaagacagacagaaatgcccatgagtgatttcttgcctgaggcctgttcagagctgggaatggaggctttcttcttactttatgcgccccctggtaccacctaggtgaagatagcaggaaggcaagatcaccttaaaacttctggatttaacccgttcaggacagtagtccacataaacattggcaaaaatatcattttcatgtatgctttgcaacctgtgacatcaattcgtgggattagataaagtggactgaaattgca

SEQ ID NO: 23233 - DNA, 2082 bp, Homo sapiens
ttttacactcattgagtcaggcatcatcatacatgctagagtaagcaataatgtttttcttctggaaactctttagggaactatttaagtgcttattgttaacgtgtcttaaatcttacagagtagctttgagattgaggtctaaaaacatcaacagcaagataataccacacagaactcccatctcacaggtctctggatctcaaactatgcaaaactaaaaactaagcaacattctatggatccaacacttccattatgcttaatgtttgtcaacgttgttttaaataattggtctactccattttcaggaatctatcggtaggtcttttattttcttcacagattacttaatatcatggaaaatatcctcttatatactgtttaagctgcacactattcaattgtataatcttactgcagtcagagctgcaggagtctctccccaaatgtggggctatgctcctagaaattagcatggttgagaaaaaaaaatctgtctgtgtttggcaagaacaacgtatcataaaataggaggtttggtgggaagtaataaaggcgttacatatataagtgcacctacacacgcagagaaatttagtttcagaaggcagctgcttccaaaacgaacaagacataattcatgttacaaaccaggttctaccagtaactgtcctctttaaccaccttatatttttcagaaaaacttggtgtacttttattttcttccaaggcagaatctccaaaaattttggtattatgtaactctatcactttaagcattttattaaaactagtccttgctggatttaaatgccatgcccttttccttgaaatgcctccttctccccagtcccttaacaccctttcactaatttccgtttttcagattttagcaaattgcttatatcctcaagcaaattgcttgagaaaatgtccacatgacattttctcaaaattgcagttggcctttgaacaacacgaggtgttggggtgrcagtctcccccgctgtttaaaatccatgtataattttgactccccagaacttaaatactaatagcttactgtggacaagaagccttatcgataatataaatagttgattaacaaatattttaatgttacatgcatcgtatactgtatttgtaaaatacagtaatctagagaaaagaaaatgttcttaagaaagttataaggaacagaaaacatatttactagacaataagtggaagtgggccacagtaagtcttaattctccttgtcttcacatggtgtaggctgaggaggaggaggaagaggagaggttggtctcactatctcagaggtggcagagaaagaaaatccatgtacaagcggatccatgcagtaccaaccctgttgttcaagagttaactgtagtataatgcataggcactttttcttgccctgctcttctagccattcttaccaacacaacatcatggtttgcgctacactgagcatatttaaaaatgactgaggacttaaacgtttgtgatacaaatccagtgctatatcatctcagcactatttctggaaaaacaagttgctgaactaaaagtgggaattcacccaaaagtcttgtgaaatctattcatgggtctagtgtgatctaccagatgaggctagtgtgattctgtgtgttcgttttattgaaatgcaatgtgaaggtggttttatggagctctaagaggacatcttggtcttagaagtgtacagcatggactctgactcaaatgctgcttagctggccttcttctggggacttgtgtatatacagagacaaacagcagacaaaagccaagacagacagaaatgcccatgagtgatttcttgcctgaggcctgttcagagctgggaatggaggctttcttcttactttatgcgccccctggtaccacctaggtgaagatagcaggaaggcaagatcaccttaaaacttctggatttaacccgttcaggacagtagtccacataaacattggcaaaaatatcattttcatgtatgctttgcaacctgtgacatcaattcgtgggattagataaagtggactgaaattgca

SEQ ID NO: 23234 - DNA, 2082 bp, Homo sapiens
ttttacactcattgagtcaggcatcatcatacatgctagagtaagcaataatgtttttcttctggaaactctttagggaactatttaagtgcttattgttaacgtgtcttaaatcttacagagtagctttgagattgaggtctaaaaacatcaacagcaagataataccacacagaactcccatctcacaggtctctggatctcaaactatgcaaaactaaaaactaagcaacattctatggatccaacacttccattatgcttaatgtttgtcaacgttgttttaaataattggtctactccattttcaggaatctatcggtaggtcttttattttcttcacagattacttaatatcatggaaaatatcctcttatatactgtttaagctgcacactattcaattgtataatcttactgcagtcagagctgcaggagtctctccccaaatgtggggctatgctcctagaaattagcatggttgagaaaaaaaaatctgtctgtgtttggcaagaacaacgtatcataaaataggaggtttggtgggaagtaataaaggcgttacatatataagtgcacctacacacgcagagaaatttagtttcagaaggcagctgcttccaaaacgaacaagacataattcatgttacaaaccaggttctaccagtaactgtcctctttaaccaccttatatttttcagaaaaacttggtgtacttttattttcttccaaggcagaatctccaaaaattttggtattatgtaactctatcactttaagcattttattaaaactagtccttgctggatttaaatgccatgcccttttccttgaaatgcctccttctccccagtcccttaacaccctttcactaatttccgtttttcagattttagcaaattgcttatatcctcaagcaaattgcttgagaaaatgtccacatgacattttctcaaaattgcagttggcctttgaacaacacgaggtgttggggtggcagtctcccccgctgtttaaaatccatgtataattttgactccccagaacttaaatactaatagcttactgtggacaagaagccttatcgataatataaatagttgattaacaaatattttaatgttacatgcatcgtatactgtatttgtaaaatacagtaatctagagaaaagaaaatgttcttaagaaagttataaggaacagaaaacatatttactagacaataagtggaagtgggccacagtaagtcttaattctccttgtcttcacatggtgtaggctgargaggaggaggaagaggagaggttggtctcactatctcagaggtggcagagaaagaaaatccatgtacaagcggatccatgcagtaccaaccctgttgttcaagagttaactgtagtataatgcataggcactttttcttgccctgctcttctagccattcttaccaacacaacatcatggtttgcgctacactgagcatatttaaaaatgactgaggacttaaacgtttgtgatacaaatccagtgctatatcatctcagcactatttctggaaaaacaagttgctgaactaaaagtgggaattcacccaaaagtcttgtgaaatctattcatgggtctagtgtgatctaccagatgaggctagtgtgattctgtgtgttcgttttattgaaatgcaatgtgaaggtggttttatggagctctaagaggacatcttggtcttagaagtgtacagcatggactctgactcaaatgctgcttagctggccttcttctggggacttgtgtatatacagagacaaacagcagacaaaagccaagacagacagaaatgcccatgagtgatttcttgcctgaggcctgttcagagctgggaatggaggctttcttcttactttatgcgccccctggtaccacctaggtgaagatagcaggaaggcaagatcaccttaaaacttctggatttaacccgttcaggacagtagtccacataaacattggcaaaaatatcattttcatgtatgctttgcaacctgtgacatcaattcgtgggattagataaagtggactgaaattgca

SEQ ID NO: 23235 - DNA, 1144 bp, Homo sapiens
gtggcttcattcttgaagtcagtgagaccaagaacccaccaattccggacacactgtgagtcaggatcagtcttattatagctaattagagcaaccccattgctaaagagtttagagcctgggtcagacttcatggtagcaaagcaatgttttattgtaatagtgtaattaggaatgtgtggcaatattttaacccctcctcccaagagttccacaatgctttcttaacatgtttataaatatttgcttttgtgccattttaggggagctttccgtacaaacatttggcttttaatgagtcatccacactctgattcatacccataagcttcctgctttgttatcagtgaataytgggctcagtaactgccttacttttataatttacatgaatgaatatggaaaaggtggtggaggtagaaagacatattcaggtaaatataaaaacaccctggtttctttacaagagattgacaaatacggcccaataccctatcatttaaagtaagtgccagaattgtgatggatttgtgtttggccttaaaaaaaaataaaaataaaaataaaaacaaaaacacttggataattctacctgatgttacatttttctttttttttttcttttctttttttttttttttttttgagatggagttttcctctgtcacccaggctggagtgcagtgacgtgacctcagctcgctgcaacctctgcctcccagattcaagcaattctctctcaaattgctcagaagctgagcaattctgcctcagcttcccaaatagctgggattacaggtgcgtgccaccaggctcagctaatttttgtatttttagtagagatggggtttcaccatgttggccaggctggtcttgaactcccgacctcaggtgatacgcccgcctcggcctcccaaagtgctgggattacaggcatgagccactgcgcccagcctgatgttccatttttctaatcaccaagtgtatttattagctaagggtatcccagaaattaaattaccaacataaaattttacttgtgctattataatttagctattaaatcctaaaattatcaactgaaagctactggaaaaataaatacttctctttcttttctccatattgaaagtaaagagaatga

SEQ ID NO: 23236 - DNA, 1144 bp, Homo sapiens
gtggcttcattcttgaagtcagtgagaccaagaacccaccaattccggacacactgtgagtcaggatcagtcttattatagctaattagagcaaccccattgctaaagagtttagagcctgggtcagacttcatggtagcaaagcaatgttttattgtaatagtgtaattaggaatgtgtggcaatattttaacccctcctcccaagagttccacaatgctttcttaacatgtttataaatatttgcttttgtgccattttaggggagctttccgtacaaacatttggcttttaatgagtcatccacactctgattcatacccataagcttcctgctttgttatcagtgaatattgggctcagtaactgccttacttttataatttacatgaatgaatayggaaaaggtggtggaggtagaaagacatattcaggtaaatataaaaacaccctggtttctttacaagagattgacaaatacggcccaataccctatcatttaaagtaagtgccagaattgtgatggatttgtgtttggccttaaaaaaaaataaaaataaaaataaaaacaaaaacacttggataattctacctgatgttacatttttctttttttttttcttttctttttttttttttttttttgagatggagttttcctctgtcacccaggctggagtgcagtgacgtgacctcagctcgctgcaacctctgcctcccagattcaagcaattctctctcaaattgctcagaagctgagcaattctgcctcagcttcccaaatagctgggattacaggtgcgtgccaccaggctcagctaatttttgtatttttagtagagatggggtttcaccatgttggccaggctggtcttgaactcccgacctcaggtgatacgcccgcctcggcctcccaaagtgctgggattacaggcatgagccactgcgcccagcctgatgttccatttttctaatcaccaagtgtatttattagctaagggtatcccagaaattaaattaccaacataaaattttacttgtgctattataatttagctattaaatcctaaaattatcaactgaaagctactggaaaaataaatacttctctttcttttctccatattgaaagtaaagagaatga

SEQ ID NO: 23237 - DNA, 1144 bp, Homo sapiens
gtggcttcattcttgaagtcagtgagaccaagaacccaccaattccggacacactgtgagtcaggatcagtcttattatagctaattagagcaaccccattgctaaagagtttagagcctgggtcagacttcatggtagcaaagcaatgttttattgtaatagtgtaattaggaatgtgtggcaatattttaacccctcctcccaagagttccacaatgctttcttaacatgtttataaatatttgcttttgtgccattttaggggagctttccgtacaaacatttggcttttaatgagtcatccacactctgattcatacccataagcttcctgctttgttatcagtgaatattgggctcagtaactgccttacttttataatttacatgaatgaatatggaaaaggtggtggaggtagaaagacatattcaggtaaatataaaaacaccctggtttctttacaagagattgacaaatacggcccaataccctatcatttaaagtaagtgccagaattgtgatggatttgtgtttggccttaaaaaaaaataaaaataaaaataaaamcaaaaacacttggataattctacctgatgttacatttttctttttttttttcttttctttttttttttttttttttgagatggagttttcctctgtcacccaggctggagtgcagtgacgtgacctcagctcgctgcaacctctgcctcccagattcaagcaattctctctcaaattgctcagaagctgagcaattctgcctcagcttcccaaatagctgggattacaggtgcgtgccaccaggctcagctaatttttgtatttttagtagagatggggtttcaccatgttggccaggctggtcttgaactcccgacctcaggtgatacgcccgcctcggcctcccaaagtgctgggattacaggcatgagccactgcgcccagcctgatgttccatttttctaatcaccaagtgtatttattagctaagggtatcccagaaattaaattaccaacataaaattttacttgtgctattataatttagctattaaatcctaaaattatcaactgaaagctactggaaaaataaatacttctctttcttttctccatattgaaagtaaagagaatga

SEQ ID NO: 23238 - DNA, 1144 bp, Homo sapiens
gtggcttcattcttgaagtcagtgagaccaagaacccaccaattccggacacactgtgagtcaggatcagtcttattatagctaattagagcaaccccattgctaaagagtttagagcctgggtcagacttcatggtagcaaagcaatgttttattgtaatagtgtaattaggaatgtgtggcaatattttaacccctcctcccaagagttccacaatgctttcttaacatgtttataaatatttgcttttgtgccattttaggggagctttccgtacaaacatttggcttttaatgagtcatccacactctgattcatacccataagcttcctgctttgttatcagtgaatattgggctcagtaactgccttacttttataatttacatgaatgaatatggaaaaggtggtggaggtagaaagacatattcaggtaaatataaaaacaccctggtttctttacaagagattgacaaatacggcccaataccctatcatttaaagtaagtgccagaattgtgatggatttgtgtttggccttaaaaaaaaataaaaataaaaataaaaacaaaaacacttggataattctacctgatgttacatttttctttttttttttcttttctttttttttttttttttttgagatggagttttcctctgtcacccaggctggagtgcagtgaygtgacctcagctcgctgcaacctctgcctcccagattcaagcaattctctctcaaattgctcagaagctgagcaattctgcctcagcttcccaaatagctgggattacaggtgcgtgccaccaggctcagctaatttttgtatttttagtagagatggggtttcaccatgttggccaggctggtcttgaactcccgacctcaggtgatacgcccgcctcggcctcccaaagtgctgggattacaggcatgagccactgcgcccagcctgatgttccatttttctaatcaccaagtgtatttattagctaagggtatcccagaaattaaattaccaacataaaattttacttgtgctattataatttagctattaaatcctaaaattatcaactgaaagctactggaaaaataaatacttctctttcttttctccatattgaaagtaaagagaatga

SEQ ID NO: 23239 - DNA, 1144 bp, Homo sapiens
gtggcttcattcttgaagtcagtgagaccaagaacccaccaattccggacacactgtgagtcaggatcagtcttattatagctaattagagcaaccccattgctaaagagtttagagcctgggtcagacttcatggtagcaaagcaatgttttattgtaatagtgtaattaggaatgtgtggcaatattttaacccctcctcccaagagttccacaatgctttcttaacatgtttataaatatttgcttttgtgccattttaggggagctttccgtacaaacatttggcttttaatgagtcatccacactctgattcatacccataagcttcctgctttgttatcagtgaatattgggctcagtaactgccttacttttataatttacatgaatgaatatggaaaaggtggtggaggtagaaagacatattcaggtaaatataaaaacaccctggtttctttacaagagattgacaaatacggcccaataccctatcatttaaagtaagtgccagaattgtgatggatttgtgtttggccttaaaaaaaaataaaaataaaaataaaaacaaaaacacttggataattctacctgatgttacatttttctttttttttttcttttctttttttttttttttttttgagatggagttttcctctgtcacccaggctggagtgcagtgacgtgacctcagctcgctgcaacctctgcctcccagattcaagcaattctctctcaaattgctcagaagctgagcaattctgcctcagcttcccaaatagctgggattacaggtgcgtgccascaggctcagctaatttttgtatttttagtagagatggggtttcaccatgttggccaggctggtcttgaactcccgacctcaggtgatacgcccgcctcggcctcccaaagtgctgggattacaggcatgagccactgcgcccagcctgatgttccatttttctaatcaccaagtgtatttattagctaagggtatcccagaaattaaattaccaacataaaattttacttgtgctattataatttagctattaaatcctaaaattatcaactgaaagctactggaaaaataaatacttctctttcttttctccatattgaaagtaaagagaatga

SEQ ID NO: 23240 - DNA, 517 bp, Homo sapiens
gttcacagtctggagaagtttctccatgataatctggatctgcctctgagttggccccatgtccttcctgtacagcacctccaggatgtggctgagcagctgacagcaggcctccaggttctcctgtctctccagatggtacttgagctgatcagtcatcatgggaagcaggatctctctstagtcatgctgtgtgaagtggatatttaattggggctaacagcatccttctccaactgctgcttgaacataagcttattgtattgcaatgtagtgagcagtcgagatacagcctggtatataaaatgtcctcatttttcaaatgaatgtcaaagttgaagggtaagcaaaccaactttaaagacaaacatttggctcttgttttctcattacttgtggcaaaagacatgtattttctgctaagtcttcattcttctggcagtttctctgtagtgtttacatttaaggtgccattaataaaattttatgaaggaccctaacaagtaattgagatact

SEQ ID NO: 23241 - DNA, 517 bp, Homo sapiens
gttcacagtctggagaagtttctccatgataatctggatctgcctctgagttggccccatgtccttcctgtacagcacctccaggatgtggctgagcagctgacagcaggcctccaggttctcctgtctctccagatggtacttgagctgatcagtcatcatgggaagcaggatctctctgtagtcatgctgtgtgaagtggatatttaattggggctaacagcatccttctccaactgctrcttgaacataagcttattgtattgcaatgtagtgagcagtcgagatacagcctggtatataaaatgtcctcatttttcaaatgaatgtcaaagttgaagggtaagcaaaccaactttaaagacaaacatttggctcttgttttctcattacttgtggcaaaagacatgtattttctgctaagtcttcattcttctggcagtttctctgtagtgtttacatttaaggtgccattaataaaattttatgaaggaccctaacaagtaattgagatact

SEQ ID NO: 23242 - DNA, 529 bp, Homo sapiens
gttagtaccctttggcctctgaaaatttcgctttatgaagagaaggctactaaaagacatgtaggacttagggttcaaggtggcagactagaggagctagtgtgtactgctctcgtggagaggaaatagtgacgagtaaacatggactctctaagtggatcatctaagaaaccacgtcaggattcaggatgcatcaagggagtaatgggacatggagaacagagaaaatcgaagctgggcagctgcctgcctgggaccagcatgaagacaggagaagctcctcaacacagggawagaattagtgagtaagagtcctcaggggatccatacttcccacagtgacctgtgcaatcctgagaatgtgaaaaaccccatgactcccttgggcctctagactgatacagagagctacccagagtttttgcagaggcaacactcaagtccgtggggacccccccaggccctggactctggaacagcctggttgaggtgccatggccctgacagaagctgcagtcatggtgctgga

SEQ ID NO: 23243 - DNA, 511 bp, Homo sapiens
cccattgttactttaacacttcaattatgaagcaatttttatctgtacatatttactgcaagagttttcatttttcctttaagattctttttgttttttctgtaggattcttttcttttcaggattcttttttcgaaagtcctctttatcattccttttaggaaaaaaaaaatgttgtgatttgatttgttgggtctttgaataacatttttacttttttwaaaaaagcatctccataaatatatatacctactatgtacccacaaaaataaaaataaataaaataaaatatgtatctatatcttaaaaaatgtttcaagtctaacattgtctttgtatggtaaaaataagcattgtataattgtacatagaatataaaatctaggcaggaataactgcaatcattttatctgtggcttttaggactattaagttagttccatctgattttgttgttgttgtccattaaatggatctgaggtatgcctcatgtcagattggctgcccaata

SEQ ID NO: 23244 - DNA, 745 bp, Homo sapiens
atcatgtcttcccaacagtccccctaagtcttaattcattccagcattaacccaaaagtccaagtccaaagtctcatctgagacaaagcaagttccttctgcctatgagcctgtaaaatcaaaagcaagttagttacttcctagatacaaggaggggacaggcattgggtaaatatgcccattccaaatgggagaaaattggccaaaacaacggggctacagatcccttgcaagtctgaaatccagcagggcagccaaatctttttttttttttctttttttgagacagagtctccctctgtcaccaggctggagtgcagtggcgtgatcttggctcactgcaacctccacctcctgggttcaagcgattcccctgcctcagcctcctgagtagctgggactgcaggtgcacaccaccacacccagttaattttttttttttttgtatttttagcagagatggggcttcaccatgttggccaggayggtctcgatctcctgacctcatgatccgcccaccttggcctcccaaagtgctgggattacaggtgtgagccaccacgcctggctggcagtcaaatcttaaagttctgaaatgatctcctttgactccacgtctcacatccaggtcatgctggtgcaagaggtgggctcccatggccttgggcagctctgcccctgtggctttgcagggtacagaagactgctaaagagtcagaaggaagaagcaccacaaggagatgat

SEQ ID NO: 23245 - DNA, 745 bp, Homo sapiens
atcatgtcttcccaacagtccccctaagtcttaattcattccagcattaacccaaaagtccaagtccaaagtctcatctgagacaaagcaagttccttctgcctatgagcctgtaaaatcaaaagcaagttagttacttcctagatacaaggaggggacaggcattgggtaaatatgcccattccaaatgggagaaaattggccaaaacaacggggctacagatcccttgcaagtctgaaatccagcagggcagccaaatctttttttttttttctttttttgagacagagtctccctctgtcaccaggctggagtgcagtggcgtgatcttggctcactgcaacctccacctcctgggttcaagcgattcccctgcctcagcctcctgagtagctgggactgcaggtgcacaccaccacacccagttaattttttttttttttgtatttttagcagagatggggcttcaccatgttggccaggacggtctsgatctcctgacctcatgatccgcccaccttggcctcccaaagtgctgggattacaggtgtgagccaccacgcctggctggcagtcaaatcttaaagttctgaaatgatctcctttgactccacgtctcacatccaggtcatgctggtgcaagaggtgggctcccatggccttgggcagctctgcccctgtggctttgcagggtacagaagactgctaaagagtcagaaggaagaagcaccacaaggagatgat

SEQ ID NO: 23246 - DNA, 544 bp, Homo sapiens
ccaggctggagtgcaatggcctgttctcggctcaccacaacctctgcctcccaggttcaagcgattctcctgcctcagcctccgagtaggtgggattacaggcatgcgccgccacgcccggctaattggtttctccatgtcagtcagggtggtctcgaactttcgacctcaggtgatccgctcaccttggcctcccaaagtgctgggattacaggcaggagccaccgcgcccagccgaaatatttcaaagatacagaaaagtacagaaggtactataatacaccccgaatsaagcaattattattttgctatgttttattcagttgttttctcaaagaaatataggatctcagaatcagtggatgcccccctccacccccagctcatgctcttctctgtgccccctcccataaatacctgcccctacatctataaataatgccacctgtttgctgtcaccagaaaatgtggggcttgttctagaacttcacataagtggggccagacagtaggaacccgtctgtgtctggggaacactgaggta

SEQ ID NO: 23247 - DNA, 580 bp, Homo sapiens
ttgtatttttagtagagacggggtttcaccaagttggccaggatggtctctatctcttgacctcgtgatccacatgccttggcctcccaaagtactgggattacaggtgtgagccaccacgcccggcccatkattacaacttctaacacaaacttttacttggccagaggcggacagaaatctgaaatccaaggtcacagggtctgtgttggactcctcttgggtcctttataatgtagagccacctcctgaaacatcttttgcttctctcctgctctcataccctccatggctccccattgcccttagggaacaaagccgaagctcctgagcccatgcccagccctgcggtcctcctctgaggacactcctgccccacgcattccagacaccggctaatctctagattccaaggccctctcccacctcttagctgagttccagtgccacattcttgctgtgtgaccttgcaagctctgttttcttctctgggccagggctgagggggaggaaaagctcaccttcccccagctttgggggaaggaagcccagaggtcccgcggctgttagctgggaggcc

SEQ ID NO: 23248 - DNA, 814 bp, Homo sapiens
gcgccaccacgcccagcaatttttgtatttttagtagagacggggttttaccatgttggccgggctagtctcaaactcctgacctcaggcgatccgcccgcctcggcctcccaaagtgctggggttactggcatgagccaccaagcccggccgggtctaattattttaaaacgcaaacgcttaagtatgagggtgcatacattcatgtttacttagcaaatatgtattcagtcagtgtctatcacattccagggatagtttcaggtattgggaaatcctgtccctgcttacagtttattagaggaggataaaaaaaaaaagataccgtcggtcagatggtgcaaaaatctatagagacacaggatgagaggcaagtttcggggcgtgtgtgaaggtagagaggaggcgacgctattccatgaggggtgcggtgcgcaggacctgtggcgtttgcacacgaaagacagtgggaagggcagatgcaaaagcctggcgcgaggaacgtgctaggccggcatcgggaggccgggtggctggaaaggagcgtgcagacggcagaggggcctaagaacgagctcagagaagaggcagaggtccttggagcccttcttggctccctcgtactccagcagctccccgggcggagccacattcaacatggcggccgcctagggcccgcctgcggacgaacggaagtgcgtgtmggcgggcgccggaagtgacgagagcccgctccttgccggggtctcggttgagcggtggacgcgccggcttcgagcatccctagccgggcaggtgggaggcacggggttgc

SEQ ID NO: 23249 - DNA, 813 bp, Homo sapiens
ttttatataaacattagtaaagaccaaagtaactgatataactacaagattatcattcccccaaagtaaacatgtatttaggggcagctgcttccaggaagccatgtgctcttctggatggaaaataaatcggtggcattcttggttttctgggacttagtcccagtctctacagcctgctttccatctgtctcccagaatcaggacttaacgtctccaacatgtatgaagaagatcagagggcacagcgtgtgcacaaaggggcgggaacttctctgatccactgccatctactccttgatagtcatcaatggccactgtcttggtcagctcggctgccttagcaaaataccagactaggggcttatatatgctgtcagttttcctacagttttggagctagaaatctgaaatgaagttgtcagcagatttcgtttcttgtgaggcccctctccttggcttgcagaggactgtcttcgtgctgtgtcctcacatggtcttttctgtgcactcctctggtgtctctctctgkccttttttttttttttttttttttttgagacggagttttggtctctttgctcaggctagagtgcagtggcacaatctcggctcactgcaacctccgccttccagtttgaagagattctcctgcctcagccttccaaatagctgggattacaggtgcccgccaccgcgcccagctgatttttttgtatttttagtagagacggtgtttcaccatgttggtcaggctggtctcgaactgctgacctcttgatccgcccgccttggcctcccaaagtactggga

SEQ ID NO: 23250 - DNA, 598 bp, Homo sapiens
tagccaggatggtttcactcttctgacctcgtgatccacctgcctcggcctcccaaagtgctgggattacaggcgtaagccactgtgcccgacctgtattttctctttttttcttagtctagctaaaggtttgtcaattttgtttatattttcaaacaaacaactcttttgttgattcttttgaattttttaagtctctatttcatttatttctsctctgagctttattatttcctttcttctaccaattttgggttagtttgtttttgtttgtctagattcttgaggtacattgttaggttattagaaacttttcttttgtgatataggcatttattgctatgaacattcctctaagaactgcttttgctgtgtcctataggttttgatatgatatttttccattctcatttgtcttaagaaaatttttaatattcctattgacccattagttgttgaagagcatgcttaattttaaagaaaagtataattagggttcagagttaaagtcaactgatcagatacttgagtgcaaataaaattcagttctctttttggtatatttgatattttcccattcagagacaaccacagatat

SEQ ID NO: 23251 - DNA, 598 bp, Homo sapiens
tagccaggatggtttcactcttctgacctcgtgatccacctgcctcggcctcccaaagtgctgggattacaggcgtaagccactgtgcccgacctgtattttctctttttttcttagtctagctaaaggtttgtcaattttgtttatattttcaaacaaacaactcttttgttgattcttttgaattttttaagtctctatttcatttatttctgctctgagctttattatttcctttcttctaccaattttgggttagtttgtttttgtttgtctagattcttgaggtacattgttaggttattagaaacttttcttttgtgatataggcatttattgctatgaacattcctctaagaactgcttttgctgtgtcctataggttttgatatgatatttttccattctcatttgtcttaagaaaatttttaatattcctattgrcccattagttgttgaagagcatgcttaattttaaagaaaagtataattagggttcagagttaaagtcaactgatcagatacttgagtgcaaataaaattcagttctctttttggtatatttgatattttcccattcagagacaaccacagatat

SEQ ID NO: 23252 - DNA, 1040 bp, Homo sapiens
ggagaatcgcttgagccagggattcagagattgcagtgagccgagatctcgccactgcactccagcctggagacagagcaagactctgtcttaaaagaaaaaaaaaagtgtgacctgggaattttatcaagtttatctttcagttacctactttgtttttgagttattatttaacactttcaaaaacatttaaaaattcacattcatttattcaaaaatattcatatttgaatacataagggctgtattgggtgtaattatacagaatttataaagcagatttgtatccatgccctcatggagcttacaggaatataaataaaatacttcatgctgtgacaattgtgatgcccattctgattgctcgtctgagaacaaggagctttactatgatgcagatgtgcagctgcacagtgatgaaactattatgtattaaaaataccaagtacctgtgtcaaggtgaaaaatgctcacaaaacaataggcattagcgtgcatgtgcttgctaattgrtaaaactcggctgtgtcttatatgtggcacatttttctgagatactcagcaaagttgtaattaattactgataaggaaaataagaaaaacatagctagaatccccagttctattctacctgcttgtatcctttcctttcaaataaaccacatttctcagtgatctttggaagtgtgataatatcatacaatattaactttacagatagggaaaacagtatgagtagaataaaaaaggaaatgaactgaaacagagaagtcaaggatgaagataatgtgtgtaatagggagcggtagaaaaagtaattaaaaaggggagggagttctagaatttcacttatgttgatattattacctgcttcccccacctgcatgccttcaactgcaggagtaaggagatacttcaaagtttaagtacaactgctatgattgtttttttttttcttgacttctattccccattggcataagggataaagaggatctaggattccaaatgctatacactacaatgaagcacactacagt

SEQ ID NO: 23253 - DNA, 526 bp, Homo sapiens
gggggcctgttcaacatgaaccagctgctagccaatgaaatcaaactactggtggactgactccactggtaattaaccaacaaaacccttgtaaaactttctttcttcttttctatttttraaaccaacttgcaatgctgttcatggaggatgctcaggaagatgagagaaaattagtaggattagttggagagagtgggagatagatgagacctctgctagtaagatgttactttcatttacaaatcctacaaatagagaggcagaataggtggggtatagaaaaatgtcaggctctcatagttacccttttaaattgctaaaaaatgtgtatgctcataggccatgaggaacaaatactttttttttttcatggtcccttgcttttgtttttgtacaaaaaaaaatggttttgctacaaatatccaagtagcataacttcacattgtgttggaagatttgtcatcagtgaggaaaacatctgcttaaattacaggaatttttgtattatacagctctgaaaatt

SEQ ID NO: 23254 - DNA, 464 bp, Homo sapiens
attttccttcagatggaccttaaacataatttcttggacactactagagagacttcgaggcaataataaaagatcagtattaaccagctataacagaggtttgatcatgcttacttgtacagtttttcccccgttttaaaaaggaatgtaataaaatttgttttttccatagaattaaataatattaaaattgagtgaaaggttgattgttgatgaatagaatagtacctctcatctgtgcagtgtctcatttcacctcagagaaaaggatacataagaggagtttgtaatttatcttaggatattctaattgcatttaaaagaacttatcttgcrcagggtaaatgggggactcacatacatatattaatacctctgactcattaacagaaagaaatacttggtacttctttcgctgaatgaccatactgtggaggatgcatactatttggtatagagaaata

SEQ ID NO: 23255 - DNA, 508 bp, Homo sapiens
aaagtggggatctcaactcattaatgaatagtaaaatcaatttagtgggctgcaaccagcatttaaaaaaatggaatagaataaaatgcaacatgatagggaaaaaaatgagaatttagctcctgaagtaaagataaatataatgtaagtatgactttgttaaaaatttaactcactaatatgtacattgggtacatgaatgcatgtacttaagtgcaattaggttgyacaataagaacctcttattgtatgttttgtgaaaaaaattgaaaaaatattaaaaaaatcaaaagacaaccaataagtcatgttcagagaagggactaaggcctagactagactgctgagaagcagcttaggaaaggcatatagtgggctagaggaagaaactcagacggggggcaggggttccattgtgttgaggttggttttagaaagaagatttcagagagaagattagaagtactgatcccaaatgcctgattttccctctaggctaagcaatttg

SEQ ID NO: 23256 - DNA, 614 bp, Homo sapiens
gcatttgaagaacttgtactcaagaaatcaacttaagaacctgagtctccttggaatttgtgttttctagaccagtacttctccaaattaaagcaaatttaggctgggcatggtggcccatgtctataatctcagcactttggaaggccgaggcgggcagatcacttgaggtcaggagttcgagaccagctgacccaacattgtgaaaccctgtctctactaaaaatacaaaaattagcygggcatgatggcatgtgcctgtaatcccagctactttggaggccgaggcaagataatcgcttgaactggagaggtggaagttgcagtgagccgagattgcaccactgcgctccagcctgggcaacagagcaagactctgtctcaaaaaaaaaaaaaaaaagcgaatttagttcactttggtattgtgtcaaaatgttgattcttttaaagtaaacctaaagaatttagatgtagttgaagcttgtcatctgttcttaattttttaataaaaatataatatttagattcagagtaaatctaaagtgagacctgaagctgctcccaggtgatactgatgctgcttatttttgcccagattttgagtcacaaggttc

SEQ ID NO: 23257 - DNA, 614 bp, Homo sapiens
gcatttgaagaacttgtactcaagaaatcaacttaagaacctgagtctccttggaatttgtgttttctagaccagtacttctccaaattaaagcaaatttaggctgggcatggtggcccatgtctataatctcagcactttggaaggccgaggcgggcagatcacttgaggtcaggagttcgagaccagctgacccaacattgtgaaaccctgtctctactaaaaatacaaaaattagctgggcatgatggcatgtgcctgtaatcccagctactttggaggccraggcaagataatcgcttgaactggagaggtggaagttgcagtgagccgagattgcaccactgcgctccagcctgggcaacagagcaagactctgtctcaaaaaaaaaaaaaaaaagcgaatttagttcactttggtattgtgtcaaaatgttgattcttttaaagtaaacctaaagaatttagatgtagttgaagcttgtcatctgttcttaattttttaataaaaatataatatttagattcagagtaaatctaaagtgagacctgaagctgctcccaggtgatactgatgctgcttatttttgcccagattttgagtcacaaggttc

SEQ ID NO: 23258 - DNA, 614 bp, Homo sapiens
gcatttgaagaacttgtactcaagaaatcaacttaagaacctgagtctccttggaatttgtgttttctagaccagtacttctccaaattaaagcaaatttaggctgggcatggtggcccatgtctataatctcagcactttggaaggccgaggcgggcagatcacttgaggtcaggagttcgagaccagctgacccaacattgtgaaaccctgtctctactaaaaatacaaaaattagctgggcatgatggcatgtgcctgtaatcccagctactttggaggccgaggcaagataatcgcttgaactggagaggtggaagttgcagtgagccgagattgcaccactgcgctccagcctgggcaacagagcaagactctgtctcaaaaaaaaaaaaaaaaagcgaatttagttcactttggtattgtgtcaaaatgttgattcttttaaagtaaayctaaagaatttagatgtagttgaagcttgtcatctgttcttaattttttaataaaaatataatatttagattcagagtaaatctaaagtgagacctgaagctgctcccaggtgatactgatgctgcttatttttgcccagattttgagtcacaaggttc

SEQ ID NO: 23259 - DNA, 614 bp, Homo sapiens
gcatttgaagaacttgtactcaagaaatcaacttaagaacctgagtctccttggaatttgtgttttctagaccagtacttctccaaattaaagcaaatttaggctgggcatggtggcccatgtctataatctcagcactttggaaggccgaggcgggcagatcacttgaggtcaggagttcgagaccagctgacccaacattgtgaaaccctgtctctactaaaaatacaaaaattagctgggcatgatggcatgtgcctgtaatcccagctactttggaggccgaggcaagataatcgcttgaactggagaggtggaagttgcagtgagccgagattgcaccactgcgctccagcctgggcaacagagcaagactctgtctcaaaaaaaaaaaaaaaaagcgaatttagttcactttggtattgtgtcaaaatgttgattcttttaaagtaaacctaaagaatttagatgtagttgaagcttgtcatctgttcttaattttttaataaaaatataatatttmgattcagagtaaatctaaagtgagacctgaagctgctcccaggtgatactgatgctgcttatttttgcccagattttgagtcacaaggttc

SEQ ID NO: 23260 - DNA, 1873 bp, Homo sapiens
aagtggccttctaaaggtttcagatctattctatgatccttaaataaccctagaagtaggttcttacataatttgtaagactgtaaaggggtcatgagaccaaaaggtttgagaactgtcagggccatgcagtaagatttccatgcagtttttaaggagcagctgaggttgaatatcaatctgtaaggctgtgtggtctttctgcagcaaactgggcttaggactagagcaagcagatagtttatagggttgagggttttcaggttaacagtttaggataagagagcaaggaagtaaaggatttagggaaaaggtgaaatgattcacaattgaactttagctggacagaaaggaaagtgagtctagaatactgatggttttatagaacaggaaagaagagtgcaaagactagatgaccataaggtctgctagtaaatagagaaagcttgaaggataaggaaataaataagctgtttggctaaactgtagaaatgtaagtggtgttacccctcattttacaggtcagctctcattttattagccaggaaactatggcttgtagcacctgacttgcccaggagcggccaagcaaatatttaagtctctaaatgctgagtctagtcctctttccactctatatagtgcagttggctaacttgtttgttttataaacacaaaatagtgtgtaaaagcaaagtatttttattatttaagattcttgaaagaaaatactttaaaaatatacatttttaatctcttggatctatacagatttctaaaatattggaagaattcgatgttgaagaacaatcaagtaccatgttaggaaaacgctttcccaacattaaggttatagaatctggcgtaaagcaactgaagagtgaagaacacgtaagataattgttttcttaataacattttccattgttgaatcttgatgaagttttgcctgcctcttttcactccagctctactaccaccaccatttaagtttttaacatgtaaagtttagtgacattgatttccagtattattagaaaaaatacagtttttgtaagtttattggaattatataattagatttgggattttagtcttcacatttcaaattacattaatgtttataaagtgtccactgtgttctggatactgcattaggtgctgggatgcagtagggttaatacgaggtgttggctcctaggaactgtcagtgtcaaagggaatatgaacatgcatactataattatattgacatataaaaaacacagtcactgaaatactatcaaagctctgatatcagggcttaaggaagactttacagagagagtaaaatgaggggggtattaacagatgagtgaaattaagagttccccargtggaaagaggcattccaggaaggggagattgaatgttcaaagacccaaagaaaggaaaagaaatatgaagaatagagatgtcaaagggattagggtgtggttaagtaaaggagattggcaatcaaggctagaagataagtaagtgagaacctgaagggtttttaatgtcacactataagaagttgagtttgggccggtgcgttggctcacgcctgtaatcccagcactttgggaggctgaggcaggcggatcatgaggtcaggagattgagaccatcctggctaacatggtgaaaccctgtctctactaaaaatacaaaaaattagccgggtgtggtggcgtgcacctgttagtcccagctactcgggagacttgaggcaggagaatggcgtgaacccgggaggcggagcttgcagtgagcccagatcgcaccactgcactccagcctgggcgacagagcgagactccttctcaaaaaaaagagagaagttgagttt

SEQ ID NO: 23261 - DNA, 1873 bp, Homo sapiens
aagtggccttctaaaggtttcagatctattctatgatccttaaataaccctagaagtaggttcttacataatttgtaagactgtaaaggggtcatgagaccaaaaggtttgagaactgtcagggccatgcagtaagatttccatgcagtttttaaggagcagctgaggttgaatatcaatctgtaaggctgtgtggtctttctgcagcaaactgggcttaggactagagcaagcagatagtttatagggttgagggttttcaggttaacagtttaggataagagagcaaggaagtaaaggatttagggaaaaggtgaaatgattcacaattgaactttagctggacagaaaggaaagtgagtctagaatactgatggttttatagaacaggaaagaagagtgcaaagactagatgaccataaggtctgctagtaaatagagaaagcttgaaggataaggaaataaataagctgtttggctaaactgtagaaatgtaagtggtgttacccctcattttacaggtcagctctcattttattagccaggaaactatggcttgtagcacctgacttgcccaggagcggccaagcaaatatttaagtctctaaatgctgagtctagtcctctttccactctatatagtgcagttggctaacttgtttgttttataaacacaaaatagtgtgtaaaagcaaagtatttttattatttaagattcttgaaagaaaatactttaaaaatatacatttttaatctcttggatctatacagatttctaaaatattggaagaattcgatgttgaagaacaatcaagtaccatgttaggaaaacgctttcccaacattaaggttatagaatctggcgtaaagcaactgaagagtgaagaacacgtaagataattgttttcttaataacattttccattgttgaatcttgatgaagttttgcctgcctcttttcactccagctctactaccaccaccatttaagtttttaacatgtaaagtttagtgacattgatttccagtattattagaaaaaatacagtttttgtaagtttattggaattatataattagatttgggattttagtcttcacatttcaaattacattaatgtttataaagtgtccactgtgttctggatactgcattaggtgctgggatgcagtagggttaatacgaggtgttggctcctaggaactgtcagtgtcaaagggaatatgaacatgcatactataattatattgacatataaaaaacacagtcactgaaatactatcaaagctctgatatcagggcttaaggaagactttacagagagagtaaaatgaggggggtattaacagatgagtgaaattaagagttccccaggtggaaagaggcattccaggaaggggagattgaatgttcaaagacccaaagaaaggaaaagaaatatgaagaatagagatgtcaaagggattagggtgtggttaagtaaaggagattggcartcaaggctagaagataagtaagtgagaacctgaagggtttttaatgtcacactataagaagttgagtttgggccggtgcgttggctcacgcctgtaatcccagcactttgggaggctgaggcaggcggatcatgaggtcaggagattgagaccatcctggctaacatggtgaaaccctgtctctactaaaaatacaaaaaattagccgggtgtggtggcgtgcacctgttagtcccagctactcgggagacttgaggcaggagaatggcgtgaacccgggaggcggagcttgcagtgagcccagatcgcaccactgcactccagcctgggcgacagagcgagactccttctcaaaaaaaagagagaagttgagttt

SEQ ID NO: 23262 - DNA, 611 bp, Homo sapiens
gaaaggatgttgttagatgatttacagtatcctcagatgagcttcaggtaagatgagaagtagatttgtagttgtttctataagcagttctaatttatgagttctagctcataaattagagatgtgttttatctcctttagggataaaacacatatataccacatttgaaacacaagtaatttgagagaaaaaagtactgaattttatcaggaaaaaataaaaaatctgaatccccaaaccagataagtttctaatacttatagtggtattacatattccaagtaatatatttgtcaatttatttgtaaattgaggtgggctctcaaaatatgctaaatggattgtcagggaatttatgtgttagggcatttgaatgaatcagagtscttcccgttaccatttgaaaaatatcccacatgcagtgcatgtctgccttctcttatccattgtcctttacatttttgtttttttaacagtttattataatttcttttatttaacaatctaggaagttggcagccatcagcagttctagtgctatttcaggtgcagttgggaattcgggaactcagtggagctgttagtgtagcgaactttgtatgtaaaatac

SEQ ID NO: 23263 - DNA, 611 bp, Homo sapiens
gaaaggatgttgttagatgatttacagtatcctcagatgagcttcaggtaagatgagaagtagatttgtagttgtttctataagcagttctaatttatgagttctagctcataaattagagatgtgttttatctcctttagggataaaacacatatataccacatttgaaacacaagtaatttgagagaaaaaagtactgaattttatcaggaaaaaataaaaaatctgaatccccaaaccagataagtttctaatacttatagtggtattacatattccaagtaatatatttgtcaatttatttgtaaattgaggtgggctctcaaaatatgctaaatggattgtcagggaatttatgtgttagggcatttgaatgaatcagagtgcttcccgttaccatttgaaaaatatcccacatgcagygcatgtctgccttctcttatccattgtcctttacatttttgtttttttaacagtttattataatttcttttatttaacaatctaggaagttggcagccatcagcagttctagtgctatttcaggtgcagttgggaattcgggaactcagtggagctgttagtgtagcgaactttgtatgtaaaatac

SEQ ID NO: 23264 - DNA, 650 bp, Homo sapiens
tatagctgtataggaagcttatgaaagctgtcagggatatatatgagtgcatgctgggatgctgagagagtactgaagacattggggctactgagatcttggaggtcaccaaaaacatttgttrgccaaatggatgaaaacaaacccggtaatttattaccttcttgcattaatgattcaacaattttattattcatcagctatcaatctgttggcaaaaactataagagtcccttttctcctacacaggtttggaatgagacacctggtatgtaaattctgtgggaatgggcaatgactatgcctgcatcaggtagataaattctcatcagctgggatggtcccatcttttctgcatcctcctataggttctagctgcttgccaaatgccagacagaatttaaaaacaatgcttactacaccaatttttccttttaataaggggcatacggttaaagtagacataaaaagatgggaagcgtagacttttaaaatgaaagtgtttttgtttttaatttgaaggttctctccttagctatggcattatttttattagggaaaaatatgctcaaaatagtaaagcaataacctttactccctactgagtcacacatcctacttctcaaagacacacacacacaaaaacagca

SEQ ID NO: 23265 - DNA, 565 bp, Homo sapiens
caggcggccgggcgcggtggctcatgcctgtaatcctcagtaagttctggtctttccattggaagacctagatcaaacactcttctcagtccctgcctggatgtaatgttctgggasagaagtttctcctctctgcacctgtttcccatacaaacaggaattaagtcaacagtcctttaaatatctttggcaataagatcctctaacttggcagtccactaagtctactaagaaataaacaaaaaacactaggactttccttttctctttcatctctaatcaattttatttgtttgctaaggacatttatgattattaaggtatttcttttccactttcaggtctctgttttgccagaaaaattatatccttccagagatacaggtacacccagaatatgcatagtttcaacaactgtttctttaaagccacaccctctccccaaagccaattgaaataaaagcctgatggcgaggagcccagcatactgataggctggcaagacgttgagtgctaacgggtggcaccccccaccttcattgtcttcatcccaaaggccagcctg

SEQ ID NO: 23266 - DNA, 1097 bp, Homo sapiens
taggggatcctgagtgtttaatgaaaggattttaacctatcacccagactttctggttcccaaacccatagatgatacagaatccaggaacccttctcattaataataacaggaaggctgctggtgggttttagggattaaagtcagaaggtatctctctgggattgagaaaaaaatatattctgactgagtctggggaagagagtggtgatgaagaaaaatgaaggcattagggtctcattctaatttgttaccttcacacttttgcttgaaggctgagtcctccatcatctgagtagattaaagtaaggtgagaaactgccctgtatggggggcagatgttaaggatatataattgcctactggaggggtgaggagactgaaagtcagggagtcagcctgaagctgtggggatcagaagtgggaacccaggagtggggaaagtgggtggatagtgggaaatctggaaatccatgatcccgagggagaggcacagcatacaaggctgaaaaatagaaaatggttcttaggcagtttcaggtctcaactgttcagttatacctttatttttttcaatcgtttctataagctagattcaaataaactaacttaaaagaggcaaacctacaagcaagaaaatatcaacttgaatgccaatttaagtaatttaccaagataagtttaactacctatataactggactacaatgctggaaaatctattctggaagtgattttaaaatgagaggcttgtctggtgagcacagaggtagaacaargggagatagtcttaggacataaatgtttaataacaacggctgatagcccagggtgtcttcacaagagggacacacggggattggaaggctcaagatcatgaactagggccccactaacctgccaatgctaggctctctgattctgttttccaaagtcccagggtgtctctttcccatctcttatccttggcacactcattttttagataagctagtaccttttattatagaggatccattttaaaaatcttggttgtttactccaaatcattttgtctctaaggcatcttctgcatgtatatatatatatatatatat

SEQ ID NO: 23267 - DNA, 584 bp, Homo sapiens
cacaagtcaacagaattctagtatgtgagtccatactgacatactagagaaatgaatatatatgagtgtgtcattaaaatgttgacacatttaacccctcttgtctaattccaaaaattagaagcaaacaatctgctaattttaaattaattataaagatctgcctacagagagagaaagatctcataragatatgcctacagaggtagaaggatttgattgtaaagaaaaggatacttacttctcagttttgttgatctggctacattcttgttaccatctctagcctttataagcaagagaatataatgatacattaaaaaacttgaaggagagatcataggacattctaaatagaaatttggctgtgcaaatataaaaattttatgtgctagtaaatgccacactgctaccaatattctttgattattattttggcctgcacaaattgttgtatagacattcacagacatttatataaaatgatttataatactgtttacaaaagcaaaataaaattttaagtctaaatgtctatttaaatgagacttgtcaaatcattgcactatgccaggcacagtggc

SEQ ID NO: 23268 - DNA, 568 bp, Homo sapiens
gaactgtacaatctttaaagttctttccaagtctgatttggctacctatttcttcctaccagacggtgttgagatacaatattctccctcccacaaatatgaagacctttagtcttagtgtggaaataggaaaagctagatgtgagcarccgacttcacctcgatccttgactctcactattcacaccaggtgattaaagctggggtgctggtggccggcagagcacctggtcataggagctgagctgggacacttgtgtgtgtgtgtgtctgtgtatgtgtgtgtgtacgtgtgtgtgtgtgtgtgttggggatgcagagtgcactgaagtaataggctcacatgtgttttcttcttcctgctctcagttatgtggggagccgtagctcttccaatatggctattgtggaagtgaagatgctatctgggttcagtcccatggagggcaccaatcagttagtaagttacttctgttttcttcatttatctagctgtgaggggacctaacgttataatttaaaaaactggtaaaatgggcatcatggcgtgtatacacacacacacaca

SEQ ID NO: 23269 - DNA, 550 bp, Homo sapiens
tttttcttctacgcccaacccagggtggtttgggaagaaagagagaggaataaacctttgacactgacctcattggtttgctcttttcccctatagggtcaagaagactctagccggggttcagataattccagttatgatgaagcactctctccaacatctcctgggcctttatcagtaagagctgggcatggagaacgtgacctggggaatcccaatacagctccacctacaccggaattacatggcatcaaccctgtgttcctgtccagtaatcccagccgttggagtgtagaggaggtgtacgagtttattgcttctctccaaggtactgaccctctcttcaacagaacccaggttgttttccttaacatcatcccacaggggccttgataagagggaaagtaattgacttttaagcagtaggagcttgaatgctaatatagaggctctactcctaatattcaagttgacttcctaatttttttctgggttgacattatcttctgtaatgtcagcaattttacagtrtttgattctcatcttatga

SEQ ID NO: 23270 - DNA, 1623 bp, Homo sapiens
atgtggtctgaaatgtgaggaagaggaaagttcctggcttcacaatgcttgctcacatgaaaacacaatcatgtacttcatcattcttggtggaagagttgtgtggttctgcccacgccttcgccaagtgagtcagtcaaagaggaaatkcttgtgtatttgcatgggtggtgctaggcaggataactgacccactgaccactggtgaggataaagacatgacttacttccttcactgtgttgcacagcttgtaaagcaacgtcccagaagacagaactagaagttagggcagagtggccaaggctggcaggcacaggctggagcagacctaaagtccccgggctgcacattccttttttgctcatttccactctcccttagggtaggctcctgaaaaaagaaaaaaaaaggtgctggcgttaactttctggttgtgtactcttcatccaacaaatacctgtggagccctggcatggaggaggcgctgcgctggttggtggggtaggaatgatgcagcatgccaattcttgtttcctgggagctcagtccagggaggagaatatcgacgtgggcactaatgacagtgtggtgtgatgactccataggctgcgaagtctatcccggggctgtggaagcagggaggcaggagagccctttcctcccgttaaataaggactccactttttaaaaaatgacatgcaaaatactttaatatcaaaatgaaaccctgtctaaactttgagttattttcctttttaggaattttatcttgtacagaaacataaccaacaaatatttagccaggaagaaagaaaggagacacagaatgacttgtcatcaccctggtgaaagcactcagtttccaccgcctctcacttccaagacactttttgtccagccctactccctgccaaagtcaataaaaacacgaagaagtcaaaaataaggataaaacagtctataaaattccataaagcaactaaatttgaagacaaattctggttgccatcccttagaagtgggtgagttagtatctggcgatgaatgaaggaaaccgtgacagaagctcagacctctgagacagcactcagcacagcctctgcccgcatggtttagcaagtgctagaagcagggccaaggccagtgtggcttagcattctgctccctggggaaatcaggccaagagacatcgcagcgctcagcgtttgggtgaaacatggagatctttccactaatgttgatggagggacagcctcttacatgtcttctccatgactacccattgtttttctgggtggaaaaataggagagggaagcttgggttgataacctggacactagcacaagtggccacctgcatggcaaccaagtagttaacacatttctgagggcagctttgggaaagtaacgggtgctagcaatgccacctctcctttctctgccaaatatgagagtaaattaattgtccagtttgcacatttttagagagtgttatgatagaaaccagtccatccatttttctaccattgggcgtatatttggcctcacctggcagtgcctgaagaaaaaaattgatttcttggtttgtgaaaatcattctttacataccttttgaaaagatt

SEQ ID NO: 23271 - DNA, 1623 bp, Homo sapiens
atgtggtctgaaatgtgaggaagaggaaagttcctggcttcacaatgcttgctcacatgaaaacacaatcatgtacttcatcattcttggtggaagagttgtgtggttctgcccacgccttcgccaagtgagtcagtcaaagaggaaatgcttgtgtatttgcatgggtggtgctaggcaggataactgacccactgaccactggtgaggataaagacatgacttacttccttcactgtgttgcacagcttgtaaagcaacgtcccagaagacagaactagaagttagggcagagtggccaaggctggcaggcacaggctggagcagacctaaagtccccrggctgcacattccttttttgctcatttccactctcccttagggtaggctcctgaaaaaagaaaaaaaaaggtgctggcgttaactttctggttgtgtactcttcatccaacaaatacctgtggagccctggcatggaggaggcgctgcgctggttggtggggtaggaatgatgcagcatgccaattcttgtttcctgggagctcagtccagggaggagaatatcgacgtgggcactaatgacagtgtggtgtgatgactccataggctgcgaagtctatcccggggctgtggaagcagggaggcaggagagccctttcctcccgttaaataaggactccactttttaaaaaatgacatgcaaaatactttaatatcaaaatgaaaccctgtctaaactttgagttattttcctttttaggaattttatcttgtacagaaacataaccaacaaatatttagccaggaagaaagaaaggagacacagaatgacttgtcatcaccctggtgaaagcactcagtttccaccgcctctcacttccaagacactttttgtccagccctactccctgccaaagtcaataaaaacacgaagaagtcaaaaataaggataaaacagtctataaaattccataaagcaactaaatttgaagacaaattctggttgccatcccttagaagtgggtgagttagtatctggcgatgaatgaaggaaaccgtgacagaagctcagacctctgagacagcactcagcacagcctctgcccgcatggtttagcaagtgctagaagcagggccaaggccagtgtggcttagcattctgctccctggggaaatcaggccaagagacatcgcagcgctcagcgtttgggtgaaacatggagatctttccactaatgttgatggagggacagcctcttacatgtcttctccatgactacccattgtttttctgggtggaaaaataggagagggaagcttgggttgataacctggacactagcacaagtggccacctgcatggcaaccaagtagttaacacatttctgagggcagctttgggaaagtaacgggtgctagcaatgccacctctcctttctctgccaaatatgagagtaaattaattgtccagtttgcacatttttagagagtgttatgatagaaaccagtccatccatttttctaccattgggcgtatatttggcctcacctggcagtgcctgaagaaaaaaattgatttcttggtttgtgaaaatcattctttacataccttttgaaaagatt

SEQ ID NO: 23272 - DNA, 1623 bp, Homo sapiens
atgtggtctgaaatgtgaggaagaggaaagttcctggcttcacaatgcttgctcacatgaaaacacaatcatgtacttcatcattcttggtggaagagttgtgtggttctgcccacgccttcgccaagtgagtcagtcaaagaggaaatgcttgtgtatttgcatgggtggtgctaggcaggataactgacccactgaccactggtgaggataaagacatgacttacttccttcactgtgttgcacagcttgtaaagcaacgtcccagaagacagaactagaagttagggcagagtggccaaggctggcaggcacaggctggagcagacctaaagtccccgggctgcacattccttttttgctcatttccactctcccttagggtaggctcctgaaaaaagaaaaaaaaaggtgctggcgttaactttctggttgtgtactcttcatccaacaaatacctgtggagccctggcatggaggaggcgctgcgctggttggtggggtaggaatgatgcagcatgccaattcttgtttcctgggagctcagtccagggaggagaatatcgacgtgggcactaatgacagtgtggtgtgatgactccataggctgcgaagtctatcccggggctgtggaagcagggaggcaggagagccctttcctcccgttaaataaggactccactttttaaaaaatgacatgcaaaatactttaatatcaaaatgaaaccctgtctaaactttgagttattttcctttttaggaattttatcttgtacagaaacataaccaacaaatatttagccaggaagaaagaaaggagacacagaatgacttgtcatcaccctggtgaaagcactcagtttccaccgcctctcacttccaagacactttttgtccagccctactccctgccaaagtcaataaaaacacgaagaagtcaaaaataaggataaaacagtctataaaattccataaagcaactaaatttgaagacaaattctggttgccatcccttagaagtgggtgagttagtatctggcgatgaatgaaggaaaccgtgacagaagctcagacctctgagacagcactcagcacagcctctgcccgcatggtttagcaagtgctagaagcagggccaaggccagtgtggcttagcattctgctccctggggaaatcaggccaagagacatcgcagcgctcagcgtttgggtgaaacatggagatctttccactaatgttgatggagggacagcctcttacatgtcttctccatgactacccattgtttttctgggtggaaaaataggagagggaagcttgggttgataacctggacactagcacaagtggccacctgcatggcaaccaagtagttaacacatttctgagggcagctttgggaaagtaacgggtgctagcaatgccacctctcctttctctgccaaatatgagagtaaattaattgtccagtttgcacatttttagagagtgttatgatagaaaycagtccatccatttttctaccattgggcgtatatttggcctcacctggcagtgcctgaagaaaaaaattgatttcttggtttgtgaaaatcattctttacataccttttgaaaagatt

SEQ ID NO: 23273 - DNA, 597 bp, Homo sapiens
ctggacacagacaggtaaacttttgtgagtactttgccaaagaaaatctacaaaatactgataaagttttaggtcccagcaaagcaacagtcctagttacaactgccagactgataactgaactatcaaccagacataatctacttatctgacgactggtagttgatactaaactgctgctgttggataagctttgccaagaacttacaattcatgggccagacaatgtgctgaatgctttgttctcatcagtacttacatgtgcgcgcgcrcacacacacacacacacacacacacactgtcccttgttacatttttggttgataacatgtttgttgtgtgctttgaccctgtccacctgtatgttccacactgataaacaccaacatgctatgcatttgtaggatattattgttgttacataaagatcatcagcctagtgctactactgaagatattgaccatggtcctacttttcattattagaaaaatcatcacaacttaaggaggccaaggcaggtggatcacgaggtcaggagatcgagaccatcctggctaacacggtgaaaccccgtctctcataaaaaatataaaaaa

SEQ ID NO: 23274 - DNA, 597 bp, Homo sapiens
ctggacacagacaggtaaacttttgtgagtactttgccaaagaaaatctacaaaatactgataaagttttaggtcccagcaaagcaacagtcctagttacaactgccagactgataactgaactatcaaccagacataatctacttatctgacgactggtagttgatactaaactgctgctgttggataagctttgccaagaacttacaattcatgggccagacaatgtgctgaatgctttgttctcatcagtacttacatgtgcgcgcgcacacacacacacacacacacacacacactgtcccttgttacatttttggttgataacatgtttgttgtgtgctttgaccctgtccacctgtatgttccacactgataaacaccaacatgctatgcatttgtaggatattattgttgttacataaagatcatcagcctagtgctactactgaagataytgaccatggtcctacttttcattattagaaaaatcatcacaacttaaggaggccaaggcaggtggatcacgaggtcaggagatcgagaccatcctggctaacacggtgaaaccccgtctctcataaaaaatataaaaaa

SEQ ID NO: 23275 - DNA, 1144 bp, Homo sapiens
agtttcagctttctacatatggctagccagttttcccagcaacatttattaaatagggaatcctttccccattgcttgtttttctcaggtttgtcaaagatcagatagctgtagatatgtggcgttatttctgagggctctgttctgttccattgatctatatctctgttttggtaccagtacyatgctgttttggttactgtagccttgtagtatagtttgaagtcaggtagcgtgatgcctccggctttgttcttttggctgaggattgacttggcaatgcgggctcttttttggttccatatgaactttaaagtagttttttccaattccggttagaaagtcattggtagcttgatggggatggcattgaatttataaattaatttgggcagtatggccattttcacaatattgattctttctacccatgagcatggaatgttcttccacttgtttttgtcctcttttatttccttgagcagtggtttgtagttctccttgaagagatccttgacatcccttgtaagttgtattcctaggtattttattctctttgaagcaattgtgaatgggagttcactcatgatttggctctctgtttgtctgttgttggtgtataagaatgcttgtgatttttgcacattgattttgtatcctgagactttgctgaaattgcttatcagcttaaggagattttcggctgagacgatggggaacccaatgataattttaaatcatatcttttcatcggttcatccttaatgggagcatataagtatgttagcactctggaaaatagagcttggaaactcatactgttgggggtacataatttgacatagacaacttgtacctatccttcaaatgtttcaatgcacgtgttttgagaaagaaatttcattttttattaatctttgctatagaaatactgaagcatcgttacaaaagcatatctatcccagcatcttttggtaacagcaagatatcggggaaaatttagatgaacattaatagggaagtagttcagaattataataaattatggcatgttgaccctatgcaatactgtgtagctgttgagaagaatgaggtatactgacaaggtaagatgtccataaagaaaagcatgtcactaaaaaat

SEQ ID NO: 23276 - DNA, 1144 bp, Homo sapiens
agtttcagctttctacatatggctagccagttttcccagcaacatttattaaatagggaatcctttccccattgcttgtttttctcaggtttgtcaaagatcagatagctgtagatatgtggcgttatttctgagggctctgttctgttccattgatctatatctctgttttggtaccagtactatgctgttttggttactgtagccttgtagtatagtttgaagtcaggtagcgtgatgcctccggctttgttcttttggctgaggattgacttggcaatgcgggctcttttttggttccatatgaactttaaagtagttttttccaattccggttagaaagtcattggtagcttgatggggatggcattgaatttataaattaatttgggcagtatggccattttcacaatattgattctttctacccatgagcatggaatgttcttccacttgtttttgtcctcttttatttccttgagcagtggtttgtagttctccttgaagagatccttsacatcccttgtaagttgtattcctaggtattttattctctttgaagcaattgtgaatgggagttcactcatgatttggctctctgtttgtctgttgttggtgtataagaatgcttgtgatttttgcacattgattttgtatcctgagactttgctgaaattgcttatcagcttaaggagattttcggctgagacgatggggaacccaatgataattttaaatcatatcttttcatcggttcatccttaatgggagcatataagtatgttagcactctggaaaatagagcttggaaactcatactgttgggggtacataatttgacatagacaacttgtacctatccttcaaatgtttcaatgcacgtgttttgagaaagaaatttcattttttattaatctttgctatagaaatactgaagcatcgttacaaaagcatatctatcccagcatcttttggtaacagcaagatatcggggaaaatttagatgaacattaatagggaagtagttcagaattataataaattatggcatgttgaccctatgcaatactgtgtagctgttgagaagaatgaggtatactgacaaggtaagatgtccataaagaaaagcatgtcactaaaaaat

SEQ ID NO: 23277 - DNA, 960 bp, Homo sapiens
tttattccttgccaaaaactactgctttgatattggaataactaatccttggaaatttattatttaattataacatttggacagtagcctacgagacatgaaagatttctgtgagtctgtattgtcagctgacaacttggagttagagatttgaaatgtctgaaagttgaaaatattcagagtcggatcataatgatgtcatgtagaaaagatttgaatataaatggaacttcaaggcatcattggagagtcttcagtcaaacagctcttactctgcctttttattctarcagggttattacattgaagtggctagtgcagaaatcaaagacctttctaaatgttgatgtcagttaatcggagaagggtgatttccatagatgatgtgctctgctagaaaaagcataaaaatgggagccaaaagacctaatttctattttttaaacaaggcacactcctctgtgcctcagtttacctatctgtaaagcaaagcctcaggtggaggaccccacattgttaatgatgccgctctttaggtgaaactctgcccagatcagcctaaagggcctttctggcctcctacacctcaaattcagcaacccatgggataattaagcttactgggaattctagtcagagaaataatgctcaaacaaggaaagcttctattgtaggatgtgaaataaaaggaagaaaaagaaaaatataaaaagaaagagaagatgacaatggtgcagtcaaagcttataagcttaaaccccacacttaaaatctctgcaaaatcctgggagataacattctctcacccacatcaggactttaggacaagggaggaatcttactctacagaacagtgaataattgaggattgaatacgaagcatccctgtcattaaaggacctccctccatccttccagccagcaaaaatttcacactgccctctcttctccagagatctc

SEQ ID NO: 23278 - DNA, 960 bp, Homo sapiens
tttattccttgccaaaaactactgctttgatattggaataactaatccttggaaatttattatttaattataacatttggacagtagcctacgagacatgaaagatttctgtgagtctgtattgtcagctgacaacttggagttagagatttgaaatgtctgaaagttgaaaatattcagagtcggatcataatgatgtcatgtagaaaagatttgaatataaatggaacttcaaggcatcattggagagtcttcagtcaaacagctcttactctgcctttttattctaacagggttattacattgaagtggctagtgcagaaatcaaagacctttctaaatgttgatgtcagttaatcggagaagggtgatttccatagatgatgtgctctgctagaaaaagcataaaaatgggagccaaaagacctaatttctattttttaaacaaggcacactcctctgtgcctcagtttacctatctgtaaagcaaagcctcaggtggaggaccccacattgttaatgatgccgctctttaggtraaactctgcccagatcagcctaaagggcctttctggcctcctacacctcaaattcagcaacccatgggataattaagcttactgggaattctagtcagagaaataatgctcaaacaaggaaagcttctattgtaggatgtgaaataaaaggaagaaaaagaaaaatataaaaagaaagagaagatgacaatggtgcagtcaaagcttataagcttaaaccccacacttaaaatctctgcaaaatcctgggagataacattctctcacccacatcaggactttaggacaagggaggaatcttactctacagaacagtgaataattgaggattgaatacgaagcatccctgtcattaaaggacctccctccatccttccagccagcaaaaatttcacactgccctctcttctccagagatctc

SEQ ID NO: 23279 - DNA, 960 bp, Homo sapiens
tttattccttgccaaaaactactgctttgatattggaataactaatccttggaaatttattatttaattataacatttggacagtagcctacgagacatgaaagatttctgtgagtctgtattgtcagctgacaacttggagttagagatttgaaatgtctgaaagttgaaaatattcagagtcggatcataatgatgtcatgtagaaaagatttgaatataaatggaacttcaaggcatcattggagagtcttcagtcaaacagctcttactctgcctttttattctaacagggttattacattgaagtggctagtgcagaaatcaaagacctttctaaatgttgatgtcagttaatcggagaagggtgatttccatagatgatgtgctctgctagaaaaagcataaaaatgggagccaaaagacctaatttctattttttaaacaaggcacactcctctgtgcctcagtttacctatctgtaaagcaaagcctcaggtggaggaccccacattgttaatgatgccgctctttaggtgaaactctgcccagatcagcctaaagggcctttctggcctcctacacctcaaattcagcaacccatgggataattaagcttactgggaattctagtcagagaaataatgctcaaacaaggaaagcttctattgtaggatgtgaaataaaaggaagaaaaagaaaaatataaaaagaaagagaagatgacaatggtgcagtcaaagcttataagcttaaaccccacacttaaaatctctgyaaaatcctgggagataacattctctcacccacatcaggactttaggacaagggaggaatcttactctacagaacagtgaataattgaggattgaatacgaagcatccctgtcattaaaggacctccctccatccttccagccagcaaaaatttcacactgccctctcttctccagagatctc

SEQ ID NO: 23280 - DNA, 553 bp, Homo sapiens
acatccttaatcaaaaagcacttctaaccacacatcagtgagtgtgtaagatagccccctctttttcataacgatggtgtactttttttttttttttttttttttttgagatggagtctggctctgtcgcccaggctggagtgcaatggtgcaatcttggcccactgcaaactctgcctcccaggttcmagtgattctcctgcctcagcctccccagtagctgggactacaggcccttaccaccatgctcagctaacttttgtatttttagtagagacagggtttcatcatgttggacaggatggtttcgatctcttgacctcatgatctgcctgtcttggcctcccaaagtgctgggattacaggcatgagccaccgcacctggccagctagggcttactttatggtctagggagtttcatgggagtcaaaaaagaagtcacacaaatgctgctctgataattttgtcaactgggtggaaacgacaagttgcaaatctccttattgttttgtccctccacacttatgtcaagagtagctattggccaagttc

SEQ ID NO: 23281 - DNA, 553 bp, Homo sapiens
acatccttaatcaaaaagcacttctaaccacacatcagtgagtgtgtaagatagccccctctttttcataacgatggtgtactttttttttttttttttttttttttgagatggagtctggctctgtcgcccaggctggagtgcaatggtgcaatcttggcccactgcaaactctgcctcccaggttccagtgattctcctgcctcagcctccccagtagctgggactacaggcccttaccaccatgctcagctaacttttgtatttttagtagagacagggtttcatcatgttggacaggatggtttcgatctcttgacctcatgatctgcctgtcttggcctcccaaagtgctgggattacaggcatgagccaccgcacctggccagctagggcttactttatggtctagggagtttcatgggagtcaaaaaagaagtcacacaaatgctgctctgataattttgtcaactggrtggaaacgacaagttgcaaatctccttattgttttgtccctccacacttatgtcaagagtagctattggccaagttc

SEQ ID NO: 23282 - DNA, 564 bp, Homo sapiens
aacatggtaaggccctccccccactcccctgacccccgtctctgctaaaaataccaaaaaaaaaaaaaaaaaaaattagccaggtgtggtggcgggcgcctgtaattccagctactctggaggctraggcaggaaaatcgattgaacacccgggaggcagaggttgctgtgagccaagatcgcaccactgcactccagcctgggtgacagagcaagactccatctcggggaaagaaaaagagagaaaatacctactcaagcgtgaagtcattctaccaaacaaaatgatggcattagaggccaaatgagttatttgtgaaaagggagaaattgaagatgcaaatagtaaaagtagactgtattgggccttttcctagaggaataggtaaaatttgaaaattcaggcaggaaagttagcttagaaaacagggagagcacatttgtaacttcagaagaggggcatccatggacaaaaatcgaagaatcacattgtacttcaatatgaggagaggctgggcacagtggctcgtgactgtaatcccagcactttgagacgtgggagga

SEQ ID NO: 23283 - DNA, 1062 bp, Homo sapiens
cccggtgggggtctcagaagyaggaggctgctgggccacggcagggacaaggctttctctggcacccccatgcaaggttcctcaatagaaagaaatcatgttgcccgttccgcagcaggcatgccatcccaggcccctgagacccccaggggacatccccgctctgccaactgtgtgaacacactccacctcccagcctctgccatgtcacagatgacttgaggcttcagatgagtgactccccagagtcacatgggcctatgcttgggtcccagcctcttctatgacccttgaggtggctctcagcataggaggctgatttctaggcctctatgtgctgttctgtgaatgggacaggtaacagacctctatggcaggcatgaaatgccaagcgcccaccacaaggcctggcaacaaactctcaggaaattcaggtcattctctgggagtggccacagatgcttctcagaaccccaacccctggcactgctccagcccatgctggacccttcatcatccaggtgtcccaggcccacaagtatctgacacctcaggtggcacttgtggcccactgtgtgaccccaagcatacctccatgttctctgggctgagtctctgagccgccacagctctgcagagcccaggctgtgggctccagcccctgacttccagcttgacttactaaatgtaatctccagggctaattttaatcctgggcaggaattggacacattcccatggctaggatgggtccctggaggctggaggtgacaccatcccacaggacccagtgccaagataatcccccaaatgacccctgtgcctgtggtctcatgagagcagggactggggctgagcttgggcctgagtctcttgagcatagaaggctcaactaagccccttctcaatctgtctcaattttagttatagggacactatggctagtgcagaggtcacgagacaggggaaccccgagaggcaggaagttgggggcctttctggactgatgtcctagagctgagacaggaagtgaattccatgcagaagaaacagcaggtacaa

SEQ ID NO: 23284 - DNA, 1062 bp, Homo sapiens
cccggtgggggtctcagaagtaggaggctgctgggccacggcagggacaaggctttctctggcacccccatgcaaggttcctcaatagaaagaaatcatgttgcccgttccgcagcaggcatgccatcccaggcccctgagacccccaggggacatccccgctctgccaactgtgtgaacacactccacctcccagcctctgccatgtcacagatgacttgaggcttcagatgagtgactccccagagtcacatgggcctatgcttgggtcccagcctcttctatgacccttgaggtggctctcagcataggaggctgatttctaggcctctatgygctgttctgtgaatgggacaggtaacagacctctatggcaggcatgaaatgccaagcgcccaccacaaggcctggcaacaaactctcaggaaattcaggtcattctctgggagtggccacagatgcttctcagaaccccaacccctggcactgctccagcccatgctggacccttcatcatccaggtgtcccaggcccacaagtatctgacacctcaggtggcacttgtggcccactgtgtgaccccaagcatacctccatgttctctgggctgagtctctgagccgccacagctctgcagagcccaggctgtgggctccagcccctgacttccagcttgacttactaaatgtaatctccagggctaattttaatcctgggcaggaattggacacattcccatggctaggatgggtccctggaggctggaggtgacaccatcccacaggacccagtgccaagataatcccccaaatgacccctgtgcctgtggtctcatgagagcagggactggggctgagcttgggcctgagtctcttgagcatagaaggctcaactaagccccttctcaatctgtctcaattttagttatagggacactatggctagtgcagaggtcacgagacaggggaaccccgagaggcaggaagttgggggcctttctggactgatgtcctagagctgagacaggaagtgaattccatgcagaagaaacagcaggtacaa

SEQ ID NO: 23285 - DNA, 1062 bp, Homo sapiens
cccggtgggggtctcagaagtaggaggctgctgggccacggcagggacaaggctttctctggcacccccatgcaaggttcctcaatagaaagaaatcatgttgcccgttccgcagcaggcatgccatcccaggcccctgagacccccaggggacatccccgctctgccaactgtgtgaacacactccacctcccagcctctgccatgtcacagatgacttgaggcttcagatgagtgactccccagagtcacatgggcctatgcttgggtcccagcctcttctatgacccttgaggtggctctcagcataggaggctgatttctaggcctctatgtgctgttctgtgaatgggacaggtaacagacctctatggcaggcatgaaatgccaagcgcccaccacaaggcctggcaacaaactctcaggaaattcaggtcattctctgggagtggccacagatgcttctcagaaccccaacccctggcactgctccagcccatgctggacccttcatcatccaggtgtcccaggcccacaagtatctgacacctcaggtggcacttgtggcccactgtgtgaccccaagcatacctccatgttctctgggctgagtctctgagccgccacagctctgcagagcccmggctgtgggctccagcccctgacttccagcttgacttactaaatgtaatctccagggctaattttaatcctgggcaggaattggacacattcccatggctaggatgggtccctggaggctggaggtgacaccatcccacaggacccagtgccaagataatcccccaaatgacccctgtgcctgtggtctcatgagagcagggactggggctgagcttgggcctgagtctcttgagcatagaaggctcaactaagccccttctcaatctgtctcaattttagttatagggacactatggctagtgcagaggtcacgagacaggggaaccccgagaggcaggaagttgggggcctttctggactgatgtcctagagctgagacaggaagtgaattccatgcagaagaaacagcaggtacaa

SEQ ID NO: 23286 - DNA, 1062 bp, Homo sapiens
cccggtgggggtctcagaagtaggaggctgctgggccacggcagggacaaggctttctctggcacccccatgcaaggttcctcaatagaaagaaatcatgttgcccgttccgcagcaggcatgccatcccaggcccctgagacccccaggggacatccccgctctgccaactgtgtgaacacactccacctcccagcctctgccatgtcacagatgacttgaggcttcagatgagtgactccccagagtcacatgggcctatgcttgggtcccagcctcttctatgacccttgaggtggctctcagcataggaggctgatttctaggcctctatgtgctgttctgtgaatgggacaggtaacagacctctatggcaggcatgaaatgccaagcgcccaccacaaggcctggcaacaaactctcaggaaattcaggtcattctctgggagtggccacagatgcttctcagaaccccaacccctggcactgctccagcccatgctggacccttcatcatccaggtgtcccaggcccacaagtatctgacacctcaggtggcacttgtggcccactgtgtgaccccaagcatacctccatgttctctgggctgagtctctgagccgccacagctctgcagagcccaggctgtgggctccagcccctgacttccagcttgacttactaaatgtaatctccagggctaattttaatcctgggcaggaattggacacattcccatggctaggatgggtccctggaggctggaggtgacaccatcccacaggacccagtgccaagataatcccccaaatgacccctrtgcctgtggtctcatgagagcagggactggggctgagcttgggcctgagtctcttgagcatagaaggctcaactaagccccttctcaatctgtctcaattttagttatagggacactatggctagtgcagaggtcacgagacaggggaaccccgagaggcaggaagttgggggcctttctggactgatgtcctagagctgagacaggaagtgaattccatgcagaagaaacagcaggtacaa

SEQ ID NO: 23287 - DNA, 801 bp, Homo sapiens
tctctactaaaataaaaattaaaaattagctgggcatgggggtgtgggtctatagtcccagctacttaggaagctgaggcaggaggggtcaaggccacagtgagccataatcgtgccactgaattccagcccgggcgacagaggccttgtcttgaaagaacaaaacaagaatccttatcttttacagacatataccaagacattcagggaggaaattatatgatatgtgggatttgctataaaataacgagaggaagaggagaagcatgcaggagtgtacatgaaacaagattggccacgagatgacaaatatctgaatccgctgatgagtaggtgaaagctcactacrctagcctcttgtttaaaatgctccagaatagaaagtgtgtctgaaaatccacttcatgggtttgtagcaagcattgaataagatcatgtatacagagtgctttataaccatggcttacaggtagtcagtacacattgtttttagttttgtatactccccgtccattaatcacatccaaaaaaggtatgttattcacactaagagctctggcccatggacctttgtccacttggtggtaatttattgaaatttggggtttagaatgaggaaatgccagccttcagagccccaggcttactatgcaacagcaaagccaacagtcccaaatgccttcctagcacacctagtaagtaggatcactttcctctcaccttgtaggcatacttgagttcattcactcattcattcactatttttcattcatttcttatgtgccaggtattgggtgttag

SEQ ID NO: 23288 - DNA, 801 bp, Homo sapiens
tctctactaaaataaaaattaaaaattagctgggcatgggggtgtgggtctatagtcccagctacttaggaagctgaggcaggaggggtcaaggccacagtgagccataatcgtgccactgaattccagcccgggcgacagaggccttgtcttgaaagaacaaaacaagaatccttatcttttacagacatataccaagacattcagggaggaaattatatgatatgtgggatttgctataaaataacgagaggaagaggagaagcatgcaggagtgtacatgaaacaagattggccacgagatgacaaatatctgaatccgctgatgagtaggtgaaagctcactacgctagcctcttgtttaaaatgctccagaatagaaagtgtgtctgaaaatccacttcatgggtttgtagcaagcattgaataagatcatgtatacagagtgctttataaccatggcttacaggtagtcagyacacattgtttttagttttgtatactccccgtccattaatcacatccaaaaaaggtatgttattcacactaagagctctggcccatggacctttgtccacttggtggtaatttattgaaatttggggtttagaatgaggaaatgccagccttcagagccccaggcttactatgcaacagcaaagccaacagtcccaaatgccttcctagcacacctagtaagtaggatcactttcctctcaccttgtaggcatacttgagttcattcactcattcattcactatttttcattcatttcttatgtgccaggtattgggtgttag

SEQ ID NO: 23289 - DNA, 1274 bp, Homo sapiens
tctcaaaaaaacaaaacaaaacaaaaaacaaatgcatgtaatttgcatgcacttggtggtttaaaccacaaatttgctgtcttaaaccaacagaaatttattctctcaaagttgtggaagcaagaagtccaaagtcaaggtcaaggcagcgaggccctgcctcactgccttcaaaagctcgatgggaaaatccatttctttccttttccacctcttagggactgctgacattccttggtttgtggcggcatcactgcaatctctgtctccatcttcacttygccttctctgtgcttgcttccctcttacaaggatacgcgaaattggccaggcacgtggctcacgcctgtaatcccagcattttgggaggccaaggcgggtggatcacctaaagtgatcccagctactcggaaggctgaggcaggagaattgcttgaacctgggaggtggaggttgcagtgagccgagatcgcaccattgcactccagcctgggtgacaagagctaaactccatctccaaaaaaaaaaaaaaagaaaaaagaaaaaggatacaagtaattacatttagggctcacccagataatccaatccaggataatctccctgtctcaagagccttagcttaatcacacctgcaaagaccacctacccacataaggcaatatttgcaggttcaagagattaggatctgatatctttgcgggggtgggggcatttttcaacctaccacaaaacatctcaaacttaatagtaggtgctcaaacacatttatttattcattgatttattttattttttattttgtagagatgttttccgggctggtctcaaactcccggactcaagggatcctcccacctcatcctcccaaagtgctgggattatggtgtgggccatcgtgcctggcaaaaacacatgtattgaatgaatgaaggaatgtccacagcagggtcataagagctagcattgagtacacctgtcagcgaaaactcaaattagaaccaagtgtgcaaaactttgcggaggctgttatgactaggaccttgatgacttgatgaattttctttttaacttatgtaacaaaattttaaacttttcacaaaaagtagagaatatgagaagtccccatttattcgccacctggcctcaacaactattaacatgtaaaacagccttgttttatctattgcccctccatctttttatttttttctggagtattttagagcaaacctcgataatatgccatttcacttccaggtacttaagtatgc

SEQ ID NO: 23290 - DNA, 1274 bp, Homo sapiens
tctcaaaaaaacaaaacaaaacaaaaaacaaatgcatgtaatttgcatgcacttggtggtttaaaccacaaatttgctgtcttaaaccaacagaaatttattctctcaaagttgtggaagcaagaagtccaaagtcaaggtcaaggcagcgaggccctgcctcactgccttcaaaagctcgatgggaaaatccatttctttccttttccacctcttagggactgctgacattccttggtttgtggcggcatcactgcaatctctgtctccatcttcactttgccttctctgtrcttgcttccctcttacaaggatacgcgaaattggccaggcacgtggctcacgcctgtaatcccagcattttgggaggccaaggcgggtggatcacctaaagtgatcccagctactcggaaggctgaggcaggagaattgcttgaacctgggaggtggaggttgcagtgagccgagatcgcaccattgcactccagcctgggtgacaagagctaaactccatctccaaaaaaaaaaaaaaagaaaaaagaaaaaggatacaagtaattacatttagggctcacccagataatccaatccaggataatctccctgtctcaagagccttagcttaatcacacctgcaaagaccacctacccacataaggcaatatttgcaggttcaagagattaggatctgatatctttgcgggggtgggggcatttttcaacctaccacaaaacatctcaaacttaatagtaggtgctcaaacacatttatttattcattgatttattttattttttattttgtagagatgttttccgggctggtctcaaactcccggactcaagggatcctcccacctcatcctcccaaagtgctgggattatggtgtgggccatcgtgcctggcaaaaacacatgtattgaatgaatgaaggaatgtccacagcagggtcataagagctagcattgagtacacctgtcagcgaaaactcaaattagaaccaagtgtgcaaaactttgcggaggctgttatgactaggaccttgatgacttgatgaattttctttttaacttatgtaacaaaattttaaacttttcacaaaaagtagagaatatgagaagtccccatttattcgccacctggcctcaacaactattaacatgtaaaacagccttgttttatctattgcccctccatctttttatttttttctggagtattttagagcaaacctcgataatatgccatttcacttccaggtacttaagtatgc

SEQ ID NO: 23291 - DNA, 2190 bp, Homo sapiens
tgcaacaagtcaactgggtctcagatctctagagatggaaaggaggaaggagtgaatgaggaaaggactacaatgggcctcacaggctaaagtgatgctgggccaagaaaataaaatgtgagttgggatgaaataattggaccttttctccgccacttgctggctattaaccttgtatgagccatttcattgctctgaatctgacgttcaatgtcctcaaaatgatgtcagtgataggacagaccccaaacagtggttatcagcaaaatgtataacaatgtatctgacactgaaggctgaaaaaacatagatttgaaaaatatcagagctgggagactctcagcgacttagcctcttcttcatccctccattttccagaagtgaacctgaaaccccaggcatacaaagggttgcaaagccccatccacaccacacccaggctcytcagctgcctcttgctcaagtatttgaatcttataaagccccccaacgccatcactctaccagcctgctttaaaccagtatcaaaagagctttgtttagggaaatacaagctccagcaagaagaggaagcatcaacaatatttaaatcatgttttgacaaaactaaataataataatcttcctgaatcccattcactcaacctcaataattgtttggcttcccatgtattgagtatttattctaggtttgggtgcgtgttatattgctgcagacttgatactctgcattttgcactttgcattctatcagaaatgtattctgcattgctacagtcttcataattatcattttaatggtgccataatattccttcgtgttgatgcaccataatttatggaactgttcaccaatcattggacatttagctttcatatggtgtttgttgttatagataacatcataatgagcatcttcattacacgcagctcttggtctccagtaaattatatccccagaataaaagagaaattccgcgaagtaagtgtttggagtcaaagggcataaacctctttagaacatttatctattattttgtttttatccccaaaaggattgcaccaactcatgctgcaccagtggagtataccagtattattttcactatgaagccgtatcattttgtatgttctaactttgtttttctcaaccttttttctgtttgtaacagaaaaaaaaaaacacatgttcattataaaaaaaaatccagataaaaacaaagataaactaatcataacccctctgaccaaaaataatcagtgcaaaaagttaaacatttcttttcagtcttttttctatgcatatgggagaatttttcccccaaaacttagattatattctctattcagttatattttgttctgttttaattttactattacttttcttaagtcattggaaacattttgaaacaatcagctttaatgaatacataatatttcatcatatagccatctcacttaacctatttcgatatcagattccgtgatattgaatgtttatttccagtatcagtatataagaaacaaagttgccttgaacatccttctgtgtaaatctgtatcatagtttttgtttatttccacaccacaggaaacttgaagtagaaaaactggatcgaggggtataaatattttttagaaatccttggattttgaaaattaagaaagatacattgggcgaattatgtcacatccccctgtgtcctcagaaaggcagcttgagtcctgttaggaggaggggcagtcagcctggcagtgctgagctcttttgtcaactccaagacttggagaaaaccatttcacctccatgtctgttaaatgggataatactttctgctgtctgccatttgaggctgcagaatatccaaatctctcgctactgggtcaattccaagttaagaaagaaacgaagccctcttcccattttggaaaccaaaggggccaatcccctctctacccaaccccaaagtcacacagagctgagagcccagcacaggacctgagcaggaccccactttctgcccaggacctgcaggacacagggtcagagatcacccgtaacgacttcagcagagtcgagaggcctgaggcatagtaggcgtgcttgcgggcagctcggggctggaggtggccagatcttggctgaatttgcttccgttggttcttgcctctgggttctccaacctt

SEQ ID NO: 23292 - DNA, 759 bp, Homo sapiens
taagcagaatatagtaagctttcagtctgacaactcactccgcaaaatgtacttccttgcagacccctatatgaccataactcaacaagaaatagatagcacacttgacaaaaaaaggataattggaagaagatttatttacaaagggattacttacagaagcatagatatagggaaccaccaataacacagtaacccagcctagtaagagctgaactcttaccatctcttgaccataaggtataggagcaggaaatggttactagaactcagaaggaatgagttgtgtacaactggctgccttgagaggagtggtgactttgttgaaggactaagctagcccaaggtgatcttttagggagaataaatattgcaacttaatttttctcattggccaaacccaaccaaaagctggcggcgggggtgggggaacaacaacaaaaaaaacaaaaacgaacaaacaaaaagattgatgcagcccatacaggtcagactcctaaaaaaagaaagcagggtggagaaaggtggagagtgcatctggaggggcaaactggcgatatctagcacagttactgagtggaggttctgtgagcagactccttggagccyggcatagtgttggaatcatctactgaaccaaccctagggactgcggcaattttattttcatacacactttgctttgcggctgtggggtcaaaggcattaggcttttccattatagaatttttttctctattctttagtattcattccctt

SEQ ID NO: 23293 - DNA, 759 bp, Homo sapiens
taagcagaatatagtaagctttcagtctgacaactcactccgcaaaatgtacttccttgcagacccctatatgaccataactcaacaagaaatagatagcacacttgacaaaaaaaggataattggaagaagatttatttacaaagggattacttacagaagcatagatatagggaaccaccaataacacagtaacccagcctagtaagagctgaactcttaccatctcttgaccataaggtataggagcaggaaatggttactagaactcagaaggaatgagttgtgtacaactggctgccttgagaggagtggtgactttgttgaaggactaagctagcccaaggtgatcttttagggagaataaatattgcaacttaatttttctcattggccaaacccaaccaaaagctggcggcgggggtgggggaacaacaacaaaaaaaacaaaaacgaacaaacaaaaagattgatgcagcccatacaggtcagactcctaaaaaaagaaagcagggtggagaaaggtggagagtgcatctggaggggcaaactggcgatatctagcacagttactgagtggaggttctgtgagcagactccttggagcctggcatagtgttggaatcatctactgaaccaaccctagggactgyggcaattttattttcatacacactttgctttgcggctgtggggtcaaaggcattaggcttttccattatagaatttttttctctattctttagtattcattccctt

SEQ ID NO: 23294 - DNA, 1042 bp, Homo sapiens
agtactacactgaactataaaccagaactaaccacattaatttactgaacccaggcagaaccagttccaagtatcacttttatttttagtgaatcataaaccaaatcaaagttgtttaaaacattatgaatataagtattccattaaaattacaaccaaaccaatgtgtcttgtaaaataatttttgccatattacaaattattatactagaaatattttgctgttctctaaaatgaatctgaaaaaaaamctcataaataaatagtcatttgttcaagccctttggggtacatactaattcattccaaattgattggtaagatggtaagaaatacattatttatatgaactgagggaggacatgtcacttcacacaccagtccccaataagccctaagctctttttctatcaaaggagctatacaaattcttgttatatgtcacatgatatattagaaagattcaggattttagagtctcgtagactgggatgattgtcacaacccatttactctgagatctcagaaaatttataagacttctcttggttcactttgtcagtagtaaaatggaaaagaaaatatgccaacttcatagcatttgtttgtgtgtgcatggctgtgggtatatgtgtttgagagagagagaaagagggagggagagagagagagaaagagtgacagagagaaagagaggaaggaggaggagggagagagatacagggaggaagagaggaagaaagggagagaaggagggaagaacggaggaaaagagagagagagcacttgttgcagagatggctagttttgctctaaaacatgcactttcctttatgtaatatacagttgtttctgggtggcatctaaccaggtgatgcatttgctggttctcattttgtatccaggtgaggctggaactacgctcaccacatggacaggcgtgatctctgtacatatgagccaacacagttacatgactggatgcctcctccacatcatgttctcttgcctgctaactgggagaaaactgaagaagactcca

SEQ ID NO: 23295 - DNA, 1042 bp, Homo sapiens
agtactacactgaactataaaccagaactaaccacattaatttactgaacccaggcagaaccagttccaagtatcacttttatttttagtgaatcataaaccaaatcaaagttgtttaaaacattatgaatataagtattccattaaaattacaaccaaaccaatgtgtcttgtaaaataatttttgccatattacaaattattatactagaaatattttgctgttctctaaaatgaatctgaaaaaaaaactcataaataaatagtcatttgttcaagccctttggggtacatactaattcattccaaattgattggtaagatggtaagaaatacattatttatatgaactgagggaggacatgtcacttcacacaccagtccccaataagccctaagctctttttctatcaaaggagctatacaaattcttgttatatgtcacatgatatattagaaagattcaggattttagagtctcgtagactgggatgattgtcacaacccatttactctgagatctcagaaaatttataagacttctcttggttcactttgtcagtagtaaaatggaaaagaaaatatgccaacttcatagcatttgtttgtgtgtgcatggctgtgggtatatgtgttygagagagagagaaagagggagggagagagagagagaaagagtgacagagagaaagagaggaaggaggaggagggagagagatacagggaggaagagaggaagaaagggagagaaggagggaagaacggaggaaaagagagagagagcacttgttgcagagatggctagttttgctctaaaacatgcactttcctttatgtaatatacagttgtttctgggtggcatctaaccaggtgatgcatttgctggttctcattttgtatccaggtgaggctggaactacgctcaccacatggacaggcgtgatctctgtacatatgagccaacacagttacatgactggatgcctcctccacatcatgttctcttgcctgctaactgggagaaaactgaagaagactcca

SEQ ID NO: 23296 - DNA, 1042 bp, Homo sapiens
agtactacactgaactataaaccagaactaaccacattaatttactgaacccaggcagaaccagttccaagtatcacttttatttttagtgaatcataaaccaaatcaaagttgtttaaaacattatgaatataagtattccattaaaattacaaccaaaccaatgtgtcttgtaaaataatttttgccatattacaaattattatactagaaatattttgctgttctctaaaatgaatctgaaaaaaaaactcataaataaatagtcatttgttcaagccctttggggtacatactaattcattccaaattgattggtaagatggtaagaaatacattatttatatgaactgagggaggacatgtcacttcacacaccagtccccaataagccctaagctctttttctatcaaaggagctatacaaattcttgttatatgtcacatgatatattagaaagattcaggattttagagtctcgtagactgggatgattgtcacaacccatttactctgagatctcagaaaatttataagacttctcttggttcactttgtcagtagtaaaatggaaaagaaaatatgccaacttcatagcatttgtttgtgtgtgcatggctgtgggtatatgtgtttgagagagagagaaagagggagggagagagagagagaaagagtgacagagagaaagagaggaaggaggaggagggagagagatacagggaggaagagaggaagaaagggagagaaggagggaagaacggaggaaaagagagagagagcacttgttgcagagatggctagttttgcyctaaaacatgcactttcctttatgtaatatacagttgtttctgggtggcatctaaccaggtgatgcatttgctggttctcattttgtatccaggtgaggctggaactacgctcaccacatggacaggcgtgatctctgtacatatgagccaacacagttacatgactggatgcctcctccacatcatgttctcttgcctgctaactgggagaaaactgaagaagactcca

SEQ ID NO: 23297 - DNA, 1070 bp, Homo sapiens
cgttttgtttttttttttttctaaacctcacaccttttatttattagacttggattccagtttcctgagcctgtttgtgccactgattagacaggcttgaagcagaacccaccaggcttcctgaataaaatgcagcagtgattgtattaggggkttttaaattgctcaaaatactgtctaaaaaacactaaaaatcatgttactttctagattgaataaaatcctatagaaatgaattcctggacttgatatgtagcaagctggcattggctcgggagtgagtgggctcagttaagtgagctaagatgagatggtgcacaggcgagcacccacctgaggagtgtttggatgttatgatagccagctcctctgtaaagacctgtccttctatgtcagcagcccagcagataaatgacgtgtaaataccacatttaggagggcttatgatgatgccaattaatggagacctttttgaaacaggaaggaggtgaaacatattcctttgcttctacatcactgtgtgccaggcactgtttacagcatctcgtttaaccagcagtcaccacctgacggatggctgatgtggggtggggtcccagggtgggattgcgtgatgggcttggggtctctggctgatgggtgccagagctgggactggaactcctggcgtgactgaggcagacacctgggctacccagcctcacccacgacgccctcactaagtgacccacaggactcaccggaagcagggcagcaaggtccccctacagaggtccccactgcaaaccgatacccagcttagacagcagttctgcagtcggcgtctcaccccttcgggtctcattgtgactcactttgatagccacacgatttaagggtggttcagtagtgatttgatgagtgctgtggctcagggtcattcccctgcccaagcatttcaaattccagaagttcatgccctgcatggtgggtgaaaagtctcaggccaaccatgagcacacagcagccaggcgactgaggcagctgcccggggtggcacgttgctcaaacccatcatttggagtcaaaac

SEQ ID NO: 23298 - DNA, 1070 bp, Homo sapiens
cgttttgtttttttttttttctaaacctcacaccttttatttattagacttggattccagtttcctgagcctgtttgtgccactgattagacaggcttgaagcagaacccaccaggcttcctgaataaaatgcagcagtgattgtattagggggttttaaattgctcaaaatactgtctaaaaaacactaaaaatcatgttactttctagattgaataaaatcctatagaaatgaattcctggacttgatatgtagcaagctggcattggctcgggagtgagtgggctcagttaagtgagctaagatgagatggtgcacaggcgagcacccacctgaggagtgtktggatgttatgatagccagctcctctgtaaagacctgtccttctatgtcagcagcccagcagataaatgacgtgtaaataccacatttaggagggcttatgatgatgccaattaatggagacctttttgaaacaggaaggaggtgaaacatattcctttgcttctacatcactgtgtgccaggcactgtttacagcatctcgtttaaccagcagtcaccacctgacggatggctgatgtggggtggggtcccagggtgggattgcgtgatgggcttggggtctctggctgatgggtgccagagctgggactggaactcctggcgtgactgaggcagacacctgggctacccagcctcacccacgacgccctcactaagtgacccacaggactcaccggaagcagggcagcaaggtccccctacagaggtccccactgcaaaccgatacccagcttagacagcagttctgcagtcggcgtctcaccccttcgggtctcattgtgactcactttgatagccacacgatttaagggtggttcagtagtgatttgatgagtgctgtggctcagggtcattcccctgcccaagcatttcaaattccagaagttcatgccctgcatggtgggtgaaaagtctcaggccaaccatgagcacacagcagccaggcgactgaggcagctgcccggggtggcacgttgctcaaacccatcatttggagtcaaaac

SEQ ID NO: 23299 - DNA, 987 bp, Homo sapiens
cttccccttggtgacactttctgttctgctgctcttctaggaaatatagtattcaggattattcctgcttttcaggccgatttttaaagcacatggtgatttttttctgaaagagcaaagtgataggtcaaaatggatcctggatgtttcagagaataccctgaaaatagggatcagattattaatataacaaattcctgtccagttgacaggaagaaaccagtagggttttgtacatgtatcaaataccagtcattgggagccagtcaattacctattcttggacaatctagccccaaaagattgacaaatagtgttgtaatattttagcaccacttgtcaagaatggtccagtaccaggcagtgaagtttgcagtacagagatccttaagtagaactaaggcaaaagaaaaatcagtgtgtttatttggaagatctctgaaagtattaacctccaaatatataccatctgtaccctagtttacttttaaattctatttttgtgtaagctcagtttcaaaagccattcatcttcaccagaggatctccacttgttgcttctgcggaaacggaaacctccttttaaaatacaatgtgatatggagttttagatttcttgttgtctggcctgttgtaatactgtttttttaatctataaagttagctaatagttgaatatagttatccaggaaaacaaaggattcattataacgatttagtaccaaggaaagccatgaggctccctacggaaagtgggctttctgttactttaaacgtgtactttagcttactagtaaattgtagccagttgtagaactcatacattggaatgactagacatgtgaayagtaaaattagggataggggccttactggtaatgtaacggtaaccttaagcaaaaagcaagcaaggaaataaaatatctagaaaaataaagaacaaaataatgcattataaagcatgataatccatagtcttttcccgtg

SEQ ID NO: 23300 - DNA, 545 bp, Homo sapiens
acctgagtgtgtctatagtgtgtctacaatatgtgtgtatatctgtgtgtatatctgagttcagactgtgtaaatccaaacaggaaaatgacctatcgattaccaaataacttaaatttagctgaagaaataaaatgtatgcttaaaaattatgcaatccaacaagacagtaaataattaatattttcttaggaattataggatattgactagtcyctgtaccctgcacctcaattttgcctttatgttgcttccttcctaacaacttttaaattttgtaagtcattccattaacaaaaatctttccttcaacccttttttactgctcatttgacactttatgcttcttttgctcttcgtgattaaacctctcaaattagtatcaacttccatatctccttatcatccaatctgctcacatctcctattgctctacctatctgcaccccctgacattaccatttattccaggtcaccaaatccaaaggacacttttcactcctaatttttctctacatctcaacatctttgcatgttttcttaca

SEQ ID NO: 23301 - DNA, 545 bp, Homo sapiens
acctgagtgtgtctatagtgtgtctacaatatgtgtgtatatctgtgtgtatatctgagttcagactgtgtaaatccaaacaggaaaatgacctatcgattaccaaataacttaaatttagctgaagaaataaaatgtatgcttaaaaattatgcaatccaacaagacagtaaataattaatattttcttaggaattataggatattgactagtctctgtaccctgcacctcaattttgcctttatgttgcttccttcctaacaacttttaaattttgtaagtcattccattaacaaaaatctttccttcaacccttttttactgctcatttgacactttatgcttcttttgctcttcgtgattaaacctctcaaattagtatcaacttccatatctccttatcatccaatctgctcrcatctcctattgctctacctatctgcaccccctgacattaccatttattccaggtcaccaaatccaaaggacacttttcactcctaatttttctctacatctcaacatctttgcatgttttcttaca

SEQ ID NO: 23302 - DNA, 594 bp, Homo sapiens
aatccatatgtgaactgataatcggtctttttttttttttttttttttttagaaagaggaggaaatgttgcccagactctcatgggatttaaggcatatctttctggttaccaggcttccacttcttcaagaagataatgggtccaatctctgtgtgtaaaaaccactggacwcagtgtgaattctcttaacatgcagaccatttcagaatgtctgcagcccacatgttttcactgactggaacactggtggtgaacccatgagcagtataaaggagcatactgaaaacttcacaccaaggaacttcgactttgaatctatgtcaggaacacccttctctccatcccctttctttctctttcacagaaaggcttccacttatctctacttgcagccctcggttaatctgcccaagtttcctgtgacatcggcccctgcagtttttggttttcacatggggccctctcccccaacctaaaagggagaaccctttagtgtctgcctcattcctttctaccaagctatgtgactccacacgcgcaccagctctaatctttcctctgtgccctgacgactttctttcctctaatttca

SEQ ID NO: 23303 - DNA, 594 bp, Homo sapiens
aatccatatgtgaactgataatcggtctttttttttttttttttttttttagaaagaggaggaaatgttgcccagactctcatgggatttaaggcatatctttctggttaccaggcttccacttcttcaagaagataatgggtccaatctctgtgtgtaaaaaccactggacacagtgtgaattctcttaacatgcagaccatttcagaatgtctgcagcccacatgttttcactgactggaacactggtggtgaacccatgagcagtataaaggagcatactgaaaacttcacaccaasgaacttcgactttgaatctatgtcaggaacacccttctctccatcccctttctttctctttcacagaaaggcttccacttatctctacttgcagccctcggttaatctgcccaagtttcctgtgacatcggcccctgcagtttttggttttcacatggggccctctcccccaacctaaaagggagaaccctttagtgtctgcctcattcctttctaccaagctatgtgactccacacgcgcaccagctctaatctttcctctgtgccctgacgactttctttcctctaatttca

SEQ ID NO: 23304 - DNA, 601 bp, Homo sapiens
tttccaagattatcagtcaaatgatctaattaatgttaaaatgggtaacaaataatattttccatgtcaattcactttcaaattagcatattatgtactatgaacaattgccaagtctaagtagtgggtatacacatgtttgttgtaccagtctttggtttttttttttgttttttttttttttgagagagtctcgctctcttacccaggctggagtgcagtggcacaatctcagctcactgcagcctccacctcctgggttcaagtcattctcgtgccycagcctcctgggtatctgtgactataggggtgtgccaccatgtgtggctaatgaatgtatttttagtagagacagggtttcaccatgttgaccaggctggtcttgaactcctggcctcaagtgatccacctgcctcagcctcccaaaatgctgggattacaggcatgagccaccatacccacctgttgtactagtcttttaactttcattttagaaaacatttatattaaaaagttggtgaggagaagaagaaatctgtggtaaatgcacttccagtgagtaaactaagccaaatagtaaaatgtactagaaggtacgtaa

SEQ ID NO: 23305 - DNA, 601 bp, Homo sapiens
tttccaagattatcagtcaaatgatctaattaatgttaaaatgggtaacaaataatattttccatgtcaattcactttcaaattagcatattatgtactatgaacaattgccaagtctaagtagtgggtatacacatgtttgttgtaccagtctttggtttttttttttgttttttttttttttgagagagtctcgctctcttacccaggctggagtgcagtggcacaatctcagctcactgcagcctccacctcctgggttcaagtcattctcgtgcctcagcctcctgggtatctgtgactataggggtgtgccaccatgtgtggctaatgaatgtatttttagtagagacagggtttcaccatgttgaccaggctggtcttgaactcctggcctcaagtgatccacctgcctcagcctcccaaaatgctgggattacaggcatgagccaccatacccacctgttgtactagtcttttaactttcattttagaaaacatttatattaaaaagttggtgaggagaagaagaaatctgtggtaaatgcacttccartgagtaaactaagccaaatagtaaaatgtactagaaggtacgtaa

SEQ ID NO: 23306 - DNA, 1040 bp, Homo sapiens
actattaaaatattcctacacattttcaaaaacacatgagaaacacaatattgaagcacttatcctgctgtctccttttttattataatacaagtaacagaaaggaaaacttgagtactttatgtttctactccatgacattsttcttacttttatattagaaacttcacccttctccacattttcgggagttggcaatgtggaaacctcaaagatactagctctttcagtttattaccatagatataattattgggcatagttatacttgtatctgtgaaaagagacccagagaattgctatcgtgaaacagccagctaaaatgaaaatatagttggaattctgtgctctgcaaagtgggtcataattttatttcactctatctccctaagaaaattcatgaaagtcagtttggatgtttcattcagttatttgacagtaaagatgaaaactacatccagaaatgaagaatgggacaccaaatctcagaaatctgttctacaggaaagttattcccaagtatattcctgtcaaaattcgacttcattacttctcaataagacagaggtcttcattctacactaattctaagtgtttccttaaattttaggtacacttcactagtttaaaatgaccaactattccggaaatttgtataaacaagttaaaggcctcaataatacctgaaagcaaataattttactccttcttacattacctgataattatatacaggcaactgatatccagtggtgacctgaaatggtgaacttggataagcaggaaatgcctgaaaagaaaggttggcagaaaaaaatgaatatggtaaaccactttttaaaattacaaagaaatataattcccaatataacaacaatattacagaagggaaaatatcgtttttctacatacaacaatgcagaattccaaatgaatgactgatttatgaagaaagaaagattccatgtcaagtgctacactttgggtgtgaagggggaagaaatgacaaaagaattgacgacttcaccaaagtttacctt

SEQ ID NO: 23307 - DNA, 660 bp, Homo sapiens
catatacgacgtggaaaaaaaccaagaatgaacaggaagtctatgtttggctaattcacttaacatcaaggaaaacataatccctttgctccccaacaggcccctatggtggcatcttaaaaaaaaaaaaaaaaaggaaaccaaaactattaaaatattcctacacattttcaaaaacacatgagaaacacaatattgaagcacttatcctgctgtctccttttttattataatacaagtaacagaaaggaaaacttgagtactttatgtttctactccatgacattcttsttacttttatattagaaacttcacccttctccacattttcgggagttggcaatgtggaaacctcaaagatactagctctttcagtttattaccatagatataattattgggcatagatgtacttgtatctgtgaaaagagacccagagaattgctatcgtgaaacagccagctaaaatgaaaatatagttggaattctgtgctctgcaaagtgggtcataattttatttcactctatctccctaagaaaattcatgaaagtcagtttggatgtttcattcagttatttgacagtaaagatgaaaactacatccagaaatgaagaatgggacaccaaatctcagaaatctgttctacaggaaagttattc

SEQ ID NO: 23308 - DNA, 660 bp, Homo sapiens
catatacgacgtggaaaaaaaccaagaatgaacaggaagtctatgtttggctaattcacttaacatcaaggaaaacataatccctttgctccccaacaggcccctatggtggcatcttaaaaaaaaaaaaaaaaaggaaaccaaaactattaaaatattcctacacattttcaaaaacacatgagaaacacaatattgaagcacttatcctgctgtctccttttttattataatacaagtaacagaaaggaaaacttgagtactttatgtttctactccatgacattcttgttacttttatattagaaacttcacccttctccacattttcgggagttggcaatgtggaaacctcaaagatactagctctttcagtttattaccatagatataattattgggcatagatrtacttgtatctgtgaaaagagacccagagaattgctatcgtgaaacagccagctaaaatgaaaatatagttggaattctgtgctctgcaaagtgggtcataattttatttcactctatctccctaagaaaattcatgaaagtcagtttggatgtttcattcagttatttgacagtaaagatgaaaactacatccagaaatgaagaatgggacaccaaatctcagaaatctgttctacaggaaagttattc

SEQ ID NO: 23309 - DNA, 657 bp, Homo sapiens
gaataactttcctgtagaacagatttctgagatttggtgtcccattcttcatttctggatgtagttttcatctttactgtcaaataactgaatgaaacatccaaactgactttcatgaattttcttagggagatagagtgaaataaaattatgacccactttgcagagcacagaattccaactatattttcattttagctggctgtttcacgatagcaattctctgggtctcttttcacagatacaagtacatctatgcccaataattatatctatggtaataaactgaaagagctagtatctttgaggtttccacattgccaactcccgaaaatgtggagaagggtgaagtttctaatataaaagtaasaagaatgtcatggagtagaaacataaagtactcaagttttcctttctgttacttgtattataataaaaaaggagacagcaggataagtgcttcaatattgtgtttctcatgtgtttttgaaaatgtgtaggaatattttaatagttttggtttcctttttttttttttttttaagatgccaccataggggcctgttggggagcaaagggattatgttttccttgatgttaagtgaattagccaaacatagacttcctgttcattcttggtttttttccacgtcgtat

SEQ ID NO: 23310 - DNA, 657 bp, Homo sapiens
gaataactttcctgtagaacagatttctgagatttggtgtcccattcttcatttctggatgtagttttcatctttactgtcaaataactgaatgaaacatccaaactgactttcatgaattttcttagggagatagagtgaaataaaattatgacccactttgcagagcacagaattccaactatattttcattttagctggctgtttcacgatagcaattctctgggtctcttttcacagatacaagtacatctatgcccaataattatatctatggtaataaactgaaagagctagtatctttgaggtttccacattgccaactcccgaaaatgtggagaagggtgaagtttctaatataaaagtaacaagaatgtcatggagtagaaacataaagtactcaagttttcctttctgttacttgtattataataaaaaaggagacagcaggataagtgcttcaatattgtgtttctcatgtgtttttgaaaatgtgtaggaatattttaatagttttggtttcctttytttttttttttttaagatgccaccataggggcctgttggggagcaaagggattatgttttccttgatgttaagtgaattagccaaacatagacttcctgttcattcttggtttttttccacgtcgtat

SEQ ID NO: 23311 - DNA, 688 bp, Homo sapiens
ttaaaaaaaaaaaaaaaaaaaaaaaaagtaaccamaattatttaaatactcctacacgttttcaaaaacacatgagttacataatattggagtatttatcatgatggctcctttgttataataaaagaaacagaatagaaaaaagaagtactttaggtttctaatccccaaagttcttgttgttacttctacacagaaaacctcacctttttcccaattttatggaaacagaattgtggaaccctcaaagatattaattctttgaatttgttaccacagatacaattatgggtcacagataatagttgtaccattgaaaagagacccagagaactgctatcatgaagcagcaagctaaaataaaaatacaactgaaattctgtgctctaagaattcggtaaagcttttatttcactctgtatctctacaagattcaggaaagtcagtctggatgtttcagctctttgacagcaaagataacaaaatacatgctgaaacaaagaagggaacaccaaatctcagaaattgttctacggaaaagttattgctaagtaccctcctgtcaaaatcttatttcatcacttctaaataaaacagaggtcctcattacactaattctaagtgatttcttaaattttaggtacagttcactagtttaaaaggacaacctattcaagcaatttgtata

SEQ ID NO: 23312 - DNA, 651 bp, Homo sapiens
acagatgctagtctcagcactggaagggttctaggggcctctgctgtgccaggtggaactccttttgcttcagcactgtagggaggtcaagccacggtcggagggtactagggtgggactgcatggccaggcaggcactatttaccaacacagaggagatcggtactgtgatcctgagtgcagctgtgcgggtggcctcaggggagcccccaccacaaagcacacttgaatagtgtgccacatcagccatgcgtggtggctcatgcccgtaatcccagcactttgaaaggtggaggcgggcggatcccttgaggtcagaagttcragaccagcctggccaacatggcaaaaccccatctctactaaaaatacaaaaattagccaggcgtggtggcacacgcctatagtcccagctactcgggaggctgaggcaggagaatcacttgaacctgggaggcggaggttgtgtggtgagccgagattgtgctgcactctagcctgggtgacagagcgagactctgtctccaaaaaaaaaaaaaaagagtgcgccacatcacacgtcacactcatggtgtgatatagatcactctccttcagactggttaatcaaactcaagtaacagagttatctaactttatcacatgcaggaa

SEQ ID NO: 23313 - DNA, 651 bp, Homo sapiens
acagatgctagtctcagcactggaagggttctaggggcctctgctgtgccaggtggaactccttttgcttcagcactgtagggaggtcaagccacggtcggagggtactagggtgggactgcatggccaggcaggcactatttaccaacacagaggagatcggtactgtgatcctgagtgcagctgtgcgggtggcctcaggggagcccccaccacaaagcacacttgaatagtgtgccacatcagccatgcgtggtggctcatgcccgtaatcccagcactttgaaaggtggaggcgggcggatcccttgaggtcagaagttcgagaccagcctggccaacatggcaaaaccccatctctactaaaaatacaaaaattagccaggcgtggtggcacacgcctatagtcccagctactcgggaggctgaggcaggagaatcacttgaaccygggaggcggaggttgtgtggtgagccgagattgtgctgcactctagcctgggtgacagagcgagactctgtctccaaaaaaaaaaaaaaagagtgcgccacatcacacgtcacactcatggtgtgatatagatcactctccttcagactggttaatcaaactcaagtaacagagttatctaactttatcacatgcaggaa

SEQ ID NO: 23314 - DNA, 651 bp, Homo sapiens
acagatgctagtctcagcactggaagggttctaggggcctctgctgtgccaggtggaactccttttgcttcagcactgtagggaggtcaagccacggtcggagggtactagggtgggactgcatggccaggcaggcactatttaccaacacagaggagatcggtactgtgatcctgagtgcagctgtgcgggtggcctcaggggagcccccaccacaaagcacacttgaatagtgtgccacatcagccatgcgtggtggctcatgcccgtaatcccagcactttgaaaggtggaggcgggcggatcccttgaggtcagaagttcgagaccagcctggccaacatggcaaaaccccatctctactaaaaatacaaaaattagccaggcgtggtggcacacgcctatagtcccagctactcgggaggctgaggcaggagaatcacttgaacctgggaggcggaggttgtgtggtgagccgagattgtgctgcactctagcctgggtgacagagcgagactcygtctccaaaaaaaaaaaaaaagagtgcgccacatcacacgtcacactcatggtgtgatatagatcactctccttcagactggttaatcaaactcaagtaacagagttatctaactttatcacatgcaggaa

SEQ ID NO: 23315 - DNA, 544 bp, Homo sapiens
tgtacttttctgcgttcagctgaaaggtggagggctcagtgaggtggctcacacctgtaattccaatgatttgggaggccgaggtgggaggatcacttgagcccaggagtttgagagcagyttaaacaacacagtaagaccttgtttctacacacacacacacacacacacacacacacacacacacacacacatattagccaggcgtggtggcatgcgcctgtagttccagctacttgggaggctgaggtgggtggattgcttgaggcaaggagtttgagacaagcctggtcaacatagtgacaccccatcatcccccaaaatcatttttctttgttttaaggcagagcctcactctattgcccaggctggagtgcagtggtgtgatctcacctccttgcaacctctgcctcccgggttcaagcgattcttgtgtctcagcctcctgagtagctaggattacaggtgtgcaccaccatgcctggctaatttttgtatttttagcggagatggggttttgccgtgttggtcaggctggtcttca

SEQ ID NO: 23316 - DNA, 544 bp, Homo sapiens
tgtacttttctgcgttcagctgaaaggtggagggctcagtgaggtggctcacacctgtaattccaatgatttgggaggccgaggtgggaggatcacttgagcccaggagtttgagagcagtttaaacaacacagtaagaccttgtttctacacacacacacacacacacacacacacacacacacacacacacayattagccaggcgtggtggcatgcgcctgtagttccagctacttgggaggctgaggtgggtggattgcttgaggcaaggagtttgagacaagcctggtcaacatagtgacaccccatcatcccccaaaatcatttttctttgttttaaggcagagcctcactctattgcccaggctggagtgcagtggtgtgatctcacctccttgcaacctctgcctcccgggttcaagcgattcttgtgtctcagcctcctgagtagctaggattacaggtgtgcaccaccatgcctggctaatttttgtatttttagcggagatggggttttgccgtgttggtcaggctggtcttca

SEQ ID NO: 23317 - DNA, 544 bp, Homo sapiens
tgtacttttctgcgttcagctgaaaggtggagggctcagtgaggtggctcacacctgtaattccaatgatttgggaggccgaggtgggaggatcacttgagcccaggagtttgagagcagtttaaacaacacagtaagaccttgtttctacacacacacacacacacacacacacacacacacacacacacacatattagccaggcgtggtggcatgcgcctgtagttccagctacttgggaggctgaggtgggtggattgcttgaggcaaggagtttgagacaagcctggtcaacayagtgacaccccatcatcccccaaaatcatttttctttgttttaaggcagagcctcactctattgcccaggctggagtgcagtggtgtgatctcacctccttgcaacctctgcctcccgggttcaagcgattcttgtgtctcagcctcctgagtagctaggattacaggtgtgcaccaccatgcctggctaatttttgtatttttagcggagatggggttttgccgtgttggtcaggctggtcttca

SEQ ID NO: 23318 - DNA, 586 bp, Homo sapiens
gagcttcatggttctcttgaagaaaaataggaatggaggccacctctgtgtcaaaaaacaacatcccacatttctgtgtttcactttttttttttttttttttgagactgagtttcactcttattgcccaggctggagtgcaatggcgcgatctcggctcactgcaacctccacctcccgggttcaagcrattctcctgcctcagcctccctagtaggtgagattacaggcatgtgccaccacgcccggcaaattttgtatttttagtagagatggggtttctccatgttggtcaggctggtctcgaactgccgacctcaggtgatccgtgcctggcttacttttttttttctttttctttttcttttctttctttctttttttttttttttttaagagatagggtcttgctatgttgcccagactggtctcaaacgcctggcctcaagtggtcctcccaccttggcctcccaaaacgttgagattacaggtgtgagtcaccacgcttggcctgttttacatgttgacggacagcatataatcacatgtataagggtttctgcttgtaaaagtctggaaacccatt

SEQ ID NO: 23319 - DNA, 881 bp, Homo sapiens
tcctgcctcagcctcctgagtggccaggactacaggcttgtgccattgtgcccagctaattttttaaattttttgtagagacgggtctcactatattgcccaggctggtcccaaactcttggcctcccaaagcactgggattacaagtgtgagccaccgtgccctgcctcttcttcttttgagctagtcggtttctgaggttgccttctgctctattgttgctgtggttttcaggatgtagttagggccctacaggaaagtgcctggtggcccttagggcctggcttcacctccctctgctcctccaagaccttggccccatggatatttgtcctgggtctcaccactgccctggcggcctttgggaatcatcctcacaggtagaggaattgaggctcgggaaggggacttgccatgctcagcacacacggctttgagcgggagcatacgcctctagcatcgtctccagcctctgcagctcatgggactggctgccagccccaatcccagagggtgtggacttggagaggggctttggatctccttcctctccggcctcctggctttgcccctcgccctgcatagaaaactcggagtcctcatgtctcacgtttcccactctgtctgggatctcctggagatggtcacagacaggaaagccagggagggcctaataggtggaccaggagttggggagaggaggagggtgcctgaggccatgactatagggacttctcagagaaggacacttcaggaggcagttggtgcccccatctgggaacgttctgcaggtccgagccctctgaggayggtgagggcgattgataacctctgaggttccgtccacccctaggggcccctatcttgggaacctctggatc

SEQ ID NO: 23320 - DNA, 570 bp, Homo sapiens
agaacgttttactagcaggtttcattagccaaggtggaccagtgggtattttctgacattgcaaaagcagcttcaaagtgccactttcctttcctttccaggacgggtcaaataaaacaactctactccattctgtaagagattcaggcacagaaaggagaagatactgggctgctgacacattttctattcataaatgcttctgtttatagtagaaaatatgacattcaccatgagctgaccagccatcagttctgacatttatcagygtcactttagaaacccatgtgggaaggcagaaaagcagaagggaacagaaactcacatgccacttgtagcagaatgcttgtgccatcctgactccccctctctgaaagcctgactgtgcaccatcctccttgataacaactaccaaccactgagcaagcctgcggtaggttatgtaggttctaggggaaggggatacaaagctatgttggacacttggaaatgcttagaatccagtcggggagccagcacaggaaacagtaacatctgaatgcatagccagctactggccctctacatgta

SEQ ID NO: 23321 - DNA, 576 bp, Homo sapiens
gaccacccaacccaggacaggaagtggagcagacttcatctggaacttgggaatgcctgcctccatgaaaaaaagtgtaagtgagatttccccctttttgatccatcttcaaccacttgataaattttcacaaaatcagtaatttcccaatgtggttgtgatggagcagggtagcttcctatttgcaagcattgggttaagcatctatgttttaaaagaattaaacatattaatataatactgtcccaatagtgcttacaaaacgtgtgtgggagacacactgctgagtttcaggaaataaacatcccttaacacaacacattgtaatcaaagaagcatattcacaaaacgttaaaactttttgccaacttcatgccagcaagcccagagggagagaacacgtatgctctttttcaatagagtatcacattatagacccattcaataaggtctgtatgagttcatttgtttccagataaagatttctgtgtgtgrggagacttaacaacaaccacaaaaaaaggcttcgtggagaagggaacaaattagttggtgttttaaaagacagaagtatgt

SEQ ID NO: 23322 - DNA, 781 bp, Homo sapiens
tcatttacactctggaagggaattgtggagagggaggtatagatgaggggatggaagggaagggcaccggcaaatattgttgatagcgagggaagggcggtattgtgatcggctttgactgtcagcctaaggaatttgaatttcattctagagatccaggggaggtgtgtaaaagacaggatcagaacgttagttcaggaagcttaatcttttctgcccccccatctgagatgtacaagagggttagaaagcagagttggagaagctgtttgggagggagcacttatttgtttttttgttttgttttgtttttttgagatggagtctcgctctgttacccaggctggagtgcagtggcgccatcctggctcactgcarcctccacctcccgggttcaagtgattctcctgcctcagcttcccaagtagctaggactacaagcacctgccaccatgcctggctaatttttgtatttttagtagagacggggtttccctctgttggccaggctggtgtcgaactcctgacctcaggtgatgcacccaccgaggcctcccaaagtgctgggattacaggcgtgagccactgcgcccggcagggagtgggtaaagtgagaggcataagggtcccggccaggtgttagcagggggcttcagaggtgaggagagagcagggcaggcagctgctaggcctgggggagcgggctgcggaggactgagaatctgaggtttttctcttggccgcctgggggaaatccagggggaaaaggagaatgaggaag

SEQ ID NO: 23323 - DNA, 1043 bp, Homo sapiens
atccccttcagcctcctgaatagctgggactacaggcacaggctaccatgcttagctaatttttaaagtttgtgcagaggcagcttcactgtgttgcccaggctggtsttgaactcctgggctcaagcaattcacccgccttggcctcccaaagtgctgggatgatagacatgagccaccatgctcggcagtgttcatctttcgtagctattgctagaccatttcctgaatgaaatgcttataccagtatccactttaccagcagtgtcctgtgtcttgcagctccacagtcttaccaacatttgctgttggccaagtgaatgggtagaaaatggaatctttgggaacttggtttctaggtccctgagccctgctgctgaatatctcctcttatgtttattggcatatgtgtttcctgtgaaatattcatgtcttttgccagtttttcattagggttcttggtgctttattttttgttgatctatagggctctttatatattgctgattttaatccttcgtgtctattgcaaatatcttctcccagcttttaacctattattcctctttctttaaggtgtcttctgttgatcagccattcttcattttaacatagcgaaatgtattttttccctagtactcagttttctgggtctggtttgaagtcttttcctgaacataacccttgcctttaaggagcgtatgcattctccagtggaggagacagataatggcactgagacgtcatgtgggcattgattgttagaagtggccacttctgcctgtggagcgggagcgaacttaggaaagatctcacagggcagagtcttgagctaggaattaagagatgagtaagtggacaagtgcgatgggcattctcagtgggggacgaagggcatgaaacatcctgacctgccctgggcactgccaggaggtccagatggcaggagctgacggtttgaggggctcgggcagggcatcccgaggacagctttgggtgatctgtatgcaagggaatattgaagccatgggaacagatcctga

SEQ ID NO: 23324 - DNA, 1043 bp, Homo sapiens
atccccttcagcctcctgaatagctgggactacaggcacaggctaccatgcttagctaatttttaaagtttgtgcagaggcagcttcactgtgttgcccaggctggtcttgaactcctgggctcaagcaattcacccgccttggcctcccaaagtgctgggatgatagacatgagccaccrtgctcggcagtgttcatctttcgtagctattgctagaccatttcctgaatgaaatgcttataccagtatccactttaccagcagtgtcctgtgtcttgcagctccacagtcttaccaacatttgctgttggccaagtgaatgggtagaaaatggaatctttgggaacttggtttctaggtccctgagccctgctgctgaatatctcctcttatgtttattggcatatgtgtttcctgtgaaatattcatgtcttttgccagtttttcattagggttcttggtgctttattttttgttgatctatagggctctttatatattgctgattttaatccttcgtgtctattgcaaatatcttctcccagcttttaacctattattcctctttctttaaggtgtcttctgttgatcagccattcttcattttaacatagcgaaatgtattttttccctagtactcagttttctgggtctggtttgaagtcttttcctgaacataacccttgcctttaaggagcgtatgcattctccagtggaggagacagataatggcactgagacgtcatgtgggcattgattgttagaagtggccacttctgcctgtggagcgggagcgaacttaggaaagatctcacagggcagagtcttgagctaggaattaagagatgagtaagtggacaagtgcgatgggcattctcagtgggggacgaagggcatgaaacatcctgacctgccctgggcactgccaggaggtccagatggcaggagctgacggtttgaggggctcgggcagggcatcccgaggacagctttgggtgatctgtatgcaagggaatattgaagccatgggaacagatcctga

SEQ ID NO: 23325 - DNA, 1043 bp, Homo sapiens
atccccttcagcctcctgaatagctgggactacaggcacaggctaccatgcttagctaatttttaaagtttgtgcagaggcagcttcactgtgttgcccaggctggtcttgaactcctgggctcaagcaattcacccgccttggcctcccaaagtgctgggatgatagacatgagccaccatgctcggcagtgttcatctttcgtagctattgctagaccatttcctgaatgaartgcttataccagtatccactttaccagcagtgtcctgtgtcttgcagctccacagtcttaccaacatttgctgttggccaagtgaatgggtagaaaatggaatctttgggaacttggtttctaggtccctgagccctgctgctgaatatctcctcttatgtttattggcatatgtgtttcctgtgaaatattcatgtcttttgccagtttttcattagggttcttggtgctttattttttgttgatctatagggctctttatatattgctgattttaatccttcgtgtctattgcaaatatcttctcccagcttttaacctattattcctctttctttaaggtgtcttctgttgatcagccattcttcattttaacatagcgaaatgtattttttccctagtactcagttttctgggtctggtttgaagtcttttcctgaacataacccttgcctttaaggagcgtatgcattctccagtggaggagacagataatggcactgagacgtcatgtgggcattgattgttagaagtggccacttctgcctgtggagcgggagcgaacttaggaaagatctcacagggcagagtcttgagctaggaattaagagatgagtaagtggacaagtgcgatgggcattctcagtgggggacgaagggcatgaaacatcctgacctgccctgggcactgccaggaggtccagatggcaggagctgacggtttgaggggctcgggcagggcatcccgaggacagctttgggtgatctgtatgcaagggaatattgaagccatgggaacagatcctga

SEQ ID NO: 23326 - DNA, 1043 bp, Homo sapiens
atccccttcagcctcctgaatagctgggactacaggcacaggctaccatgcttagctaatttttaaagtttgtgcagaggcagcttcactgtgttgcccaggctggtcttgaactcctgggctcaagcaattcacccgccttggcctcccaaagtgctgggatgatagacatgagccaccatgctcggcagtgttcatctttcgtagctattgctagaccatttcctgaatgaaatgcttataccagtatccactttaccagcagtgtcctgtgtcttgcagctccacagtcttaccaacatttgctgttggccaagtgaatgggtagaaaatggaatctttgggaacttggtttctaggtccctgagccctgctrctgaatatctcctcttatgtttattggcatatgtgtttcctgtgaaatattcatgtcttttgccagtttttcattagggttcttggtgctttattttttgttgatctatagggctctttatatattgctgattttaatccttcgtgtctattgcaaatatcttctcccagcttttaacctattattcctctttctttaaggtgtcttctgttgatcagccattcttcattttaacatagcgaaatgtattttttccctagtactcagttttctgggtctggtttgaagtcttttcctgaacataacccttgcctttaaggagcgtatgcattctccagtggaggagacagataatggcactgagacgtcatgtgggcattgattgttagaagtggccacttctgcctgtggagcgggagcgaacttaggaaagatctcacagggcagagtcttgagctaggaattaagagatgagtaagtggacaagtgcgatgggcattctcagtgggggacgaagggcatgaaacatcctgacctgccctgggcactgccaggaggtccagatggcaggagctgacggtttgaggggctcgggcagggcatcccgaggacagctttgggtgatctgtatgcaagggaatattgaagccatgggaacagatcctga

SEQ ID NO: 23327 - DNA, 1043 bp, Homo sapiens
atccccttcagcctcctgaatagctgggactacaggcacaggctaccatgcttagctaatttttaaagtttgtgcagaggcagcttcactgtgttgcccaggctggtcttgaactcctgggctcaagcaattcacccgccttggcctcccaaagtgctgggatgatagacatgagccaccatgctcggcagtgttcatctttcgtagctattgctagaccatttcctgaatgaaatgcttataccagtatccactttaccagcagtgtcctgtgtcttgcagctccacagtcttaccaacatttgctgttggccaagtgaatgggtagaaaatggaatctttgggaacttggtttctaggtccctgagccctgctgctgaatatctcctcttatgtttattggcatatgtgtttcctgtgaaatattcatgtcttttgccagtttttcattagggttcttggtgctttattttttgttgatctatagggctctttatatattgctgattttaatccttcgtgtctattgcaaatatcttctcccagcttttaacctattattcctctttctttaaggtgtcttctgttgatcagccattcttcattttaacatagcgaaatgtattttttccctagtactcagttttctgggtctggtttgaagtcttttcctgaacataacccttgcctttaaggagcgtatgcattctccagtggaggagacagataatggcactgagacgtcatgtgggcattgattgttagaagtggccacttctgcctgtggagcgggagcgaacttaggaaagatctcacagggcagagtcttgagctaggaattaagagatgagtaagtggacaagtgcgatgggcattctcagtgggggaygaagggcatgaaacatcctgacctgccctgggcactgccaggaggtccagatggcaggagctgacggtttgaggggctcgggcagggcatcccgaggacagctttgggtgatctgtatgcaagggaatattgaagccatgggaacagatcctga

SEQ ID NO: 23328 - DNA, 1043 bp, Homo sapiens
atccccttcagcctcctgaatagctgggactacaggcacaggctaccatgcttagctaatttttaaagtttgtgcagaggcagcttcactgtgttgcccaggctggtcttgaactcctgggctcaagcaattcacccgccttggcctcccaaagtgctgggatgatagacatgagccaccatgctcggcagtgttcatctttcgtagctattgctagaccatttcctgaatgaaatgcttataccagtatccactttaccagcagtgtcctgtgtcttgcagctccacagtcttaccaacatttgctgttggccaagtgaatgggtagaaaatggaatctttgggaacttggtttctaggtccctgagccctgctgctgaatatctcctcttatgtttattggcatatgtgtttcctgtgaaatattcatgtcttttgccagtttttcattagggttcttggtgctttattttttgttgatctatagggctctttatatattgctgattttaatccttcgtgtctattgcaaatatcttctcccagcttttaacctattattcctctttctttaaggtgtcttctgttgatcagccattcttcattttaacatagcgaaatgtattttttccctagtactcagttttctgggtctggtttgaagtcttttcctgaacataacccttgcctttaaggagcgtatgcattctccagtggaggagacagataatggcactgagacgtcatgtgggcattgattgttagaagtggccacttctgcctgtggagcgggagcgaacttaggaaagatctcacagggcagagtcttgagctaggaattaagagatgagtaagtggacaagtgcgatgggcattctcagtgggggacgaagggcatgaaacatcctgacctgccctgggcactgccaggaggtccagatggcaggagctgayggtttgaggggctcgggcagggcatcccgaggacagctttgggtgatctgtatgcaagggaatattgaagccatgggaacagatcctga

SEQ ID NO: 23329 - DNA, 999 bp, Homo sapiens
agacctagtcctcctcaaacgtctgtgggcagaaacattaccaaggagtctgttaaaatatgcagattcctgggcctgcccctagacacttccaggttggggcccaggaatctgcatttcgcaagcagccccaggtgctgctgactcagctattgatagaactcattctgagaaacaccacacacactaagaggggtttcaacaactgttgcttgcccctccccagaagatctgaacaccctgagcccaagctcctggaggacccaagaggagttggaggcgtagaaagaaaaggcaatggagccgggtacggtggctcatgtctgtaatcccagcactttggaaggccaaggtgggtggatcacttgaagccaggagtttgagaatagcctggccaacatggagaaaccctatctctactaaaaatacaaaaatcagccggatgtggtggcacatgcctgtaatcccacctacacgggaatctgaggcgtgagaatctgaggcaagagaatccttttaacaaggaggcggaggttgcagtgagccaagattatgccagtgcactccagcctgggccacagagcgagactgtctctcaaaaaaacaaacaaaaaaaaaaacaaaacaaacaaacaaamaaaaaaaaaaacacgtacaatggtctaccattgctatcctggagttatcatcgtgaaaacgatccagcaaggcaggatctgccaatgtcccgattttacagatacagacagtgtggcccaacgtcactcagcaagaaagtggcagagctgggtcccatcagtgaatgcctgcaggtgcctcattccagcctctaaagtcatcaagatctaggccccatggcctcaccttggcagacctcactcatgctgttcccacccccaaaatgctgttcccagtcctccatgagcagctcctctcatccttcagcactcagcttcagtgcccctaccaccttctctgactcccacacatctccctgct

SEQ ID NO: 23330 - DNA, 508 bp, Homo sapiens
gtcttgattgattcaaaaagctatgaaatgatgtgaacagatgaacactgaataaatactaaagaagataacgaataagtcagagcaaatttttttatttcatctcaaaaatgtaagctgattagctgaatcatcacatataaaagcccaaagagccaaatttcttttattcacttaataaacttttattcactctgtatttactgtgggccagacattgtgctaaacgccctggaaacagaattgagaaaaacacaatcctactttcaagtccagtgagaaayagagaaataagaaattcaataattgaaacacaatgtgatatggaagaaaattgaaagtctagaaatagaactacgtaagtatgaccaagagatgcaaaagcaattcaatgaagaatgggtggtcttctcaaaagatgacattagaaacattgggtattcactggcacaataatgagcctcaacttaaaacctacattgtatgtaataattaactcaaaattgat

SEQ ID NO: 23331 - DNA, 361 bp, Homo sapiens
aaaggcagaaggatgttgagaagatgaacaaaaacttctgcttcattcttgtaggcatttgrgtttgtaactgtgtctaaatcttctctgcttggagaagttctgacatagagttgagcataggttaagacataaaaaaccttgccagtatattgaacatttcctaattaagctttcaggaaataaatggccaaagcataaggttagtaaataaaatggtggttcctgtgtaggtagtcaagtgaattaaaggatagagtaatttttttttagtttatgcatatcagtttagccaaatactaacaagcatggactgctggggttccaagggagccccaagtctccttgaatattgatgcgg

SEQ ID NO: 23332 - DNA, 570 bp, Homo sapiens
aagggcaaaggtcccgatgccgggaagatcttggagggtttgtgacacggaagggctggtgtggctggatttagtgggagagggagaaggttataaggggagagaagagatcagaaaggcagctgggagcaggcttgtagagggctttgctagccagggacagtttgttctctggcattttccagcactgattgcattgtacacaaagtaggcacccaatgagtgatgaatgaacaaactaaaagataaagacctgaggctgttgacactcatagctttcctttgctttacttggcaaagattaggattaacctctactcatcctttgcatacctctcgctcagaacctcaacacctctttctccttgcaagattgttcttagtgtccttggtagcccagtgtcccctggttaaaaatggccttagggaaagaatttgcggaaaagatggctatctgaagaagatgaccacatctcctttttggctttgtctattctgttcaacagctcccattctgattttttccatagggtttagcagatctggcatcagcctgccactmttggttag

SEQ ID NO: 23333 - DNA, 534 bp, Homo sapiens
tgcagagtccgtccagcaccctagggttgatttccctgggggtgttgttagccactcaggatgaccagcagccattcctggagaatgagaacaaatctcagaatcatgtgatctgtctctagtcccagctccactagctgtgtgaccttggacaagttacttaacttcttttcactttcattttctcatctgaaaagaaggggaagtaacaccttgtaaggactgaataatatgatgtctgacaaaaggcaccgtgcccagcacaattcccagagactgtttgtggagtttggatctgaatgcagggctggcgttaatcatyctttgtggggagcagcccaggaaaatcttctggtcccctgtttccctctcatagtccagtccaattcccattggcactttggggaaggcagtgattttcaagatttatctcagagcagaactcttttgtcaagcaaacttaacatggaatggaacggaacggaagtatataaaactgataaagctgagctcacttgtcaaagcagggctggg

SEQ ID NO: 23334 - DNA, 471 bp, Homo sapiens
gccatcgacagtatgtctagctatgttgcccaggtctagctatattgcccaggctggtgttraacttctggcctcaagtgatcctcctgccttggcctcccaaaattctgggattacagttgtgagttcccatgcccagtgcaacacggttttctattaaaacctctctttccttgatctttcctgggctgtgttggcaaacagctcctgcaaactccctgttccagggtctgagttgatgggtgctggctagatcagtgaggcctcaggttttttttctttttgtttttgtttttaatacactatgccctggatttttggctgctggctcatactccctctggtgccgtaatcattaactcctgcaagaagcccacaagacagacagacatcaaagcccctgttttgctcaacaagaggcagtgtctgttgaagtcctgagatggagagaggtaaggaaagagatggctg

SEQ ID NO: 23335 - DNA, 575 bp, Homo sapiens
tatctgggtgggtccaatggaatcacaaggggccttacaagagggaggtaggagggccagagattgaaaaggacaggtgactcagaagcgcaggttgagcgaggcgctcagaagatggagaatggggccagaagcccaggaatgtggggggwctctagaagctgagaaaggtaaggacttggaagctcctctagaacctctagaaagggacacagccctgctgacaccttaacccagtgacactggttgcaggctcctggcctccagaactataagagaatacatttatgttggtttgagccagtaaatttgtggtaatttcttatagcagcaattaaaaaaaaaaaacgaacatacttcccacttcaaatagtaggagaaaacatccaacgttgttatctctccagctgaccgactgtgcatgtgcactcacctttcctgttcattcattccccagtgcacctctttaacaggagagttcccagtaaagtcatatggccaaggaaataatggctgtgatttcacgcactctgaagaattacaagccatactattttgtagtaaatgacattaca

SEQ ID NO: 23336 - DNA, 575 bp, Homo sapiens
tatctgggtgggtccaatggaatcacaaggggccttacaagagggaggtaggagggccagagattgaaaaggacaggtgactcagaagcgcaggttgagcgaggcgctcagaagatggagaatggggccagaagcccaggaatgtggggggtctctagaagctgrgaaaggtaaggacttggaagctcctctagaacctctagaaagggacacagccctgctgacaccttaacccagtgacactggttgcaggctcctggcctccagaactataagagaatacatttatgttggtttgagccagtaaatttgtggtaatttcttatagcagcaattaaaaaaaaaaaacgaacatacttcccacttcaaatagtaggagaaaacatccaacgttgttatctctccagctgaccgactgtgcatgtgcactcacctttcctgttcattcattccccagtgcacctctttaacaggagagttcccagtaaagtcatatggccaaggaaataatggctgtgatttcacgcactctgaagaattacaagccatactattttgtagtaaatgacattaca

SEQ ID NO: 23337 - DNA, 1197 bp, Homo sapiens
tactcttaattggcctgtcacttacacaatttttatatatctttgtgaaagcatttgattttataggtatgtattttactgttcctgaaactactataatttctattaaaagtctgaaataggtttagtacttgtgcggctttcaaaacaaaaaggtctataaaatatccaatatttttcaagcttatccaaatatctgcaatgttcatttgaaaaggaatttcattaataattcattattttcttgaatggaatgtacatataagatgaactctttatgggaaagcaatactgaaaaacagagttaatataatagaaagcttccataacaataactgaagatttttccaccttctaaatggttctacaagtccaagggattaggagaggcctgcagaaaaaatgtaaatggaaacgtttttatacttttacagtgtatacagaatcctcaaaatataaatcactgagtctgatccctttgagtttgggtacactcctacatgaaaattaaaatagcaaatctacccaaggaaacatttatgcctgatacacagatagaactcaaacctaagactcttgaatattaacttaacacacttgttaagttaactgaacacacttgtgttgtctactctgacataggaactcttaacaacgatgaataggagacagttcttgtctgaaagaactcaccttctcttgagggagacagacataaatagtgatgtgccagtagggyatatgtaggattaggcataaattttgagaataggaagacagaggagatacaacaaaaccagtctgggtgttcagggaaggtttcctgttagaggaaacacatgcatgagcaaagacttaagaggtgtaaacaagacatggcacataagcaattagcagtgatgggctgaagaaagtaaaagataacagaggatctttcatgacatgaagaaaagctaggacttgattctgtactgattgagtaccattgatagatttttttattattattatgctttaagttctagggtacatgtgcataacgtgcaggtttgttacagaggtatacatgagccaggttggtgtgctgcacccattaactcgtcatttacattaggtatatctcctaatgctatccctcccccttccccccaaccccacaacaggccccagtgtgtgatgttccccttcctgtgtcca

SEQ ID NO: 23338 - DNA, 956 bp, Homo sapiens
ccgaacagttgaaagatctttttggaactacagctttcccaattaatgacacatctacatgtgttcaaacatattcatggttttggcaggagaacctttattctgaagcgggcatgagtatattataacctgtggctcatgtaaaccactggggtctatgattgttcacatttggtatcacacacttgtctgtgtttaccattttaaaaatatttttaaatgtaatttgaatcaaacatttctagaacccttgaaatgaataagttgacctccattgtgttagaataaggtgtaagaaaattgtggtctcaggtgggatctttagcagggctggcttgggargacctccctgttttgatcaggtaaacatctgcccaggtcagggctttcacctccggggagctcagcagtttgtctgtgctgaattcaattgaattgacacggggcaggtcctatgtggttgtaggactagttccccctggtgaggaatgattaggaaggtctcaggtagaagccgcccacctccccaagaagccacacaggtcccacccagggaggctggcacaatccccacccagaacttctctccccccagctccttgcggggtggggtgggggtgctgctctgggcttctagacttccaggtcaaggttttttttgtttttttttcacccactcacctcctgctgacttcctctgggtccctgtgcttgttctctggttttaataattgtaatgaccttaggagtcacttttgggactgggaagccaacacagaaacaaatcagatgaccaggaatactccttgttcccattcgtgtgttccttggtcaggcgttacttctgcgagttctacatatttgtagatgtctccggtgtactgggtttgggaagccccactgattaggaatagaatgtgggcaagtgattgcctttttaaaatgtcctgaattaa

SEQ ID NO: 23339 - DNA, 617 bp, Homo sapiens
gctctgccatggtaaggatccctgggcccccccaccccagagctgttcatgccctactttctggtggaacactggacgagcctgaaaaggaggttcttcctcctctgtatcagactgagtgraggtcccttacctgtgctgcatccaacaaggactgagtgtgcctgtcccatagtgtagtcagaaatgcccatcctactctactgggaaaggcccacttctgtccagtgttctgtgcttccaggtacttcagcaccttttccatacttatgggggacctgtccactgccacccatgtttccattgggggccatcgaagcagcatggccacatagcttacccgggatcatcaggctgagggctcactcacctcagaatcctaccgactatgccaagtatcgggttccagcccaagctggggtctgaggggagctggtggacaggtggctccctggcacttgccactttctggcttcccacccttgtctgcctgcaaggcagctggcagctctctttcagagtcagcagtgcagttatattactcacagaaaatagtggctcaaagccaggtgatgagcccacccataatgtggttacataactgtgattatataatg

SEQ ID NO: 23340 - DNA, 603 bp, Homo sapiens
acagtcgatgcaccgacagacacagagctcctaaaactcaaaaatatttctacctccggttaattattcattgagaattaacaaagcggctgcagttttagccaccccaggggtgtggctgcgagagccttggctttgagctttgtttttacgatgcagccctccacctcttctctgggttaatgaatccactattcattgctttttaatgtggattaatttcatcattcccttcatttaattcaactaaatacctacaggctaatgctgatcaggggaacagaacacagcttttcttgaaatataggttaagttttgttttccaccattatggttttgccaggagtcttaagtgcccagctgctctttcctcagcagaaatgttgcttacaaaacaacacatgagcgtgtggttgtggaggaagtacacgttctcatggcacagctttcccattacacagtcgcctgtccacgcagcttgctggggtgggagaaggccggcctccagttacgtttgmcctggcgaggctggaagggccaaccaagtggacgtctttaatcaatatggcggtggtcttgcttaggaattgccaattcttacaa

SEQ ID NO: 23341 - DNA, 597 bp, Homo sapiens
tactctgctctgcctgttcttacagtggcctctgcaggatgctctgttcctgcttcctgcagatgctcctgcccactaggatgagaagccatctctgctctgcctccccaggtggggcacactgtacttcacagtgactgttttcctgccagtcaggaaagagtttgccttgactgctcatgcattcatccacaagcatgtctggagtgctagtaagctagtaagcacagtgccagctcccagtctgtgtgtgtattccatcaaagcaagcctgcccttgctctagaataagacaggcagacaggccaggcacagtagctcacgcttgtaatcccagcactttgggaggccgaagcgggcagatcacctgaggtcaagagtttcagaccagcctggccaacatgatgaaaccccgtctctactaataataaaaaaaaattagctggtcatggtggtgcacacctgtaatyccagctactcggaaggctgaggcaggagaatcacttgaacccgggaggcagaggttgcagtgagccgagattgggccattgcactccagcctgggtgacagagtgagactctgtctcaaaaaaaata

SEQ ID NO: 23342 - DNA, 589 bp, Homo sapiens
aggatgggaggctggacttttgggctaaggaggttgaatttatcctgtaggtttggggtgccaacgaaagcagcagtgggtggcatagacagagccatctggagaagcaaatgcagaagcaaatggagaaggctcagtgaaagatggttgggatctaaactgaatagaacgaagacgaaagcacagctagaaaatgtgtaagacacagagtcagcaggatttggtgtctggattggggagatgagaggtgggaagaaagcaggtacaaytccaaatttttcatttgagtaactgggtgattaagagtttcatgaaccaaccaggtgtggtgcctcatgcctataatcccagcgtttgagaggctgaggtgggaggattgcttgaagccaggagttcaaaaccagcctgaccaacatggcagagtagtcaggtggcaaaacctacagggaactggcaataagcacctgaagcttaggagaaaattctagcagtagataggtttgggaaccattcatatgtaggcctcaggtgatgcagaaaaagaaggccattcatcaaacaggggagcagactggggagggagaggaaa

SEQ ID NO: 23343 - DNA, 526 bp, Homo sapiens
ctgttgatccaatatgctgtgctatctttaaaattatttagccagtcttttactatctgctgggcacaaagccaagttcattagaggtattatctgattattttgtgttatattttctcctattatacctaactctaggtctattgcaagatcaagtttgtgatcctctgcctatttctcctcttgactacttcaaattccaagtattttttagaagattttaacttgcatcaaataattattgatgtacaggtcatggtggcakggctctggacataggaaagtgaacaaggtaggcttgctgcctgcttgaagttgacaacatagtggatagaaagtgagacagagaagccacaaatcattacctgagccaatcagtggcccactgagaacactccttccaggtcatgaaatttcaagtgaagtggcacaccagctcacccacctacttcccaccccgaccccagaatccccttcctggaaaccttgtgctacctccaaagccaaactctcaaataaaccccag

SEQ ID NO: 23344 - DNA, 560 bp, Homo sapiens
tttgcttaattgtaaaaattctggacttctttctttctcttctttatgactttctttttttatttttcccttcttccttttgttctccttttttctctttctttttatcctccttgtcttcctcccacatctctcctcatccataattttaatgcaaaatagttccaaaaaaaggtggccaattggctcacagctcaccaattaacttttagagaaaaagagttaattttttttgtttttagtaacatgacattgtattttcattgttttcatgaagctgttacttagactttcgtttcaacgcagcacyataccaagtggtatagatatggttctaccctccaaaagcttgtaacatatcccaaaacctacaactcccagtctcagttaaccaaagaaaaccaatagaatatttctataccggtatttctcaatcccctgatttgaagtaaaagttttgagctaagcatgacattcaagaaaatatatgggcaacaaggttgccatggtgtttatcacttccccaccatttcaatgatgaaaataaatacagacaccag

SEQ ID NO: 23345 - DNA, 560 bp, Homo sapiens
tttgcttaattgtaaaaattctggacttctttctttctcttctttatgactttctttttttatttttcccttcttccttttgttctccttttttctctttctttttatcctccttgtcttcctcccacatctctcctcatccataattttaatgcaaaatagttccaaaaaaaggtggccaattggctcacagctcaccaattaacttttagagaaaaagagttaattttttttgtttttagtaacatgacattgtattttcattgttttcatgaagctgttacttagactttcgtttcaacgcagcactataccaagtggtatagatatggttctaccctccaaaagcttgtaacatatcccaaaacctacaactcccagtctcagttaaccaaagaaaaccaatagaatatttctataccggtatttctcaatcccctgatttgaagtaaaagttttgagctaagcatgacattcaagaaaatatatgggcaacaaggttgccatggtgtttatcacttccccaccwtttcaatgatgaaaataaatacagacaccag

SEQ ID NO: 23346 - DNA, 555 bp, Homo sapiens
caaaatgcaaatgtgatatgccctgactatgtagaattattataaccaacaaatatcaacagaggaagaaaaaaaaatgagaggcatggtagatacaatgattctgctgaggataaaggatatgcttttaaaaaatcaaatccaagacctaattatatagaacaatacaaaggtaaatggtaagaagataatataattgtattaccaggaagcagagcaggaaacagagaggaaaaggtatgccctcactctgtccattggccgtaggagaaaatcaataggtactatataaagaaatagaggattgggatattatatttgttatactaataaatgtgaaagagttgaactcacctctttaaaaagacataytcagattatatcacaacataaaattgaattctgtgctgaatatagagtctcagaaaagctgaaaataatagaatggacaaaaatatattaggctaactcatacaaaaagaagaaaatcaccatctgaatattatacaaagttaaattcaggctaaaaagtatttaacaagtcagggaggggta

SEQ ID NO: 23347 - DNA, 808 bp, Homo sapiens
ggacctgcataaactgtaaaattccttggcatcctatggaatgcagagatatagtccattttacaaaaggctaaggctaaaatattagaatttgcaaaccctactacttaaaaggaggcccagacatttattggctggtttagattctggagacatcatattccccacttgggtaacattttacaacctctgcatgcagccactagaaaacgctatgactttcactggggaaagaaggagaacatggcttctgaacaagctaaatgagtgggtcaactggccctggatctatgrcccatacaggatgggccaggagaactgcaagtaactgtcctagatcaaaatgctaattggagccttaggcagaaacaaggtgggaagagggtacctttcaggttttggacccagaaactgccagaggccggaaaagcttatacccctttcaagaagcaattgttagcttcttattgggctttgctggaaacagaacacctctgcttcaaccatgatgtctttatgaggcccgaaactcctattatgacttggctcatgagttcccccaaaacccaccagatagggcatgcccaagaaggagcatcataaaatggacgtggtacatacaagaccaggctaagccaaaaccaaagtgggtatcacttttacatgaggatgcacaaaacctgccagctcaggaaatcatggagcaagtcctgcaggtagggaaggaaatcccctcactcccacccagtggggcaaatcctttgaagaactaagcccagaggatcagaaacatgcttgatttacagac

SEQ ID NO: 23348 - DNA, 808 bp, Homo sapiens
ggacctgcataaactgtaaaattccttggcatcctatggaatgcagagatatagtccattttacaaaaggctaaggctaaaatattagaatttgcaaaccctactacttaaaaggaggcccagacatttattggctggtttagattctggagacatcatattccccacttgggtaacattttacaacctctgcatgcagccactagaaaacgctatgactttcactggggaaagaaggagaacatggcttctgaacaagctaaatgagtgggtcaactggccctggatctatggcccatacaggatgggccaggagaactgcaagtaactgtcctagatcaaaatgctaattggagccttaggcagaaacaaggtgggaagagggtacctttcaggttttggacccagaaactgccagaggccggaaaagcttatacccctttcaagaagcaattgttagcttcttattgggctttgctggaaacrgaacacctctgcttcaaccatgatgtctttatgaggcccgaaactcctattatgacttggctcatgagttcccccaaaacccaccagatagggcatgcccaagaaggagcatcataaaatggacgtggtacatacaagaccaggctaagccaaaaccaaagtgggtatcacttttacatgaggatgcacaaaacctgccagctcaggaaatcatggagcaagtcctgcaggtagggaaggaaatcccctcactcccacccagtggggcaaatcctttgaagaactaagcccagaggatcagaaacatgcttgatttacagac

SEQ ID NO: 23349 - DNA, 808 bp, Homo sapiens
ggacctgcataaactgtaaaattccttggcatcctatggaatgcagagatatagtccattttacaaaaggctaaggctaaaatattagaatttgcaaaccctactacttaaaaggaggcccagacatttattggctggtttagattctggagacatcatattccccacttgggtaacattttacaacctctgcatgcagccactagaaaacgctatgactttcactggggaaagaaggagaacatggcttctgaacaagctaaatgagtgggtcaactggccctggatctatggcccatacaggatgggccaggagaactgcaagtaactgtcctagatcaaaatgctaattggagccttaggcagaaacaaggtgggaagagggtacctttcaggttttggacccagaaactgccagaggccggaaaagcttatacccctttcaagaagcaattgttagcttcttattgggctttgctggaaacagaacacctctgcttcaaccatgatgtctttatgaggccygaaactcctattatgacttggctcatgagttcccccaaaacccaccagatagggcatgcccaagaaggagcatcataaaatggacgtggtacatacaagaccaggctaagccaaaaccaaagtgggtatcacttttacatgaggatgcacaaaacctgccagctcaggaaatcatggagcaagtcctgcaggtagggaaggaaatcccctcactcccacccagtggggcaaatcctttgaagaactaagcccagaggatcagaaacatgcttgatttacagac

SEQ ID NO: 23350 - DNA, 808 bp, Homo sapiens
ggacctgcataaactgtaaaattccttggcatcctatggaatgcagagatatagtccattttacaaaaggctaaggctaaaatattagaatttgcaaaccctactacttaaaaggaggcccagacatttattggctggtttagattctggagacatcatattccccacttgggtaacattttacaacctctgcatgcagccactagaaaacgctatgactttcactggggaaagaaggagaacatggcttctgaacaagctaaatgagtgggtcaactggccctggatctatggcccatacaggatgggccaggagaactgcaagtaactgtcctagatcaaaatgctaattggagccttaggcagaaacaaggtgggaagagggtacctttcaggttttggacccagaaactgccagaggccggaaaagcttatacccctttcaagaagcaattgttagcttcttattgggctttgctggaaacagaacacctctgcttcaaccatgatgtctttatgaggcccgaaactcctattatgacttggctcatgagttcccccaaaacccaccagatagggcatgcccaagaaggagcatcataaaatggacrtggtacatacaagaccaggctaagccaaaaccaaagtgggtatcacttttacatgaggatgcacaaaacctgccagctcaggaaatcatggagcaagtcctgcaggtagggaaggaaatcccctcactcccacccagtggggcaaatcctttgaagaactaagcccagaggatcagaaacatgcttgatttacagac

SEQ ID NO: 23351 - DNA, 409 bp, Homo sapiens
aggaaggacatgatttataagaactttttgctaactgtagatgcgctggaactgaagwtatcagtagagatgacacagacatgaatgaaggaattactggtcgaacaggcctatctagatctgattttaaaacctcaaaaaatgaaacttcttggggtcattccattgaaactactactgaccctgcttgtcaaatttcttcctgttggggtgtgtactcaattgcagtctagtagcttatggactaaaagtgttggaggtatgtgggtgagtagataggtatgaataggaataagctgttgggaaccataaactattcaaaaccatatgcctttgtgggtgatttgaatttaaacatgtccccttgagggtttgcatagcaaacacagttatttaattttaattcttt

SEQ ID NO: 23352 - DNA, 409 bp, Homo sapiens
aggaaggacatgatttataagaactttttgctaactgtagatgcgctggaactgaagttatcagtagagatgacacagacatgaatgaaggaattactggtcgaacaggcctatctagatctgattttaaaacctcaaaaaatgaaacttcttggggtcattccattgaaactactactgaccctgcttgycaaatttcttcctgttggggtgtgtactcaattgcagtctagtagcttatggactaaaagtgttggaggtatgtgggtgagtagataggtatgaataggaataagctgttgggaaccataaactattcaaaaccatatgcctttgtgggtgatttgaatttaaacatgtccccttgagggtttgcatagcaaacacagttatttaattttaattcttt

SEQ ID NO: 23353 - DNA, 764 bp, Homo sapiens
ttcctgggtctacatccaggacacactccgtgcttcctacgagaatgattcctagcaagactttctcccagagagttccacatgcaagcagaaagaaaccaatgtgggctttagcaaaggaaggggtaggacagacgtctccattgtcagcaagaccacagaacaatggacttttcagaagagtccatggaatagaatctaacctttacaataaataacaacactcacatttaggtactgtctatttcccatccaaaaggctttccatcagattttctctcttaggtcctattattattcccatgttagatatgaggctatgaggtatgagaaactctctctccaaagcctaaactcctaacccctgtgctatcttttctttacatcttcagctatggagtctgtgttacactccacaatgccaacagacagagaggaatgctaactgtaacttgaatgatttgagttctcattgcttttctsccatcttttctttctctttcatcaatgttatacaattagttttttcataaagctcctactagcaagctactcctccccacactcagaaaacctcctacctaaaatctgataaaaatctttgttttcactactttaaactcttggccttcttggatctttctatttgttaaaatatcctatggagttggacaaacttctttatcagtttaagaaacccctctgtttctgtgcatttcaaagcatcctggatttgctttttcttcacccaactcagaaggaaa

SEQ ID NO: 23354 - DNA, 1279 bp, Homo sapiens
catgcaaaatgaataacttagcaagatgcctggctaagtattcaatattagctattcttcttattataatgacagagtttggcattgcagacataagacaacacaatactataaatctctctgtgaccttcagggatggctttctgggctggacagaccatctttgcagacatctatacagccaaatgatgaccaagctgatgagccatttacttgaaatacaatttatcatcatctagtttcagtggaractagtttatagtataatggaaactgatccagagtattagtattggaaaggcactaagcttatacaataagaaaggagattgggtgaggaagaacaggtgtttctaacaacttgtttttaaaaaatctataattgggttcatctaggctctgaaagctaagagaaaagaaaataacatttattgagcacctgccagatggtctcgagtgcattattgtctttaatgtgaatagtttacagggaagaaattatcctctttatttcgcaagtgaagaggatgagctcaaaggtaggtgacacactcagggtcacccaggtctaatccacagctcttgctgactttgataactgggagactcctaggaatctactataatgggactgtaatatttgtattgaaaggaatctagcttatgaaagaggaaaatgagaatgaatgaataggaataagagctaaaaaaccttgatgtggaaactttgacatttgtctcaactcagacggatgataggttttcaagaaaacaaactttaaaggagacaacgcgagatatatccacttctgaagcccctagtggaagcacatacctttcatttttaaagagtgaacattcatcattttcctgggagcctctatattgatttttttcttccaaattttttgaattgaccactgaaaattgaaatgccagagggtgtctttctttctttctctaatcttgtattagaatgtttttactctagcttgttccaaacaggacttgaagcagttatcaaagatatatgcaatagttcagaaattataactaattaattaagaagatgcaaataaaaaatccaaactacaaacaatagagtgagggaagcaagatttgttatacaaaatctatgccacggggtcctggacacttggtcttggtcagctgcagattttcctctgtacttcctgatgtccaacaggaaaagacaaagacagtaaattgcagggaaagaaatatatttttttcaatctttataaattcctaggtggaa

SEQ ID NO: 23355 - DNA, 1163 bp, Homo sapiens
ttgacatacctttattttactttcattcctttgggcatttctattactccaactaattgcttaaaaatactgtgctaattccattcattcttcagatgagcatgtagcccactgatacaaaacaatagaggttaacaagacgtcttcaaagctgagtgctgaagatagcagtggtgctttaaacttttggagcatcaaaggagagcttacctgtgatctcttttttacatgggttaccatagtgatgacagggcttggcttgagaggaaactggataataataaggctaccattttcaaagaatttactgtatgctagacactgtgcttttgccctgaatcctcagagagatttcaccatccgccttttacagatgaggaagctgaggcacagggggttaagtatcttgcacaaagtcttccatctagagaatggcacaaaccaggattcaaatccaggcattctgactccagagctgtctccaaagcatcaatattagctgcttggaaaaagtggtgaaatatggagatgcttacaatatatatattttttgagatggagtctccctctgttgcccatgctggagtgcagtggcgtgatcttggctcactgcgacctccacctactgagttcaagcgattctcctgcctcagcctcccgagtggctggggctacaggcatgcaccaccacwcccagctaatttttgtatttttagtagacacagggtttcactgtgttgatcaggctggtctcgaactcctgaccttgtaatctgcccaccttggccacccaaagtgctgggattataggcgtgagccactgagcctggctgacggttatgatattagtgcatatttgtctttctgacttccgtggcaggataaatattcaatgagcctgtccctacctttgaaggcaaaggcagtctcttataaagttaccttggaaccatgaaggggcagctgtgagtgaggatggttccacatacatacaacatcctgtatcatgaagaaaagctggattcttctctgtttctaaaggcagaaattcaggaggtcagaaactggttgggcacagaggacagttgatggaaggatgaagaaaaagagaataaatgttttcgtttcatgataaacacatgtaaacatcgaacaactatatg

SEQ ID NO: 23356 - DNA, 1163 bp, Homo sapiens
ttgacatacctttattttactttcattcctttgggcatttctattactccaactaattgcttaaaaatactgtgctaattccattcattcttcagatgagcatgtagcccactgatacaaaacaatagaggttaacaagacgtcttcaaagctgagtgctgaagatagcagtggtgctttaaacttttggagcatcaaaggagagcttacctgtgatctcttttttacatgggttaccatagtgatgacagggcttggcttgagaggaaactggataataataaggctaccattttcaaagaatttactgtatgctagacactgtgcttttgccctgaatcctcagagagatttcaccatccgccttttacagatgaggaagctgaggcacagggggttaagtatcttgcacaaagtcttccatctagagaatggcacaaaccaggattcaaatccaggcattctgactccagagctgtctccaaagcatcaatattagctgcttggaaaaagtggtgaaatatggagatgcttacaatatatatattttttgagatggagtctccctctgttgcccatgctggagtgcagtggcgtgatcttggctcactgcgacctccacctactgagttcaagcgattctcctgcctcagcctcccgagtggctggggctacaggcatgcaccaccactcccagctaatttttgtatttttagtagacacagggtttcactrtgttgatcaggctggtctcgaactcctgaccttgtaatctgcccaccttggccacccaaagtgctgggattataggcgtgagccactgagcctggctgacggttatgatattagtgcatatttgtctttctgacttccgtggcaggataaatattcaatgagcctgtccctacctttgaaggcaaaggcagtctcttataaagttaccttggaaccatgaaggggcagctgtgagtgaggatggttccacatacatacaacatcctgtatcatgaagaaaagctggattcttctctgtttctaaaggcagaaattcaggaggtcagaaactggttgggcacagaggacagttgatggaaggatgaagaaaaagagaataaatgttttcgtttcatgataaacacatgtaaacatcgaacaactatatg

SEQ ID NO: 23357 - DNA, 1163 bp, Homo sapiens
ttgacatacctttattttactttcattcctttgggcatttctattactccaactaattgcttaaaaatactgtgctaattccattcattcttcagatgagcatgtagcccactgatacaaaacaatagaggttaacaagacgtcttcaaagctgagtgctgaagatagcagtggtgctttaaacttttggagcatcaaaggagagcttacctgtgatctcttttttacatgggttaccatagtgatgacagggcttggcttgagaggaaactggataataataaggctaccattttcaaagaatttactgtatgctagacactgtgcttttgccctgaatcctcagagagatttcaccatccgccttttacagatgaggaagctgaggcacagggggttaagtatcttgcacaaagtcttccatctagagaatggcacaaaccaggattcaaatccaggcattctgactccagagctgtctccaaagcatcaatattagctgcttggaaaaagtggtgaaatatggagatgcttacaatatatatattttttgagatggagtctccctctgttgcccatgctggagtgcagtggcgtgatcttggctcactgcgacctccacctactgagttcaagcgattctcctgcctcagcctcccgagtggctggggctacaggcatgcaccaccactcccagctaatttttgtatttttagtagacacagggtttcactgtgttgatcaggctggtctcgaactcctgaccttgtaatctgcccaccttggccacccaaagtgctgggattataggcgtgagccactgagcctggctgacggttatgatattagtgcatatttgtctttctgacttccgtggcaggataaatattcaatgagcctgtccctacctttgraggcaaaggcagtctcttataaagttaccttggaaccatgaaggggcagctgtgagtgaggatggttccacatacatacaacatcctgtatcatgaagaaaagctggattcttctctgtttctaaaggcagaaattcaggaggtcagaaactggttgggcacagaggacagttgatggaaggatgaagaaaaagagaataaatgttttcgtttcatgataaacacatgtaaacatcgaacaactatatg

SEQ ID NO: 23358 - DNA, 1163 bp, Homo sapiens
ttgacatacctttattttactttcattcctttgggcatttctattactccaactaattgcttaaaaatactgtgctaattccattcattcttcagatgagcatgtagcccactgatacaaaacaatagaggttaacaagacgtcttcaaagctgagtgctgaagatagcagtggtgctttaaacttttggagcatcaaaggagagcttacctgtgatctcttttttacatgggttaccatagtgatgacagggcttggcttgagaggaaactggataataataaggctaccattttcaaagaatttactgtatgctagacactgtgcttttgccctgaatcctcagagagatttcaccatccgccttttacagatgaggaagctgaggcacagggggttaagtatcttgcacaaagtcttccatctagagaatggcacaaaccaggattcaaatccaggcattctgactccagagctgtctccaaagcatcaatattagctgcttggaaaaagtggtgaaatatggagatgcttacaatatatatattttttgagatggagtctccctctgttgcccatgctggagtgcagtggcgtgatcttggctcactgcgacctccacctactgagttcaagcgattctcctgcctcagcctcccgagtggctggggctacaggcatgcaccaccactcccagctaatttttgtatttttagtagacacagggtttcactgtgttgatcaggctggtctcgaactcctgaccttgtaatctgcccaccttggccacccaaagtgctgggattataggcgtgagccactgagcctggctgacggttatgatattagtgcatatttgtctttctgacttccgtggcaggataaatattcaatgagcctgtccctacctttgaaggcaaaggcagtctcttataaagttaccttggaaccatgaaggggcagctgtgastgaggatggttccacatacatacaacatcctgtatcatgaagaaaagctggattcttctctgtttctaaaggcagaaattcaggaggtcagaaactggttgggcacagaggacagttgatggaaggatgaagaaaaagagaataaatgttttcgtttcatgataaacacatgtaaacatcgaacaactatatg

SEQ ID NO: 23359 - DNA, 1163 bp, Homo sapiens
ttgacatacctttattttactttcattcctttgggcatttctattactccaactaattgcttaaaaatactgtgctaattccattcattcttcagatgagcatgtagcccactgatacaaaacaatagaggttaacaagacgtcttcaaagctgagtgctgaagatagcagtggtgctttaaacttttggagcatcaaaggagagcttacctgtgatctcttttttacatgggttaccatagtgatgacagggcttggcttgagaggaaactggataataataaggctaccattttcaaagaatttactgtatgctagacactgtgcttttgccctgaatcctcagagagatttcaccatccgccttttacagatgaggaagctgaggcacagggggttaagtatcttgcacaaagtcttccatctagagaatggcacaaaccaggattcaaatccaggcattctgactccagagctgtctccaaagcatcaatattagctgcttggaaaaagtggtgaaatatggagatgcttacaatatatatattttttgagatggagtctccctctgttgcccatgctggagtgcagtggcgtgatcttggctcactgcgacctccacctactgagttcaagcgattctcctgcctcagcctcccgagtggctggggctacaggcatgcaccaccactcccagctaatttttgtatttttagtagacacagggtttcactgtgttgatcaggctggtctcgaactcctgaccttgtaatctgcccaccttggccacccaaagtgctgggattataggcgtgagccactgagcctggctgacggttatgatattagtgcatatttgtctttctgacttccgtggcaggataaatattcaatgagcctgtccctacctttgaaggcaaaggcagtctcttataaagttaccttggaaccatgaaggggcagctgtgagtgaggatggytccacatacatacaacatcctgtatcatgaagaaaagctggattcttctctgtttctaaaggcagaaattcaggaggtcagaaactggttgggcacagaggacagttgatggaaggatgaagaaaaagagaataaatgttttcgtttcatgataaacacatgtaaacatcgaacaactatatg

SEQ ID NO: 23360 - DNA, 836 bp, Homo sapiens
cagtgcagcccccatgtccagaaaaggcttgctgaaaatttgttgagcaaacggaaactgatgcttccctcctatccatgggatgagcaacgatgttttcaataaccccaaagacttcctcagccatctcatgcactcatttctaatttggcattttttttttcaaaggctaaggaactttctgcaggtggtgctgtcacacatgagctggggtttgtcagaaggtcaaggtagaaaactctaagccagtgttaatcctgaatgcacattgaaatcacccaggcagtcttaaaaaactgtgatgtctgggtcctgcttccaaggattcacatgtgattggaccaagcataggtattcttttaagttcctcagaagattctattgtgcagcaagattggagaaccagtgtcctaaacaatttatacccaggaagcattcagctagggccacagggatcaaggcacagacaataacttgggagataaggagttactctctttggtaaacagttcatatatttcaaagctgaaccagatcaggaccaacaccccagagcattagttatcattttcttctctgaactctaccccaagaggtagcaaaggacaaaacagtatatgmcttggtcagaatgcagacagaaaacctgtaaccctgctgtgtttttcgcttgccttgtggccttgggcatattgcagaacctctcagggcctcagtatatgcaaaatacagatagtaaaacctgctgcacgaaggtattagtctctctcttgctctctctgtctctctctctctctcatatatatatatatatgtatatatatatgtatatatat

SEQ ID NO: 23361 - DNA, 2106 bp, Homo sapiens
atccccaggatcctgggtgggttttcagaatcaggatcttctgcctcatctttgctgactttcttcttctcatgagcatttcattctctagaaattgacagaagcaagattctggcttcagggtggtggtggctgggagaccgtcaaaagcttttgggctaagccatgtgctcaggctgtaattaccagagggagactattgagtacctaagagaatcaccaggcgctcagtgttttggagcaggatttgggtattccatgttcccatcactcaccacatcctagatagtaattagtagagagattagcagcctaggctcatggattcacctgccacctccattgtttgagcgatgtgagaacttgggtaagacactcacctttgttgcaccttggcttccctgtctataaatggagataataacagtaccaacatttagacctatgttgaggattcagtaagaacatgcttagtagggggattggaatgtagtaagtaataaatgctggctatttatttttagcaataacatgaacagtttgcaggctttggaggatagagacagaaaagctccttggagggctgggcttgtgtcttcccttgtatcattccagcacccaggccttgacagcatgctgtcatggaaaaatgtgatcattctttcctgtatttaaaaaataaatttgtctgaagagtaactttatgagaagtgtgtgcatccttacattttatgacttggattttcttctcctgcctgctgcctgggtttaataaaagcacaactataataggacagcatctggacaagttgatgaggggtttaacttttaagaatagacctagcatctttgagcatcagccttggagtacaaatgggcagcaatctgccacagccgctgtaactgtttctctgcttcctaccagacctgctcttctccctggctttgaggggaggaacactcaggtgtagcacaactttccaggtactcaaagccccaggggagagaaacaataatacaaattcaaaggatagctaaatacacagagacctgtcattaaagcagaatcagacatgaactcagatgaaaacctcaaatcccccagagtcccccagtctctggcaagcctgatacattgaatgtctgtgccttcctgtggtagatttctttcgttcttcctactgcccaaattaattgttttagagtcccctgctatgacgggtattctgaaaagacccaatccactgatttgtaaattttagctaatgcacctcttcaaaractattccaatcttaaaaaatatcacaggatgagaaaaagccactgggcaagaagttatcagaaatttgtccccttactctctgtgttctatggtgacagaaggggatggggtgaagaagttgctataatttttgtgcttattcaactttgttaaagcttttctgtctcagtgtagaacatctcatccctgcagcatgggagataccctaaagcctcctaaacctcgcaagtgttcattgtataatttgaagctaccgtagggcagcaataggaggggggtgttctggctactgtaacatccggaagcaaaggtcacagcattgaaggtcatggactacaatctgtcatttacaaaaattacttccacaggattttcttatttaaggatgtcaggtgcaaaccccagcctcaacttccaacagataaggcattcggggtttcattaaacccaaagtacattgtagccagagccttaaacactgtcttctgtgcaggagattgtattgctaggaacaggagtgtccatctcctcttctcctaactggaacgttcctgattcttcatgattgagctcaggccaagaacattatctgaaatccacaaatcatcctctagtcttgttagctcattcagtttacatcttcccattgcccagagagtgattattacacagaattacataaatcataataaaatgaaattctacagagtcatgcctagaaaagttttctttgaagttattttatgtttactcgtatttatttattgaaacactttgttaagaagtaaaaatagagacagcttaagtttcagggcttcataaa

SEQ ID NO: 23362 - DNA, 586 bp, Homo sapiens
ccttgaacttgaccaactcctccytgagccagaaggatgggacgcttcattgcccatcactgtgacttgaaatgcatagcagtcgcaggaaccagaacctccttagaagccagcataaacgctcaggcattctcttcagagctattattcgtttttttaaaagcccatagattcagaattcctacaggtattgttaaactagatgtcagttccaggtcaacccctctgactattacagtcataattctgataccgagagggagcaaaatcaggtaaagagtcaccccccgccccttgcagaatctgatttaacaaggcttatttatgtctcagcataccacaggttacaatataatcatctttcacctacataaataatgcataaatttgtgtttagtcattgtgtctgcttttcagtccttggggaagcagaaggacaaaagattcagccttgcacagagatttagaggataccacctctacccttcttgcattaaacgtaggatctggctgactcttacagagaagtcccaagagaatgtttttacatagtgtcacaggttcaatctgcttgcaagtaaaaggt

SEQ ID NO: 23363 - DNA, 586 bp, Homo sapiens
ccttgaacttgaccaactcctccttgagccagaaggatgggacrcttcattgcccatcactgtgacttgaaatgcatagcagtcgcaggaaccagaacctccttagaagccagcataaacgctcaggcattctcttcagagctattattcgtttttttaaaagcccatagattcagaattcctacaggtattgttaaactagatgtcagttccaggtcaacccctctgactattacagtcataattctgataccgagagggagcaaaatcaggtaaagagtcaccccccgccccttgcagaatctgatttaacaaggcttatttatgtctcagcataccacaggttacaatataatcatctttcacctacataaataatgcataaatttgtgtttagtcattgtgtctgcttttcagtccttggggaagcagaaggacaaaagattcagccttgcacagagatttagaggataccacctctacccttcttgcattaaacgtaggatctggctgactcttacagagaagtcccaagagaatgtttttacatagtgtcacaggttcaatctgcttgcaagtaaaaggt

SEQ ID NO: 23364 - DNA, 1431 bp, Homo sapiens
ccctctcctcaatgttcctttaattaggcaaagcacagggaacatattctgcaaattgctaagtggttagtggctgctttgtactaagaaatgttaacttttcattcagaggagctcaattagcaagagtcaaccagtggttaataataataataatacaatagaatgatcactgaatgaaaggtttttatttttattcacaggaatcatttgttaaatatgaagagacattcccttatgtttaattgaagagggaagggatgccctgagtatctctctgaggctttaatgacgagatgatagggaagaggcatggaggaaggtatcttctgaaatcttttctttgaggcttaggatggaaacagatgctaagtgtatcctcctttctctctttttttattctccttgtgtatttctccatcagcacacatcgtacactctccccagggattggggtctgatcacacatcagggctcttggctcctaaacattcaaagaacatcagagacctgagtagcaagatctatagagaggggacaaaagatcacagggcttctggcagtcccaagtgagtcagaagcagagttcagagtgggcacagaggtgcagacctcatgcatgcgatgtgccttctgacctcagacctcgtggaggaaaagaactcttgtttcctgaccacttactctattctgtgcactgttctgggacacttacactttagacacttacttgatttgacttaccacgcgaccccatggggcaaggtatttttctctacaatttacagataagaaaactaagatttatttgtccccagtgccatactaataagtgaagctcaattaaaatttaggtctttttttctgtgagtcrgttctcctgatctcttcaaagcatacctttgactagggcgtatcccctgttctaagaaaaaattctgattttctacaggggcatgaagaaggaggaaaaggatgcaggaaagaatttaagaggcaaagtggatgtgataaaggaacgagaagatcatgagaaaagatgaaaaagagaacagtgactgacccatgtcatgaagcatcagtttctaaactttgctgtatgcaggctcaatggtaagcattgttcagtgcatttcctcattttgtccttgggacacatgagaaaatggaagctcaagaaacttaaatggcttgcccagatcacatagctaactaagtggcagaggtgggaattggacccagatattccatctccaaagcccagaaccttctcattgcatcatgtattcttctctgagagaaagaaatctggtttttccatttgaggtctttccaacagagttccaggaatagtcagttcaagactcaggaacaatccacatctttattcattcatgaaacacttaatgtgacagcctcagatgttggcaa

SEQ ID NO: 23365 - DNA, 1431 bp, Homo sapiens
ccctctcctcaatgttcctttaattaggcaaagcacagggaacatattctgcaaattgctaagtggttagtggctgctttgtactaagaaatgttaacttttcattcagaggagctcaattagcaagagtcaaccagtggttaataataataataatacaatagaatgatcactgaatgaaaggtttttatttttattcacaggaatcatttgttaaatatgaagagacattcccttatgtttaattgaagagggaagggatgccctgagtatctctctgaggctttaatgacgagatgatagggaagaggcatggaggaaggtatcttctgaaatcttttctttgaggcttaggatggaaacagatgctaagtgtatcctcctttctctctttttttattctccttgtgtatttctccatcagcacacatcgtacactctccccagggattggggtctgatcacacatcagggctcttggctcctaaacattcaaagaacatcagagacctgagtagcaagatctatagagaggggacaaaagatcacagggcttctggcagtcccaagtgagtcagaagcagagttcagagtgggcacagaggtgcagacctcatgcatgcgatgtgccttctgacctcagacctcgtggaggaaaagaactcttgtttcctgaccacttactctattctgtgcactgttctgggacacttacactttagacacttacttgatttgacttaccacgcgaccccatggggcaaggtatttttctctacaatttacagataagaaaactaagatttatttgtccccagtgccatactaataagtgaagctcaattaaaatttaggtctttttttctgtgagtcggttctcctgatctcttcaaagcatacctttgactagggcgtatcccctgttctaagaaaaaattctgattttctacaggggcatgaagaaggaggaaaaggatgcaggaaagaatttaagaggcaaagtggatgtgataaaggaacgagaagatcatgagaaaagatgaaaaagagaacagtgactgacccatgtcatgaagcatcagtttctaaactttgctgtatgcaggctcaatggtaagcattgttcagtgcatttcctcattttgtccttgggacacatgagaaaatggaagctcaagaaacttaaatggcttgcccagatcacatagctaactaagtggcagaggtgggaattggacccagatattccatctccaaagcccagaaccttctcattgcatcatgtattcttctctgagagaaagaaatctggtttttccatttgaggtctttccaacagagttccaggaatagtcasttcaagactcaggaacaatccacatctttattcattcatgaaacacttaatgtgacagcctcagatgttggcaa

SEQ ID NO: 23366 - DNA, 1649 bp, Homo sapiens
ccgcaaagttcatatgttgaagccctaacccacagcactacagaatgtaactttttggagatagggtctttaaagagacgattaagttaatatcatggctgttggggtgggttctaatccaatgtgactagcatccttatgagaagaggaaatctggacatagagatacaccaggggtgtgtgtgcacggaggaaagatcatgtgaggatacagcaagaagatggccatccagaagccaaggagagagacctcctaatgaaaccaatgctgcggacaccttcatcttggacttccagcctccaaaactgttggaaaataattttcagttgtttaagccacccactctgaggtattttgttatggcggccctagcaaactaatatggtcctctttactccttatagtaatgatactagtagctaatatttatcttcaaatgcatttatcacttaatctccataaattgtgtgacgtcaatgaaagaattagcttcattttacacatgaaaaaactgagactaatagaagttaggatagagctgggcctgttgatgttccaaagccatgctcttactatgggggttgttagagtaataatggggtcacagtagtcaggaattctcagacagggggatgatgccactgtgtcacttcctgtttcacaggaagtaggacagagcaatggagggaagccagatttaatgtcagaagtctggaccatcaattttatcccttcccattgcctccttttaaattttagtcaattcaataaatattttcaactcctcgtctgtaccaggcaccaagccacagaatggagttctggcaatgaacactgcagacatggccgcctttagcctcatggagcttagggtctgggagcattgtcagtttctgaatcctccaagtgctaaactatcttctctcttcaaattagagaaaagaaatgagacagcaggcctgcttctttgagtgtttttttcttttttgtttccgttttctgacaaccatacttcacgtctgacagaggaaatgattctttttgtcagtgataaatttatgagttttgactgtttgtgaagttccctaattaattctttatagacttctattggcaactgaatttgtgttttgagttaaaaatgggagttcagatgaattacagttgaacattctgctccctttgaagagctcatactccacattytacgctgttaatctctctgcttactgagaggcaccgtttgtcttgcagtgacgcacggtgggtggttaccatggcataggaaaacattgccagcgctggccctgtcgtcatggaacccctgggccatctcctgagaaacttggtaagggctcccaagccgcccatacctccttggcaccacaagtgtagctttttattttgtgtgtgggcagcttgacatctgcacctgaccaagagattgatgtggctaaacaaatttaggaaatgagcagcagtggatctctgttcagagagggaggaggagagagaaggagggagggaagaaaggagagagggagagagccagaaaacagagcaagataaaggaagagaatgcacctgaaatagacacaaggataaatggatcaaggagagaggagaaacagataatcacaacagcgaa

SEQ ID NO: 23367 - DNA, 542 bp, Homo sapiens
ttcccctttcaagaatgtttaaactcttcattcaagcgatgagagggaaacacttgagctgcacactcaaggagatgtgggtttccattctggccttgcgatatattattggtgggaccgtgggtgagtcacttaacttctctagtcctcagttttcttatctgtaaagtgggctccagcatacggcttaactgaggtaacacacgttgttcatgtcagctgttgctttcatgccggctctgcctaggtctccccatggcaacaggataggagttctctgcctgtgcgtcagtttttcactagcktgggaatgctgtgaggagggggcggaactcggtgtagcaagggtttctgtccgtatcttctattttttttttttttttttttttgagactgagtcttgctctgtcgctcaggctggagtgcagtggcgcgatctccgctcactgcaagctccgcttccagggttcacgccattctcctgcctcaacctcccaagtagctgggactacaggcacccgccaccaagcccagctaatttt

SEQ ID NO: 23368 - DNA, 542 bp, Homo sapiens
ttcccctttcaagaatgtttaaactcttcattcaagcgatgagagggaaacacttgagctgcacactcaaggagatgtgggtttccattctggccttgcgatatattattggtgggaccgtgggtgagtcacttaacttctctagtcctcagttttcttatctgtaaagtgggctccagcatacggcttaactgaggtaacacacgttgttcatgtcagctgttgctttcatgccggctctgcctaggtctccccatggcaacaggataggagttctctgcctgtgcgtcagtttttcactagcgtgggaatgctgtgaggagggggcggaactcggtgtagcaagggtttctgtccgtatcttctattttttttttttttttttttttgagactgagtctygctctgtcgctcaggctggagtgcagtggcgcgatctccgctcactgcaagctccgcttccagggttcacgccattctcctgcctcaacctcccaagtagctgggactacaggcacccgccaccaagcccagctaatttt

SEQ ID NO: 23369 - DNA, 1115 bp, Homo sapiens
gcatgagtattgtagaagtatcatgtagtagagatcatacgcaattatttctgtattaattaaagtgtgtccagatacctttaaacaacagttttaaacgttcaaaacagtggaatacatgttgcccaataagtgaaataatatatactgcaatgtatagaacaggtactagctgtatttaatagtgaagttatgcttaatttgaaatgcttcacatttgtttataaatccatcatcagaagcaatgtttgttatgatcaattcagacgtttggaatcaggaggtccagaaggcagccgtaggcagttgtttgtgcattcagactacagagtatcaagaaaatcccaatttgctcagataggtaggtgtgaaaaccaacaatttctttgaaccrctcgtcttacaacctcagtgtattctatattgtgcatagatgacagaagaaacattcattcctaagatacctacaaaatgagcaaaaccagcagcataaatggacccagtagtaatctatctccagtgcgtcttaattttgtgcatcatccatttgtgactttcttttgttctttctgttaatcagagatcttttcagtggcaggtgacatatgcccaacttgaatggccttaaggaaaaaaacagtattgtctcatgtgattgaaacatctatgtatatatagctggtttggggcaaagctgaatcaagatgatcagatgatgttgccaggaatacttcttcccacattacacactcttctgtatgccatgtattttcaggctgttcccttaaagtggcaagatggcttccagcagggatacgcttacatcatcccagctcaggagcctgacggcaaagagaaccttctcttcagtggttcaggataagtcccggccagatctcagttgcttacccatcctaagaagcagggttttgttttaactgcactatcaccacgtaattataggagaaagggaaaaggtttcttcaatgagtctttaaaatatttaacattaaaaaattgacactaaaaattgtatattatgtaaaacaggatgttttgaaatatatatatattgtggaatgcttaaattgggtttaaatgagttaaattaatac

SEQ ID NO: 23370 - DNA, 1115 bp, Homo sapiens
gcatgagtattgtagaagtatcatgtagtagagatcatacgcaattatttctgtattaattaaagtgtgtccagatacctttaaacaacagttttaaacgttcaaaacagtggaatacatgttgcccaataagtgaaataatatatactgcaatgtatagaacaggtactagctgtatttaatagtgaagttatgcttaatttgaaatgcttcacatttgtttataaatccatcatcagaagcaatgtttgttatgatcaattcagacgtttggaatcaggaggtccagaaggcagccgtaggcagttgtttgtgcattcagactacagagtatcaagaaaatcccaatttgctcagataggtaggtgtgaaaaccaacaatttctttgaaccacycgtcttacaacctcagtgtattctatattgtgcatagatgacagaagaaacattcattcctaagatacctacaaaatgagcaaaaccagcagcataaatggacccagtagtaatctatctccagtgcgtcttaattttgtgcatcatccatttgtgactttcttttgttctttctgttaatcagagatcttttcagtggcaggtgacatatgcccaacttgaatggccttaaggaaaaaaacagtattgtctcatgtgattgaaacatctatgtatatatagctggtttggggcaaagctgaatcaagatgatcagatgatgttgccaggaatacttcttcccacattacacactcttctgtatgccatgtattttcaggctgttcccttaaagtggcaagatggcttccagcagggatacgcttacatcatcccagctcaggagcctgacggcaaagagaaccttctcttcagtggttcaggataagtcccggccagatctcagttgcttacccatcctaagaagcagggttttgttttaactgcactatcaccacgtaattataggagaaagggaaaaggtttcttcaatgagtctttaaaatatttaacattaaaaaattgacactaaaaattgtatattatgtaaaacaggatgttttgaaatatatatatattgtggaatgcttaaattgggtttaaatgagttaaattaatac

SEQ ID NO: 23371 - DNA, 1115 bp, Homo sapiens
gcatgagtattgtagaagtatcatgtagtagagatcatacgcaattatttctgtattaattaaagtgtgtccagatacctttaaacaacagttttaaacgttcaaaacagtggaatacatgttgcccaataagtgaaataatatatactgcaatgtatagaacaggtactagctgtatttaatagtgaagttatgcttaatttgaaatgcttcacatttgtttataaatccatcatcagaagcaatgtttgttatgatcaattcagacgtttggaatcaggaggtccagaaggcagccgtaggcagttgtttgtgcattcagactacagagtatcaagaaaatcccaatttgctcagataggtaggtgtgaaaaccaacaatttctttgaaccactcgtcttacaacctcagtgtattctatattgtgcatagatgacagaagaaacattcattcctaagatacctacaaaatgagcaaaaccagcagcataaatggacccagtagtaatctatctccaktgcgtcttaattttgtgcatcatccatttgtgactttcttttgttctttctgttaatcagagatcttttcagtggcaggtgacatatgcccaacttgaatggccttaaggaaaaaaacagtattgtctcatgtgattgaaacatctatgtatatatagctggtttggggcaaagctgaatcaagatgatcagatgatgttgccaggaatacttcttcccacattacacactcttctgtatgccatgtattttcaggctgttcccttaaagtggcaagatggcttccagcagggatacgcttacatcatcccagctcaggagcctgacggcaaagagaaccttctcttcagtggttcaggataagtcccggccagatctcagttgcttacccatcctaagaagcagggttttgttttaactgcactatcaccacgtaattataggagaaagggaaaaggtttcttcaatgagtctttaaaatatttaacattaaaaaattgacactaaaaattgtatattatgtaaaacaggatgttttgaaatatatatatattgtggaatgcttaaattgggtttaaatgagttaaattaatac

SEQ ID NO: 23372 - DNA, 693 bp, Homo sapiens
ctagaagaagctagaccatgacagacaagtaaaaaagaatgaaaatctactagggtagaggtttttagtgtaaaaaacagagagatgatttttcaaagaaagaactctcctcaaccctctttttacatacaaacttgtagaaaaattaaaacacacagtgaaaacccatataacttttgtgtagtttcaccaatgattaacattttgtgacatttactttctctttctaccctccgtcttcccatatatattggacaatttgaaaattacaggcaccatgaacaactcatgcctaaaggcttcaacatgcttctcttaaaaacaaggcrgtttttgcctggcacagtggctcacgcctgtaatcccagcactttgggaggccgaggagaatggatcacctgaggtcaggagtttgagaccagcctggccaacatggtgaaaccgctgtctctactaaaaatacaaaaattagctgggcgtggtggcacacacctgtaatcccagctactcgggaggctgaggcaggagaattgcttgaacctgggaggcagaggttgcagtgagctgagattgtgccactgtactccagcctgggcacagagcaagactgtgtctcgggaaaaaaaaaaagaaaggcagttttgctatacagccacaaaacaattcttatttttttaatgtagatactaactg

SEQ ID NO: 23373 - DNA, 693 bp, Homo sapiens
ctagaagaagctagaccatgacagacaagtaaaaaagaatgaaaatctactagggtagaggtttttagtgtaaaaaacagagagatgatttttcaaagaaagaactctcctcaaccctctttttacatacaaacttgtagaaaaattaaaacacacagtgaaaacccatataacttttgtgtagtttcaccaatgattaacattttgtgacatttactttctctttctaccctccgtcttcccatatatattggacaatttgaaaattacaggcaccatgaacaactcatgcctaaaggcttcaacatgcttctcttaaaaacaaggcggtttttgcctggcacagtggctcacgcctgtaatcccagcactttgggaggccgaggagaatggatcacctgaggtcaggagtttgagaccagcctggccaacatggtgaaaccgctgtctctactaaaaatacaaaaattagctgggygtggtggcacacacctgtaatcccagctactcgggaggctgaggcaggagaattgcttgaacctgggaggcagaggttgcagtgagctgagattgtgccactgtactccagcctgggcacagagcaagactgtgtctcgggaaaaaaaaaaagaaaggcagttttgctatacagccacaaaacaattcttatttttttaatgtagatactaactg

SEQ ID NO: 23374 - DNA, 2411 bp, Homo sapiens
tgcatgtgtctttatagcagcatgatttagaatccaaacattcttatagacaagggctccttctcctgacgtttctgatctcattctaaaacattcacccagtccactgacctgtactgggcgctgtgctgggtgccaggcactgcttttccatattcttttctaaactgctaaaatgggtgattattcctccaggctctttgctgacactggggggaaattcttcttggttttcacacccctcttaggacgtgtcttccactctggctttacttgttcatagattcatgaaatcctcaacagagatccttgcaagtgctgaggagatagtggtgaacaaaatagataagatttctgcttttgtaaagtttacattcttctagggatcgtgtgtccttgatttggaatgcctgcttaggggggtcatgagggtataaccctggtttcctagtttccagggaatgggttgggtcattccttgtgtaacagaatattacccaactggaaccaaaaaattccttcagtgtcccttcaggcattggctttagctagtaggaggatgtagagaaattttgtgcttctgttatatctttctcatggggagctatgcagatccatctgtagggatctagatcggctacaatagtagtggccccagagaaagttgacatcagaacccctgatctacctggcatgccacctttaagggctttaacttcagctctgtgacgttccctaggaaaatcccaagaagaggtgtcccaaaccagtggtataagtaagagcttaggtcttgagtccatcactaaagaccttgggcaagttatttaatctctttaagtctcagtttgctcatctgtaaaataggatggcagtataacccatctactattttaaggattgtacgacattctgcacctaacaccttagcatagtacctaacacataggagattttagtaattattaactactatgagagaggtcaaggaggggagggagaggtgccatccatggtggataagttgtgctagcaagtgtttgtatgtggaacttttctattgttaactcttttacctctgctaatttttgccattaccaccggacccctatgtaggactcatctcctctagggtaaggtgccccgatggatcatgattatcagcatcctttttagacatggatgtaagayacttctttcttggcattctattctattctcgctggttctggattgaatccaaatactaactggggttatgtccgttttatagcaatgccatgttacaacttgtaaaccgtcatattatgtagccacttaaaggatgaagtaggccttaatctgatattatggaaagaagataatatcgactcagctgagatattaatgtatagatagaaaaatggggaaaaggatggtaaaaagtagtataatatgtatttataaagatttagacatatggatgcatggatatattctcaacagacctaagaaactatgaagagtgattattcaaagaaaggatgctgagacttcatggtaggagcatactaccaatttattatatgtgatttttttattatttgttttcataactttttttaataaaaataacgttaaaataaatcttaagcacagcccccaaatatctatacttatctatgggcagtctttgtttatctcttttccacttctccagacgagatgggataaaggagattgtagaagcctggggagtcatagcactcttgttcttgtaacagttagcttttgctggtaacaaacaattccaatatttcgtggcttaaaaaaatcatatgtttgttcacatttccctgggtggaccatgtgggctgtgctcagcaggacatttcttctgatggtttcatctgggtttactcacaccactgaaattgaattgcctagaatgtcttgacacacatacttggtgatttgctgggttgcctcagttttcttatttgtggccttttcggcaggcttgcttaggcttggtcagcaagctaacttgagtctcagggaccccagtgcagcagtgtagcaatctctaactgaggagcatctttcatcccttccatatgttgcattttctgatgtctactggaccaaatcaagacacacagccaatcccagagtgagtgatgtctcgcgatggaggaagcttcacactcacctggaaaaggtatatgcaaatggggatgggataagtttgtggccattgtttgcatctacccaggcctctttaaggcaagccatgcactgaagggaataatgctctacgaggaggatgttccttaagccggaccttcatccctaaatcatctttggcacttgaattcaagatacatgtagtctctccctttttaagagcagccttctatttgcttatacgt

SEQ ID NO: 23375 - DNA, 939 bp, Homo sapiens
aggttgtttccctgcttcccttattcccactctgcccccggtttttcccaaattctatttttctccagcgctcagggacatctctgagacagccatcaagtttgctgtgtctgtagacttctaactggggaaagacatttcaacctccccttgttgcaggagcctctggtatttgcargtacttcacttagcatggactcatggctttgtgggtgagctgaggagcaggtaccagagctctcagacataggatcagttttcttaagacatcttactcgttgctagattgttcctaagacctatggatgtcctgattatgattacatttaggacaggttctcatgaacgtgggaaaatggtgaaatatttttacttttcatagtttttaattttaatatcattggcttttggaaaatacctattgttttaaaacagctacctagggtttcaataaaagtggccttaatgttctattcctcagtgtacgaatgacccattctcggagcatatgttgtctagtagcccttgtcctgcctttctaggagatagagtttctcatggacccaaacagggcttcttaatggagatttataacatcaaaagggattacatgagaacaaagtaattatccttcgtgtatgagtatcaacccaatttacgaaggagtgaaattagacactgcagttaattacagggacagtctcaactttgtggaccaattagggctcattggttgcaagcaacaggaaccaattccccttctacattaagcaaaaagaatacttattagcagtagtcagtgagcttacaaaatttagaggtagttgaaaaagcagtgttggtagcatgacaggcaccaagccactgtgaggtctcctccatgggaagaaatgaattccaactaagtcttccgtccatgtatcattctgctccagttct

SEQ ID NO: 23376 - DNA, 939 bp, Homo sapiens
aggttgtttccctgcttcccttattcccactctgcccccggtttttcccaaattctatttttctccagcgctcagggacatctctgagacagccatcaagtttgctgtgtctgtagacttctaactggggaaagacatttcaacctccccttgttgcaggagcctctggtatttgcaggtacttcacttagcatggactcatggctttgtgggtgagctgaggagcaggtaccagagctctcagacataggatcagttttcttaagacatcttactcgttgctagattgttcctaagacctatggatgtcctgattatgattacatttaggacaggttctcatgaacgtgggaaaatggtgaaatatttttacttttcatagtttttaattttaatatcattggcttttggaaaatacctattgttttaaaacagctacctagggtttcaataaaagtggccttaatgttctattcctcagtgtacgaatgacccattctcggagcatatgttgtctagtagcccttgtcctgcctttctaggagatagagtttctcatggacccaaacagggcttcttaatggagatttataacatcaaaagggattacatgagaacaaagkaattatccttcgtgtatgagtatcaacccaatttacgaaggagtgaaattagacactgcagttaattacagggacagtctcaactttgtggaccaattagggctcattggttgcaagcaacaggaaccaattccccttctacattaagcaaaaagaatacttattagcagtagtcagtgagcttacaaaatttagaggtagttgaaaaagcagtgttggtagcatgacaggcaccaagccactgtgaggtctcctccatgggaagaaatgaattccaactaagtcttccgtccatgtatcattctgctccagttct

SEQ ID NO: 23377 - DNA, 1266 bp, Homo sapiens
gtggccctcagagaccattactgtttcctcatttcttgaatgtatggaggaccctccagttactttctgctttaaggcgatgtttattaaacattgtttctattagggctgtgctccttcctctgtaccctttaaatattcatctccctcatgctgccatccccttcatggagatcattcctgcagagcggtagtccagtttgctctacttcctggtgatcgtctcttctcgagatttcttcctgcacatgcacactctggactgtgcacttttctgctctggattcctctcctggacagttgcactggactccattcccatttgtctgagcttagggtttatgtctttttagggcatttaccgtccccactcctgtgttaccgtctctctgtgctcctagcatgtacacattgtggaatgtgagaaggcaaagatctcagactttccatgtgaattgaagacccttctctggccccttgagtgccagtgtcaccaacaccactggtcactctcctctcactttctacctgtacaaaggacagtctcccagtgtccctgtggaacattgtgattactcgaagttgtcctagctacttgggaatgagtcctaagaagattcatcttacttctgatgcatcacatgctctgtgttgcaaagcacacttggcatagccaggagcatcctaggttggcctagtgctagatggcaggcattgaaaactgtcaacaccagtacaggaacaggaaagacaaaccatggaactagatgagaccctgatactgagttgtggacagatcaactatagtgatacaggattcttgattgtctgcaacagagaacttttctaagtaacctatgcacatgataatttgatttgaatgcttttggggagaatgcagtatcatcaggaaaatttgagaacstggctcagaaaatagacaaaagggatgaaggtaccattaggatccctgggtagaaactccctgctaaggatgctgttaccagcactgtgatcactgccacgtggcaccaccagcatccatagtcctgaacacagagcagtggttctggactctacacttgacacagcctccagggatggtgcttgattgatcctgtgcttttacctagccccttaagacccaagacatatggtaacatacagagtcaagtgattttttttttttccttgaaaaagcaccagtgcaatttgaggaggaaaagcaagtcttttcaacaaataatcctggacctactggatgct

SEQ ID NO: 23378 - DNA, 1266 bp, Homo sapiens
gtggccctcagagaccattactgtttcctcatttcttgaatgtatggaggaccctccagttactttctgctttaaggcgatgtttattaaacattgtttctattagggctgtgctccttcctctgtaccctttaaatattcatctccctcatgctgccatccccttcatggagatcattcctgcagagcggtagtccagtttgctctacttcctggtgatcgtctcttctcgagatttcttcctgcacatgcacactctggactgtgcacttttctgctctggattcctctcctggacagttgcactggactccattcccatttgtctgagcttagggtttatgtctttttagggcatttaccgtccccactcctgtgttaccgtctctctgtgctcctagcatgtacacattgtggaatgtgagaaggcaaagatctcagactttccatgtgaattgaagacccttctctggccccttgagtgccagtgtcaccaacaccactggtcactctcctctcactttctacctgtacaaaggacagtctcccagtgtccctgtggaacattgtgattactcgaagttgtcctagctacttgggaatgagtcctaagaagattcatcttacttctgatgcatcacatgctctgtgttgcaaagcacacttggcatagccaggagcatcctaggttggcctagtgctagatggcaggcattgaaaactgtcaacaccagtacaggaacaggaaagacaaaccatggaactagatgagaccctgatactgagttgtggacagatcaactatagtgatacaggattcttgattgtctgcaacagagaacttttctaagtaacctatgcacatgataatttgatttgaatgcttttggggagaatgcagtatcatcaggaaaatttgagaacctggctcagaaaatagacaaaagggatgaaggtaccattaggatccctgggtagaaactccctgctaaggatgctgttaccagcactgtgatcactgccacgtggcaccaccagcatccatagtcctgaacacagagcagtggttctggactctayacttgacacagcctccagggatggtgcttgattgatcctgtgcttttacctagccccttaagacccaagacatatggtaacatacagagtcaagtgattttttttttttccttgaaaaagcaccagtgcaatttgaggaggaaaagcaagtcttttcaacaaataatcctggacctactggatgct

SEQ ID NO: 23379 - DNA, 2251 bp, Homo sapiens
tgcataagtaagttgtatagtcactcaatgaaatgctatccagcaataaaaagaaatgaattgctgacaaggacatcagtgtgtatgtgtgtgtgtgtgtgtgtgtgcatatgcgtatgtgtataacatactcagcaagagaagttatccaccaaagagtccatgctttatggttctagttttatgaagctgacgaacaggagaaattggcctatggggatggaattcaggatagtgattgtctttcacccgctaagatgcctcttcagtttctacccaaagacttcatatatatttacctctaggctgtccacaaaayggagatgtgtgaatcatgcttttcatgccattgggaaaggacatcctgttcacagcagaggtgatacaggagcattaatcaccaaatgtttagtaaatattgatacccgggtgatttacactaatcgtcacaagaccgcaatctaccttttatataaatgcaataaaaaaatcttggttataaaagtacttgcttcctttgcattttttctgctgggggagaagcacagaatgcaaagagggagaagggaattttctaaggagatggcatttctatgcactttgactggggtactggttcatgtatatgtgtgtgttggcaaaacaccatggaactgtatacttaagatctgtgcagttcatgtaattacacatgaatgaccatgaaaagtccaatgaggcatatcctagtggtcaagcctggtcatatgtgcgcattcaacatacagaaaacttgtttggtttctgtagcaggaggtatgagctttctgcaaatacaaatggtatttgaaggaaggacagtcattcatgacacaggtctgctacagcattggattccgcatcctgcagcaaaagccaggttgggaccatggttgggatgagattccatgggaacaagccaggagtgaacaactgcagttagagtggaaaacgtgtgctggtttgtctgggactttttctgtgtgagcactcaaagtctcatgtcctgggaaaatcctctgttctaagccaactgggagagttggtcaccttctttccagccagagctctgtctaaagttacatctgatggagaaattgagggatcacactggaaaaagtgaacccagagatttactttgaagctcctctgggtatgaggtcagtgtgggataattgtcatggacgaagattcactagaagtctcacaagccctgccaccctaaatcacatcagaaaagaacccctatgcattttcttttcataccacccaacatcctaaaaccatcagcttagtgttttcactcccattccctataaactccatgtggtttgttcacatgtcaggtttattcgtcagtgtatctttagcacatgtaaatggctgtcacaaatgcttaaatgattcagtgaatgattgaatgattcaatgaatgatcccatccatcaaccgttgctccaggcttcttgtaaagaccaggatcctgacccatggacatttttgaggctttaagccacagcccttcgagcaagggctggaaggaagcctctttcatctttctctggggctatcacaaccagcatatgtgtatttaattagtcactgcctatttttatatgttacacaagctcagtttctccctctctgttctctttttctcaatagtggcaatgtagattttttaaagtttatttttcagtttcttcccttttcctgcagtctccctctagagatgacactgactttaaactttgacccactaagatgcctctttagtttctatccaacgacttcatatatatctatctctaggctatccacaaaatggagatgtgtgattcatgcttttcatgcctttgggaatggacatcttgttcatagcagaggtgatacaggagtattaattaccaatgcttagtaagtattgatacccaggtgatttacacaaatcatcacaagaccacaatcatcacaagactacagtctacctcttgtataaatgcaacccaaaaatcttgaattataaacttacttgcttccttggacttcagataaatctctagtatcctcaagagtctttgaatactttcctgtctccagcaaatctcgtgggaaggaaaaaaatagatatcactttgcaatttatgtttttaccagcatgcaattgagtagattcaattgactccaaatgttttgcacattctaatttctgtcccctattgtcctcccctgt

SEQ ID NO: 23380 - DNA, 2251 bp, Homo sapiens
tgcataagtaagttgtatagtcactcaatgaaatgctatccagcaataaaaagaaatgaattgctgacaaggacatcagtgtgtatgtgtgtgtgtgtgtgtgtgtgcatatgcgtatgtgtataacatactcagcaagagaagttatccaccaaagagtccatgctttatggttctagttttatgaagctgacgaacaggagaaattggcctatggggatggaattcaggatagtgattgtctttcacccgctaagatgcctcttcagtttctacccaaagacttcatatatatttacctctaggctgtccacaaaatggagatgtgtgaatcatgcttttcatgccattgggaaaggacatcctgttcacagcagaggtgatacaggagcattaatcaccaaatgtttagtaaatattgatacccgggtgatttacactaatcgtcacaagaccgcaatctaccttttatataaatgcaataaaaaaatcttggttataaaagtacttgcttcctttgcattttttctgctgggggagaagcacagaatgcaaagagggagaagggaattttctaaggagatggcatttctatgcactttgactggggtactggttcatgtatatgtgtgtgttggcaaaacaccatggaactgtatacttaagatctgtgcagttcatgtaattacacatgaatgaccatgaaaagtccaatgaggcatatcctartggtcaagcctggtcatatgtgcgcattcaacatacagaaaacttgtttggtttctgtagcaggaggtatgagctttctgcaaatacaaatggtatttgaaggaaggacagtcattcatgacacaggtctgctacagcattggattccgcatcctgcagcaaaagccaggttgggaccatggttgggatgagattccatgggaacaagccaggagtgaacaactgcagttagagtggaaaacgtgtgctggtttgtctgggactttttctgtgtgagcactcaaagtctcatgtcctgggaaaatcctctgttctaagccaactgggagagttggtcaccttctttccagccagagctctgtctaaagttacatctgatggagaaattgagggatcacactggaaaaagtgaacccagagatttactttgaagctcctctgggtatgaggtcagtgtgggataattgtcatggacgaagattcactagaagtctcacaagccctgccaccctaaatcacatcagaaaagaacccctatgcattttcttttcataccacccaacatcctaaaaccatcagcttagtgttttcactcccattccctataaactccatgtggtttgttcacatgtcaggtttattcgtcagtgtatctttagcacatgtaaatggctgtcacaaatgcttaaatgattcagtgaatgattgaatgattcaatgaatgatcccatccatcaaccgttgctccaggcttcttgtaaagaccaggatcctgacccatggacatttttgaggctttaagccacagcccttcgagcaagggctggaaggaagcctctttcatctttctctggggctatcacaaccagcatatgtgtatttaattagtcactgcctatttttatatgttacacaagctcagtttctccctctctgttctctttttctcaatagtggcaatgtagattttttaaagtttatttttcagtttcttcccttttcctgcagtctccctctagagatgacactgactttaaactttgacccactaagatgcctctttagtttctatccaacgacttcatatatatctatctctaggctatccacaaaatggagatgtgtgattcatgcttttcatgcctttgggaatggacatcttgttcatagcagaggtgatacaggagtattaattaccaatgcttagtaagtattgatacccaggtgatttacacaaatcatcacaagaccacaatcatcacaagactacagtctacctcttgtataaatgcaacccaaaaatcttgaattataaacttacttgcttccttggacttcagataaatctctagtatcctcaagagtctttgaatactttcctgtctccagcaaatctcgtgggaaggaaaaaaatagatatcactttgcaatttatgtttttaccagcatgcaattgagtagattcaattgactccaaatgttttgcacattctaatttctgtcccctattgtcctcccctgt

SEQ ID NO: 23381 - DNA, 2251 bp, Homo sapiens
tgcataagtaagttgtatagtcactcaatgaaatgctatccagcaataaaaagaaatgaattgctgacaaggacatcagtgtgtatgtgtgtgtgtgtgtgtgtgtgcatatgcgtatgtgtataacatactcagcaagagaagttatccaccaaagagtccatgctttatggttctagttttatgaagctgacgaacaggagaaattggcctatggggatggaattcaggatagtgattgtctttcacccgctaagatgcctcttcagtttctacccaaagacttcatatatatttacctctaggctgtccacaaaatggagatgtgtgaatcatgcttttcatgccattgggaaaggacatcctgttcacagcagaggtgatacaggagcattaatcaccaaatgtttagtaaatattgatacccgggtgatttacactaatcgtcacaagaccgcaatctaccttttatataaatgcaataaaaaaatcttggttataaaagtacttgcttcctttgcattttttctgctgggggagaagcacagaatgcaaagagggagaagggaattttctaaggagatggcatttctatgcactttgactggggtactggttcatgtatatgtgtgtgttggcaaaacaccatggaactgtatacttaagatctgtgcagttcatgtaattacacatgaatgaccatgaaaagtccaatgaggcatatcctagtggtcaagcctggtcatatgtgcgcattcaacatacagaaaacttgtttggtttctgtagcaggaggtatgagctttctgcaaatacaaatggtatttgaaggaaggacagtcattcatgacacaggtctgctacagcattggattccgcatcctgcagcaaaagccaggtkgggaccatggttgggatgagattccatgggaacaagccaggagtgaacaactgcagttagagtggaaaacgtgtgctggtttgtctgggactttttctgtgtgagcactcaaagtctcatgtcctgggaaaatcctctgttctaagccaactgggagagttggtcaccttctttccagccagagctctgtctaaagttacatctgatggagaaattgagggatcacactggaaaaagtgaacccagagatttactttgaagctcctctgggtatgaggtcagtgtgggataattgtcatggacgaagattcactagaagtctcacaagccctgccaccctaaatcacatcagaaaagaacccctatgcattttcttttcataccacccaacatcctaaaaccatcagcttagtgttttcactcccattccctataaactccatgtggtttgttcacatgtcaggtttattcgtcagtgtatctttagcacatgtaaatggctgtcacaaatgcttaaatgattcagtgaatgattgaatgattcaatgaatgatcccatccatcaaccgttgctccaggcttcttgtaaagaccaggatcctgacccatggacatttttgaggctttaagccacagcccttcgagcaagggctggaaggaagcctctttcatctttctctggggctatcacaaccagcatatgtgtatttaattagtcactgcctatttttatatgttacacaagctcagtttctccctctctgttctctttttctcaatagtggcaatgtagattttttaaagtttatttttcagtttcttcccttttcctgcagtctccctctagagatgacactgactttaaactttgacccactaagatgcctctttagtttctatccaacgacttcatatatatctatctctaggctatccacaaaatggagatgtgtgattcatgcttttcatgcctttgggaatggacatcttgttcatagcagaggtgatacaggagtattaattaccaatgcttagtaagtattgatacccaggtgatttacacaaatcatcacaagaccacaatcatcacaagactacagtctacctcttgtataaatgcaacccaaaaatcttgaattataaacttacttgcttccttggacttcagataaatctctagtatcctcaagagtctttgaatactttcctgtctccagcaaatctcgtgggaaggaaaaaaatagatatcactttgcaatttatgtttttaccagcatgcaattgagtagattcaattgactccaaatgttttgcacattctaatttctgtcccctattgtcctcccctgt

SEQ ID NO: 23382 - DNA, 2251 bp, Homo sapiens
tgcataagtaagttgtatagtcactcaatgaaatgctatccagcaataaaaagaaatgaattgctgacaaggacatcagtgtgtatgtgtgtgtgtgtgtgtgtgtgcatatgcgtatgtgtataacatactcagcaagagaagttatccaccaaagagtccatgctttatggttctagttttatgaagctgacgaacaggagaaattggcctatggggatggaattcaggatagtgattgtctttcacccgctaagatgcctcttcagtttctacccaaagacttcatatatatttacctctaggctgtccacaaaatggagatgtgtgaatcatgcttttcatgccattgggaaaggacatcctgttcacagcagaggtgatacaggagcattaatcaccaaatgtttagtaaatattgatacccgggtgatttacactaatcgtcacaagaccgcaatctaccttttatataaatgcaataaaaaaatcttggttataaaagtacttgcttcctttgcattttttctgctgggggagaagcacagaatgcaaagagggagaagggaattttctaaggagatggcatttctatgcactttgactggggtactggttcatgtatatgtgtgtgttggcaaaacaccatggaactgtatacttaagatctgtgcagttcatgtaattacacatgaatgaccatgaaaagtccaatgaggcatatcctagtggtcaagcctggtcatatgtgcgcattcaacatacagaaaacttgtttggtttctgtagcaggaggtatgagctttctgcaaatacaaatggtatttgaaggaaggacagtcattcatgacacaggtctgctacagcattggattccgcatcctgcagcaaaagccaggttgggaccatggttgggatgagattccatgggaacaagccaggagtgaacaactgcagttagagtggaaaacgtgtgctggtttgtctgggactttttctgtgtgagcactcaaagtctcatgtcctgggaaaatcctctgttctaagccaactgggagagttggtcaccttctttccagccagagctctgtctaaagttacatctgatggagaaattgagggatcacactggaaaaagtgaacccagagatttactttgaagctcctctgggtatgaggtcagtgtgggataattgtcatggacgaagattcactagaagtctcacaagccctgccaccctaaatcacatcagaaaagaacccctatgcattttcttttcataccacccaacatcctaaaaccatcagcttagtgttttcactcccattccctataaactccatgtggtttgttcacatgtcaggtttattcgtcagtgtatctttagcacatgtaaatggctgtcacaaatgcttaaatgattcagtgaatgattgaatgattcaatgaatgatcccatccatcaaccgttgctccaggcttcttgtaaagaccaggatcctgacccatggacatttttgaggctttaagccacagcccttcgagcaagggctggaaggaagcctctttcatctttctctggggctatcacaaccagcatatgtgtatttaattagtcactgcctatttttatatgttacacaagctcagtttctccctctctgttctctttttctcaatagtggcaatgtagattttttaaagtttatttttcagtttcttcccttttcctgcagtctccctctagagatgacactgactttaaactttgacccactaagatgcctctttagtttctatccaacgacttcatatatatctatctctaggctatccacaaaatggagatgtgtgattcatgcttttcatgcctttgggaatggacatcttgttcatagcagaggtgatacaggagtattaattaccaatgcttagtaagtattgatacccaggtgatttacacaaatcatcacaagascacaatcatcacaagactacagtctacctcttgtataaatgcaacccaaaaatcttgaattataaacttacttgcttccttggacttcagataaatctctagtatcctcaagagtctttgaatactttcctgtctccagcaaatctcgtgggaaggaaaaaaatagatatcactttgcaatttatgtttttaccagcatgcaattgagtagattcaattgactccaaatgttttgcacattctaatttctgtcccctattgtcctcccctgt

SEQ ID NO: 23383 - DNA, 2251 bp, Homo sapiens
tgcataagtaagttgtatagtcactcaatgaaatgctatccagcaataaaaagaaatgaattgctgacaaggacatcagtgtgtatgtgtgtgtgtgtgtgtgtgtgcatatgcgtatgtgtataacatactcagcaagagaagttatccaccaaagagtccatgctttatggttctagttttatgaagctgacgaacaggagaaattggcctatggggatggaattcaggatagtgattgtctttcacccgctaagatgcctcttcagtttctacccaaagacttcatatatatttacctctaggctgtccacaaaatggagatgtgtgaatcatgcttttcatgccattgggaaaggacatcctgttcacagcagaggtgatacaggagcattaatcaccaaatgtttagtaaatattgatacccgggtgatttacactaatcgtcacaagaccgcaatctaccttttatataaatgcaataaaaaaatcttggttataaaagtacttgcttcctttgcattttttctgctgggggagaagcacagaatgcaaagagggagaagggaattttctaaggagatggcatttctatgcactttgactggggtactggttcatgtatatgtgtgtgttggcaaaacaccatggaactgtatacttaagatctgtgcagttcatgtaattacacatgaatgaccatgaaaagtccaatgaggcatatcctagtggtcaagcctggtcatatgtgcgcattcaacatacagaaaacttgtttggtttctgtagcaggaggtatgagctttctgcaaatacaaatggtatttgaaggaaggacagtcattcatgacacaggtctgctacagcattggattccgcatcctgcagcaaaagccaggttgggaccatggttgggatgagattccatgggaacaagccaggagtgaacaactgcagttagagtggaaaacgtgtgctggtttgtctgggactttttctgtgtgagcactcaaagtctcatgtcctgggaaaatcctctgttctaagccaactgggagagttggtcaccttctttccagccagagctctgtctaaagttacatctgatggagaaattgagggatcacactggaaaaagtgaacccagagatttactttgaagctcctctgggtatgaggtcagtgtgggataattgtcatggacgaagattcactagaagtctcacaagccctgccaccctaaatcacatcagaaaagaacccctatgcattttcttttcataccacccaacatcctaaaaccatcagcttagtgttttcactcccattccctataaactccatgtggtttgttcacatgtcaggtttattcgtcagtgtatctttagcacatgtaaatggctgtcacaaatgcttaaatgattcagtgaatgattgaatgattcaatgaatgatcccatccatcaaccgttgctccaggcttcttgtaaagaccaggatcctgacccatggacatttttgaggctttaagccacagcccttcgagcaagggctggaaggaagcctctttcatctttctctggggctatcacaaccagcatatgtgtatttaattagtcactgcctatttttatatgttacacaagctcagtttctccctctctgttctctttttctcaatagtggcaatgtagattttttaaagtttatttttcagtttcttcccttttcctgcagtctccctctagagatgacactgactttaaactttgacccactaagatgcctctttagtttctatccaacgacttcatatatatctatctctaggctatccacaaaatggagatgtgtgattcatgcttttcatgcctttgggaatggacatcttgttcatagcagaggtgatacaggagtattaattaccaatgcttagtaagtattgatacccaggtgatttacacaaatcatcacaagaccacaatcatcacaagactacagtctacctcttgtataaatgcaacccaaaaatcttgaattataaacttacttgcttccttggacttcagataaatctctagtatcctcaagagtctttgaatactttcctgtctccagcaaatctcgtgggaaggaaaaaaatagatatcactttgcaatttatgtttttaccagcatgcaattgagtagattcaattgactccaaatgtyttgcacattctaatttctgtcccctattgtcctcccctgt

SEQ ID NO: 23384 - DNA, 1348 bp, Homo sapiens
tgcatattctgtttcgtaggtctgggtggagcctgagattcggcacttctaataagcttycaggtgttgttcctgatgccggttcgtgcaccagaatatgaacagcaatattttatagggtgttaagcaacagaaatgtatttgtacgtggatgtctctgcaatagaattgcatccagaggagaaatgaaatagcttacaattatggatgaattgtgtaggtattcatatagaatagctaacataaatggagccatgcgtgtattatttaacactcacaacagtatagatagacacagtgcttatctccatgacagagttgaggggctataagcttacagatgtttagtgatgtgatcgagttgctgagctaacactcagtggagtttgaacccaggcagtatgatttcagagaccacgctgaagtatctgtactgctcatggactgttgccctgaaatgcagtttatttgtctgaagtgtaatgtctggagttttttgcatcttcatcattataaacctcttacaaatattaattgagttccttaggccattccttaaggttttatagcagataagagaagataatgtggttccaactgaagaccaccaaatagtgctcactggtagctgaaattcaggaaatgatttacatatccagcaggagtgattttctttatatatagaaaaatatatttaaattgagttaaatcattatctgtagtaattatagctgaatggaagaaccggcctaaagagcaagatttttttttttaataaaaaggatatcctaggaactctacagtgatttgcagattaattctatctttgtttatatttctactttcaaacttttttattcaggtaaaattcacataatataaaatacagatacataatataaaattatataaatataaaattatgtgaattgtaaactgtacaattcaaggacattagattcacaatgctgtgcaatgattacctccaataagcatgtggaaatatgctcaacaccattagtcattagagaaatgcaaatcaggccaggcatggaggctcatacctgtaatcccagtacttgggaggccaaggcaggaagagtccttgaacacaagagttttataccagcctgggcagcacagggagacctcatctctacagaaaataaaaataaattagctgagtgtggtggcacacatctgtggtcccagctacttgggtggctgaggtgggaggatcacttgagcctgtgaggccgaggctgcagtgagtggtgattgcgctactgcactctagcctgggcaacagagcaaatctgtatctcaaaacaaaaaagcaaaaaatgca

SEQ ID NO: 23385 - DNA, 1348 bp, Homo sapiens
tgcatattctgtttcgtaggtctgggtggagcctgagattcggcacttctaataagcttccaggtgttgttcctgatgcyggttcgtgcaccagaatatgaacagcaatattttatagggtgttaagcaacagaaatgtatttgtacgtggatgtctctgcaatagaattgcatccagaggagaaatgaaatagcttacaattatggatgaattgtgtaggtattcatatagaatagctaacataaatggagccatgcgtgtattatttaacactcacaacagtatagatagacacagtgcttatctccatgacagagttgaggggctataagcttacagatgtttagtgatgtgatcgagttgctgagctaacactcagtggagtttgaacccaggcagtatgatttcagagaccacgctgaagtatctgtactgctcatggactgttgccctgaaatgcagtttatttgtctgaagtgtaatgtctggagttttttgcatcttcatcattataaacctcttacaaatattaattgagttccttaggccattccttaaggttttatagcagataagagaagataatgtggttccaactgaagaccaccaaatagtgctcactggtagctgaaattcaggaaatgatttacatatccagcaggagtgattttctttatatatagaaaaatatatttaaattgagttaaatcattatctgtagtaattatagctgaatggaagaaccggcctaaagagcaagatttttttttttaataaaaaggatatcctaggaactctacagtgatttgcagattaattctatctttgtttatatttctactttcaaacttttttattcaggtaaaattcacataatataaaatacagatacataatataaaattatataaatataaaattatgtgaattgtaaactgtacaattcaaggacattagattcacaatgctgtgcaatgattacctccaataagcatgtggaaatatgctcaacaccattagtcattagagaaatgcaaatcaggccaggcatggaggctcatacctgtaatcccagtacttgggaggccaaggcaggaagagtccttgaacacaagagttttataccagcctgggcagcacagggagacctcatctctacagaaaataaaaataaattagctgagtgtggtggcacacatctgtggtcccagctacttgggtggctgaggtgggaggatcacttgagcctgtgaggccgaggctgcagtgagtggtgattgcgctactgcactctagcctgggcaacagagcaaatctgtatctcaaaacaaaaaagcaaaaaatgca

SEQ ID NO: 23386 - DNA, 1348 bp, Homo sapiens
tgcatattctgtttcgtaggtctgggtggagcctgagattcggcacttctaataagcttccaggtgttgttcctgatgccggttcgtgcaccagaatatgaacagcaatattttatagggtgttaagcaacagaaatgtatttgtacgtggatgtctctgcaatagaattgcatycagaggagaaatgaaatagcttacaattatggatgaattgtgtaggtattcatatagaatagctaacataaatggagccatgcgtgtattatttaacactcacaacagtatagatagacacagtgcttatctccatgacagagttgaggggctataagcttacagatgtttagtgatgtgatcgagttgctgagctaacactcagtggagtttgaacccaggcagtatgatttcagagaccacgctgaagtatctgtactgctcatggactgttgccctgaaatgcagtttatttgtctgaagtgtaatgtctggagttttttgcatcttcatcattataaacctcttacaaatattaattgagttccttaggccattccttaaggttttatagcagataagagaagataatgtggttccaactgaagaccaccaaatagtgctcactggtagctgaaattcaggaaatgatttacatatccagcaggagtgattttctttatatatagaaaaatatatttaaattgagttaaatcattatctgtagtaattatagctgaatggaagaaccggcctaaagagcaagatttttttttttaataaaaaggatatcctaggaactctacagtgatttgcagattaattctatctttgtttatatttctactttcaaacttttttattcaggtaaaattcacataatataaaatacagatacataatataaaattatataaatataaaattatgtgaattgtaaactgtacaattcaaggacattagattcacaatgctgtgcaatgattacctccaataagcatgtggaaatatgctcaacaccattagtcattagagaaatgcaaatcaggccaggcatggaggctcatacctgtaatcccagtacttgggaggccaaggcaggaagagtccttgaacacaagagttttataccagcctgggcagcacagggagacctcatctctacagaaaataaaaataaattagctgagtgtggtggcacacatctgtggtcccagctacttgggtggctgaggtgggaggatcacttgagcctgtgaggccgaggctgcagtgagtggtgattgcgctactgcactctagcctgggcaacagagcaaatctgtatctcaaaacaaaaaagcaaaaaatgca

SEQ ID NO: 23387 - DNA, 1348 bp, Homo sapiens
tgcatattctgtttcgtaggtctgggtggagcctgagattcggcacttctaataagcttccaggtgttgttcctgatgccggttcgtgcaccagaatatgaacagcaatattttatagggtgttaagcaacagaaatgtatttgtacgtggatgtctctgcaatagaattgcatccagaggagaaatgaaatagcttacaattatggatgaattgtgtaggtattcatatagaatagctaacataaatggagccatgcgtgtattatttaacactcacaacagtatagatagacacagtgcttatctccatgacagagttgaggggctrtaagcttacagatgtttagtgatgtgatcgagttgctgagctaacactcagtggagtttgaacccaggcagtatgatttcagagaccacgctgaagtatctgtactgctcatggactgttgccctgaaatgcagtttatttgtctgaagtgtaatgtctggagttttttgcatcttcatcattataaacctcttacaaatattaattgagttccttaggccattccttaaggttttatagcagataagagaagataatgtggttccaactgaagaccaccaaatagtgctcactggtagctgaaattcaggaaatgatttacatatccagcaggagtgattttctttatatatagaaaaatatatttaaattgagttaaatcattatctgtagtaattatagctgaatggaagaaccggcctaaagagcaagatttttttttttaataaaaaggatatcctaggaactctacagtgatttgcagattaattctatctttgtttatatttctactttcaaacttttttattcaggtaaaattcacataatataaaatacagatacataatataaaattatataaatataaaattatgtgaattgtaaactgtacaattcaaggacattagattcacaatgctgtgcaatgattacctccaataagcatgtggaaatatgctcaacaccattagtcattagagaaatgcaaatcaggccaggcatggaggctcatacctgtaatcccagtacttgggaggccaaggcaggaagagtccttgaacacaagagttttataccagcctgggcagcacagggagacctcatctctacagaaaataaaaataaattagctgagtgtggtggcacacatctgtggtcccagctacttgggtggctgaggtgggaggatcacttgagcctgtgaggccgaggctgcagtgagtggtgattgcgctactgcactctagcctgggcaacagagcaaatctgtatctcaaaacaaaaaagcaaaaaatgca

SEQ ID NO: 23388 - DNA, 1348 bp, Homo sapiens
tgcatattctgtttcgtaggtctgggtggagcctgagattcggcacttctaataagcttccaggtgttgttcctgatgccggttcgtgcaccagaatatgaacagcaatattttatagggtgttaagcaacagaaatgtatttgtacgtggatgtctctgcaatagaattgcatccagaggagaaatgaaatagcttacaattatggatgaattgtgtaggtattcatatagaatagctaacataaatggagccatgcgtgtattatttaacactcacaacagtatagatagacacagtgcttatctccatgacagagttgaggggctataagcttacagatgtttagtgatgtgatcgagttgctgagctaacactcagtggagtttgaacccaggcagtatgatttcagagaccacgctgaagtatctgtactgctcatggactgttgccctgaaatgcagtttatttgtctgaagtgtaatgtctggagttttttgcatcttcatcattataaacctcttacaaatattaattgagttccttaggccattccttaaggttttatagcagataagagaagataatgtggttccaactgaagaccaccaaatagtgctcactggtagctgaaattcaggaaatgatttacatatccagcaggagtgattttctttatatatagaaaaatatatttaaattgagttaaatcattatctgtagtaattatagctgaatggaagaaccggcctaaagagcaagatttttttttttaataaaaaggatatcctaggaactctacagtgatttgcagattaattctatctttgtttatatttctactttyaaacttttttattcaggtaaaattcacataatataaaatacagatacataatataaaattatataaatataaaattatgtgaattgtaaactgtacaattcaaggacattagattcacaatgctgtgcaatgattacctccaataagcatgtggaaatatgctcaacaccattagtcattagagaaatgcaaatcaggccaggcatggaggctcatacctgtaatcccagtacttgggaggccaaggcaggaagagtccttgaacacaagagttttataccagcctgggcagcacagggagacctcatctctacagaaaataaaaataaattagctgagtgtggtggcacacatctgtggtcccagctacttgggtggctgaggtgggaggatcacttgagcctgtgaggccgaggctgcagtgagtggtgattgcgctactgcactctagcctgggcaacagagcaaatctgtatctcaaaacaaaaaagcaaaaaatgca

SEQ ID NO: 23389 - DNA, 478 bp, Homo sapiens
accattctgagtgtcttacataaataagtgggcaggtggggcctgtagcaaattggagctttcttgccccatcaaagggtcagccaccactcagctccagcctagagtggccagatattctgctgtttaaagagaaactagaaattcattttcttggtaaattgtggatgtgtttttcatgtgagtaacaattaaaaacaattttgaaacccccataggagcaaaatagaaatgtgtacagctggcttcaggcccaggtacatctcatatgctctgtgtgctcagaactcccgttctttccttgtgccttgggggttgtaccactgaatcagttcagaacagcaggtccctctgtaggacacaataggtctctcattactyacatgccatgctgtgaggaagcccaagcagccacaaggaaaagtgatgtggagaaaaagagatgcccaccaaggcctcagctgtgccatccatacca

SEQ ID NO: 23390 - DNA, 912 bp, Homo sapiens
gtttatgaattacattttttattattcttaaactatctgtaacagtgtaatattgttagggtaattacagtgcattttaaaaagtattttgctgaaacttttttttttgagacagagtcyggctctgtcacccaggctggagtgcggtggcgccatctgggcttactgcaagctccacctcctgggttcacgccattctcctgcctcagcctcccgagtagctgggactacaggcgcccaccaccacgcccagttaattttttgtatttttactagagatggggtttcaccgtgttagccaggatggtctcgatctcctgacctcatgatccacctgcctcggcctcccaaagtgctggaattacaggcgtgagccaccatgctgggctgaaacattttaattttaaagaaattgctctgattttaaaatattgcccttataagcagctgagtatacatgaaaacatcattcaatggaaaataacagaagacatgtaaataatacaagtgctgagcgagttgtacaatttcagaatgctttgaatctatcaaatttctaagttgatccatcattgtacaggaagtttgacactcaatcagagccagccttgccaattacaagaactcttctttggaattttggtttctaagggtcacactttttggaatataatattttgtctcttaaatagtctgtatctactactaataaatagtagctgggtatccatatcatgtaacagaagggaaatgaaattgtacaatttttttaggtaattctaggtaatttttacataattttagataaatctccaggtaattctgaaatacttttggttgaaaatgggctgtattggatggtttgattgctttcttttttataaaaattaaactcccagctatcttccaagc

SEQ ID NO: 23391 - DNA, 912 bp, Homo sapiens
gtttatgaattacattttttattattcttaaactatctgtaacagtgtaatattgttagggtaattacagtgcattttaaaaagtattttgctgaaacttttttttttgagacagagtccggctctgtcacccaggctggagtgcggtggcgccatctgggcttactgcaagctccacctcctgggttcacgccattctcctgcctcagcctcccgagtagctgggactacaggcgcccaccaccacgcccagttaattttttgtatttttactagagatggggtttcaccgtgttagccaggatggtctcgatctcctgacctcatgatccacctgcctcggcctcccaaagtgctggaattacaggcrtgagccaccatgctgggctgaaacattttaattttaaagaaattgctctgattttaaaatattgcccttataagcagctgagtatacatgaaaacatcattcaatggaaaataacagaagacatgtaaataatacaagtgctgagcgagttgtacaatttcagaatgctttgaatctatcaaatttctaagttgatccatcattgtacaggaagtttgacactcaatcagagccagccttgccaattacaagaactcttctttggaattttggtttctaagggtcacactttttggaatataatattttgtctcttaaatagtctgtatctactactaataaatagtagctgggtatccatatcatgtaacagaagggaaatgaaattgtacaatttttttaggtaattctaggtaatttttacataattttagataaatctccaggtaattctgaaatacttttggttgaaaatgggctgtattggatggtttgattgctttcttttttataaaaattaaactcccagctatcttccaagc

SEQ ID NO: 23392 - DNA, 267 bp, Homo sapiens
aataactgttttttctttccaaccctaaagacttatccctctactaattgtagactaaccattttggagcatagattatataatactagtaaagttagtaattaaatacatgcactccctccatgggaggaataagaaaaattgagagagttgaagaatgggtagttaatggtggaaatttrgagaagttattttaaggaaggaaatcacttcttggtattctctctaatcataacacacagatagctcactttgcctaaatatagg

SEQ ID NO: 23393 - DNA, 2030 bp, Homo sapiens
ccctggggtgaattactgagctgtgactagcgttcctggggaagagaatgcactctccaagcctgagcccagggctgtcactagaacatgtcctccggcaggggctcccggtgccaaataagaggaaagtaggtaccagtttctgagaccctcatagccaygccctgtgcgtcccctactcagacccaaaagaaaccttcacaaggctactctgtatctatttaggaaaaaaaaaaagtgtccatctctgtggagcctaatcttcaaatgcctttgcaaactgctccccaatctccttgagccctggacagtgggcaagaacggaggaggtgacacagttcttgattttcccagccgctctctgggtgtccctgtataagccagcaaagtagcaacagtgtctccaggaaaacgaaaccctctttactgctgcccactgaacaactttttacattttccagaatgctgaagattcacaacccacctacttctgagtgatcagtggtgtggctgtcccgttaaactcttttttttttttttttttttttttttttttttgagacggagtctcgctctgtcgcccaggctggagtgcagtggcgggatctcggctcactgcaagctccgcctcccgggttcacgccattctcctgcctcagcctcccaagtagctgggactacaggcgcccgccactacgcccggctaattttttgtatttttagtagagacggggtttccccgttttagccaggatggtctcgatctcctgacctcgtgatccgcccgcctcggcctcccaaagtgctgggattacaggcgtgagccaccgcgcccggccccgttaaactcttatgcacccttcaaagcccaattcaaatgtcccctctctttgctgctgccaccacctagccccaggaggatcctaccagctgttccctcaggctttaaacacatggtacacatgcccactttgcttcctgtccttctgctagtctgttacctgcctgggcacaggccatcatcctcctcatcttcatctctgcagcacctaacacagtgcctggtgcacggtgggtgcccaggggcttgttgaattcaattgttgaattgaaggatctatgaggaggggaccacagtttgcaaagcaaacgtcgcatcattaagttctaacacaaggtcagcacgcagggctgtgtatttaagatcagacacgtttggaaaacccagggcatttgtacaataagctcacatccatatcctccctccttgaagcctatgcaagaacccagaaagaagtcaaagtaaaatacgtaaacagtagtttttgagtagttaaaattcctgtctctgcctcagtgcgtcggacaatggaaagaatgtgagaagcacagccaagggcccggaatttgagtcccgacacctcggccatggctgtgcgatgagccctgggagctctgcttctgtaaaacaaaccaacccaggacaccctggcaagtcaacctggaaggtggctgaccaagaccgtggccttaatttggccaagtcgacattggtttcagcccagaattcactagaagacattgaagactctgttcaagtgaacagttgagcaaagtgtccccttacagtacagggaagatagcaggccctgggaagcttccagaaggtcctctgaagtgcctgaaatgcaggaggcccttagaacgtatttgtggaatgaagaacgaggacacgcaggattgcatggctgaagggctgcgcctggagaagacagagaggacttctgctgggcctgaggggttgagaaagaagatgagtgagttgaggcttcaggaagagcaagttaaggaaggattaagcagtagaactacataattcgacggctggaatgcatcgccgtgggaggagtgagcgccttgtcactggagaaatgcaagcccagaggagatgacagatcacatcacaaaaccacagtaaaaaagatctaaatatgggtacttaccattaaaatagtccctcaacccaggga

SEQ ID NO: 23394 - DNA, 2030 bp, Homo sapiens
ccctggggtgaattactgagctgtgactagcgttcctggggaagagaatgcactctccaagcctgagcccagggctgtcactagaacatgtcctccggcaggggctcccggtgccaaataagaggaaagtaggtaccagtttctgagaccctcatagccatgccctgtgcgtcccctactcagacccaaaagaaaccttcacaaggytactctgtatctatttaggaaaaaaaaaaagtgtccatctctgtggagcctaatcttcaaatgcctttgcaaactgctccccaatctccttgagccctggacagtgggcaagaacggaggaggtgacacagttcttgattttcccagccgctctctgggtgtccctgtataagccagcaaagtagcaacagtgtctccaggaaaacgaaaccctctttactgctgcccactgaacaactttttacattttccagaatgctgaagattcacaacccacctacttctgagtgatcagtggtgtggctgtcccgttaaactcttttttttttttttttttttttttttttttttgagacggagtctcgctctgtcgcccaggctggagtgcagtggcgggatctcggctcactgcaagctccgcctcccgggttcacgccattctcctgcctcagcctcccaagtagctgggactacaggcgcccgccactacgcccggctaattttttgtatttttagtagagacggggtttccccgttttagccaggatggtctcgatctcctgacctcgtgatccgcccgcctcggcctcccaaagtgctgggattacaggcgtgagccaccgcgcccggccccgttaaactcttatgcacccttcaaagcccaattcaaatgtcccctctctttgctgctgccaccacctagccccaggaggatcctaccagctgttccctcaggctttaaacacatggtacacatgcccactttgcttcctgtccttctgctagtctgttacctgcctgggcacaggccatcatcctcctcatcttcatctctgcagcacctaacacagtgcctggtgcacggtgggtgcccaggggcttgttgaattcaattgttgaattgaaggatctatgaggaggggaccacagtttgcaaagcaaacgtcgcatcattaagttctaacacaaggtcagcacgcagggctgtgtatttaagatcagacacgtttggaaaacccagggcatttgtacaataagctcacatccatatcctccctccttgaagcctatgcaagaacccagaaagaagtcaaagtaaaatacgtaaacagtagtttttgagtagttaaaattcctgtctctgcctcagtgcgtcggacaatggaaagaatgtgagaagcacagccaagggcccggaatttgagtcccgacacctcggccatggctgtgcgatgagccctgggagctctgcttctgtaaaacaaaccaacccaggacaccctggcaagtcaacctggaaggtggctgaccaagaccgtggccttaatttggccaagtcgacattggtttcagcccagaattcactagaagacattgaagactctgttcaagtgaacagttgagcaaagtgtccccttacagtacagggaagatagcaggccctgggaagcttccagaaggtcctctgaagtgcctgaaatgcaggaggcccttagaacgtatttgtggaatgaagaacgaggacacgcaggattgcatggctgaagggctgcgcctggagaagacagagaggacttctgctgggcctgaggggttgagaaagaagatgagtgagttgaggcttcaggaagagcaagttaaggaaggattaagcagtagaactacataattcgacggctggaatgcatcgccgtgggaggagtgagcgccttgtcactggagaaatgcaagcccagaggagatgacagatcacatcacaaaaccacagtaaaaaagatctaaatatgggtacttaccattaaaatagtccctcaacccaggga

SEQ ID NO: 23395 - DNA, 2030 bp, Homo sapiens
ccctggggtgaattactgagctgtgactagcgttcctggggaagagaatgcactctccaagcctgagcccagggctgtcactagaacatgtcctccggcaggggctcccggtgccaaataagaggaaagtaggtaccagtttctgagaccctcatagccatgccctgtgcgtcccctactcagacccaaaagaaaccttcacaaggctactctgtatctatttaggaaaaaaaaaaagtgtccatctctgtggagcctaatcttcaaatgcctttgcaaactgctccccaatctccttgagccctggacagtgggcaagaacggaggaggtgacacagttcttgattttcccagccgctctctgggtgtccctgtataagccagcaaagtagcaacagtgtctccaggaaaacgaaaccctctttactgctgcccactgaacaactttttacattttccagaatgctgaagattcacaacccacctacttctgagtgatcagtggtgtggctgtcccgttaaactcttttttttttttttttttttttttttttttttgagacggagtctcgctctgtcgcccaggctggagtgcagtggcgggatctcggctcactgcaagctccgcctcccgggttcacgccattctcctgcctcagcctcccaagtagctgggactacaggcgcccgccactacgcccggctaattttttgtatttttagtagagacggggtttccccgttttagccaggatggtctcgatctcctgacctcgtgatccgcccgcctcggcctcccaaagtgctgggattacaggcgtgagccaccgcgccyggccccgttaaactcttatgcacccttcaaagcccaattcaaatgtcccctctctttgctgctgccaccacctagccccaggaggatcctaccagctgttccctcaggctttaaacacatggtacacatgcccactttgcttcctgtccttctgctagtctgttacctgcctgggcacaggccatcatcctcctcatcttcatctctgcagcacctaacacagtgcctggtgcacggtgggtgcccaggggcttgttgaattcaattgttgaattgaaggatctatgaggaggggaccacagtttgcaaagcaaacgtcgcatcattaagttctaacacaaggtcagcacgcagggctgtgtatttaagatcagacacgtttggaaaacccagggcatttgtacaataagctcacatccatatcctccctccttgaagcctatgcaagaacccagaaagaagtcaaagtaaaatacgtaaacagtagtttttgagtagttaaaattcctgtctctgcctcagtgcgtcggacaatggaaagaatgtgagaagcacagccaagggcccggaatttgagtcccgacacctcggccatggctgtgcgatgagccctgggagctctgcttctgtaaaacaaaccaacccaggacaccctggcaagtcaacctggaaggtggctgaccaagaccgtggccttaatttggccaagtcgacattggtttcagcccagaattcactagaagacattgaagactctgttcaagtgaacagttgagcaaagtgtccccttacagtacagggaagatagcaggccctgggaagcttccagaaggtcctctgaagtgcctgaaatgcaggaggcccttagaacgtatttgtggaatgaagaacgaggacacgcaggattgcatggctgaagggctgcgcctggagaagacagagaggacttctgctgggcctgaggggttgagaaagaagatgagtgagttgaggcttcaggaagagcaagttaaggaaggattaagcagtagaactacataattcgacggctggaatgcatcgccgtgggaggagtgagcgccttgtcactggagaaatgcaagcccagaggagatgacagatcacatcacaaaaccacagtaaaaaagatctaaatatgggtacttaccattaaaatagtccctcaacccaggga

SEQ ID NO: 23396 - DNA, 2030 bp, Homo sapiens
ccctggggtgaattactgagctgtgactagcgttcctggggaagagaatgcactctccaagcctgagcccagggctgtcactagaacatgtcctccggcaggggctcccggtgccaaataagaggaaagtaggtaccagtttctgagaccctcatagccatgccctgtgcgtcccctactcagacccaaaagaaaccttcacaaggctactctgtatctatttaggaaaaaaaaaaagtgtccatctctgtggagcctaatcttcaaatgcctttgcaaactgctccccaatctccttgagccctggacagtgggcaagaacggaggaggtgacacagttcttgattttcccagccgctctctgggtgtccctgtataagccagcaaagtagcaacagtgtctccaggaaaacgaaaccctctttactgctgcccactgaacaactttttacattttccagaatgctgaagattcacaacccacctacttctgagtgatcagtggtgtggctgtcccgttaaactcttttttttttttttttttttttttttttttttgagacggagtctcgctctgtcgcccaggctggagtgcagtggcgggatctcggctcactgcaagctccgcctcccgggttcacgccattctcctgcctcagcctcccaagtagctgggactacaggcgcccgccactacgcccggctaattttttgtatttttagtagagacggggtttccccgttttagccaggatggtctcgatctcctgacctcgtgatccgcccgcctcggcctcccaaagtgctgggattacaggcgtgagccaccgcgcccggccccgttaaactcttatgcacccttcaaagcccaattcaaatgtcccctctctttgctgctgccaccacctagccccaggaggatcctaccagctgttccctcaggctttaaacacatggtacacatgcccactttgcttcctgtccttctgctagtctgttacctgcctgggcacaggccatcatcctcctcatcttcatctctgcagcacctaacacagtgcctggtgcacggtgggtgcccaggggcttgttgaattcaattgttgaattgaaggatctatgaggaggggaccacagtttgcaaagcaaacgtcgcatcattaagttctaacacaaggtcagcacgcagggctgtgtatttaagatcagacacgtttggaaaacccagggcatttgtacaataagctcacatccatatcctccctccttgaagcctatgcaagaacccagaaagaagtcaaagtaaaatacgtaaacagtagtttttgagtagttaaaattcctgtctctgcctcagtgcgtcggacaatggaaagaatgtgagaagcmcagccaagggcccggaatttgagtcccgacacctcggccatggctgtgcgatgagccctgggagctctgcttctgtaaaacaaaccaacccaggacaccctggcaagtcaacctggaaggtggctgaccaagaccgtggccttaatttggccaagtcgacattggtttcagcccagaattcactagaagacattgaagactctgttcaagtgaacagttgagcaaagtgtccccttacagtacagggaagatagcaggccctgggaagcttccagaaggtcctctgaagtgcctgaaatgcaggaggcccttagaacgtatttgtggaatgaagaacgaggacacgcaggattgcatggctgaagggctgcgcctggagaagacagagaggacttctgctgggcctgaggggttgagaaagaagatgagtgagttgaggcttcaggaagagcaagttaaggaaggattaagcagtagaactacataattcgacggctggaatgcatcgccgtgggaggagtgagcgccttgtcactggagaaatgcaagcccagaggagatgacagatcacatcacaaaaccacagtaaaaaagatctaaatatgggtacttaccattaaaatagtccctcaacccaggga

SEQ ID NO: 23397 - DNA, 632 bp, Homo sapiens
cacatttatcttttagaaataaaaaatcctcaacatctaacatrtgtgaaagggctttgacaagcattaagtattgcctccactcctctaaggaggtcagccttgggaaagctaaagacaaaataatttggatacaatgcaacttgaaataagcctaagaccttacatgccagatacagagtaggaaggtgctcaacttctttcatgtcccaaattatatccttagtcgaaaactcattgccacatatccctggccagaggtctttgcagcaattcatctttctgagccctcttaactactttaaagttctttggtgctagaaagtcactagtagatcagttgctattcaaactgtttatatctaaactgtatctaaagtcttcttacagaaattttatttagaaaaagtgaattttccatatgtcttaaaatcaaccttggacttccaattaaacatcacagcttgaacatacatttatcttcacttcttcccagccccactaaaattgctgtgaactaattttttcaaaaggctttatctacaatggcaggccaaattcctcaggctcacaagttccttggaggtatcagacacctttaagggcatgggaatttagtgaaaatccacatg

SEQ ID NO: 23398 - DNA, 571 bp, Homo sapiens
aagaactattaggccttactctatatgttgccaatattttctcccagattttcagttatgatttttgatgtgcaaaaacatttaatgttatatagtcaaaattatcgatcttttttactgcctatagattttcaagcataattaaaaagccttttcctacaccaaaatgaaaaagaaatttactttttattgtatcatacagtttcatttttatgttagatctgtgatatattttgagttaattttgtgtatatataagctatgaattaatttcacctttttctaaatggctcctgggttgtcccgttgtcccagctttaatttttaaaaagtctatctttgtcttttattatatatcaaatttccatatgaactttagttctattaytgagtcttctatttcaccggttgatttatcaatttatgctctaattgaccactgaaggatttacatcaaagaaatcagtaaatgatataaatcagatcccccgaccccaacccaaactacttgtttaccagtatgccactaaacttactctgtgtgtgtgtgtgtgtgtgtgtgtgtgtgtgt

SEQ ID NO: 23399 - DNA, 571 bp, Homo sapiens
aagaactattaggccttactctatatgttgccaatattttctcccagattttcagttatgatttttgatgtgcaaaaacatttaatgttatatagtcaaaattatcgatcttttttactgcctatagattttcaagcataattaaaaagccttttcctacaccaaaatgaaaaagaaatttactttttattgtatcatacagtttcatttttatgttagatctgtgatatattttgagttaattttgtgtatatataagctatgaattaatttcacctttttctaaatggctcctgggttgtcccgttgtcccagctttaatttttaaaaagtctatctttgtcttttattatatatcaaatttccatatgaactttagttctattattgagtcttctatttcaccggttgatttatcaatttatgctctaattgaccactgaaggatttacatcaaagaaatcagtaaatgatataaatcagatccccygaccccaacccaaactacttgtttaccagtatgccactaaacttactctgtgtgtgtgtgtgtgtgtgtgtgtgtgtgtgt

SEQ ID NO: 23400 - DNA, 532 bp, Homo sapiens
aagcttctattttggtctggtagctactattgtacttacacttattgaacaccagtaatctcctggagtttttggtttgctcatttctatttctgcctttggctacctacctgctttatcagtttttgctgtcgtattttccttacctrcaaggtacacaacaatccataggcttattttcttctttctctctctcacttgcacttttcagttgcattatttctactttatcacaacatgtaacatttgtactttagtcttccaccttcgtccccacattttaaaagttttacatctacgtttatttacatattgacagtttcaccagatttttaggagtttcagaaaaattatttgactgaaaatttcccagttctctctacattggacaaatcccattctcaagaactgacaaaattggcgaaataataaacatatctgtttatttttataataaatggattatttatatatatttttattatatatattatataatatataatatatattattatttatataataaatg

SEQ ID NO: 23401 - DNA, 1128 bp, Homo sapiens
aggcactatgttctctgaagaactgtggctggaaaatgagaaaaagtgtgctgtggttcggaagtctaagcagggcaggaaacgccaagaactgctggccgtagccttcggggtgaaggtgggtgtcaaaggcggctttctttggccccctctcaaactctttgcctgttcacagatctcctccctggttcgaagggctgccctcacacacaacgacaaccacttcaattatgagaagacacacaactttaaggtaagcaagcctctgcattccttcttctgttacaaaagggcaggtggaaaggtacagtgtatagtttccrtctggtttctgactgtaaagtcaagagacaatgaattcctttgctttccacatttagctataagcttaacacctgcgctttctgtcagttcaaactggagacctcagaaagcagtctgctcagtgcttatgcctggaaacaccttatctggatgttgacttagttttggagaattgggcccattgccacttcacgttcccatgtccagtgaaataaacacagagcatgcccagtctctctcagtcagagatgttctgctgagagctgagcagtacttttccactcagtaaagaatattgctgtctccgagcaagggaaaacagttgcctgtttctcgttttgtgttttgtcttttgttttcagtgatgctaactcctttcctttatgcgtagacacctgtgaaatcaaataatgacaggagatgccatccagaagcttttatttgtgctccgggtacggctagcagggggggcacccttggtcacagcctttatcctgctcaccagaccaaacaaaaagatctggaaacctggtgaggggttaagtggaatttcccaagtgaatttataaactggaaagaccgctatgttcgtttcagactggtacttgtagaaggggcctgccatcagaaaattatggcctgtttcctttgcccaagtgttttccaagaagggctggaaagggatgctgctgccaaattgtctagcttgaattgcagttgagaggaggagagacaggttagagttagaggcttcaccccaaaaagtgagctggcagtttgaaagttggggagagtggagatgga

SEQ ID NO: 23402 - DNA, 1128 bp, Homo sapiens
aggcactatgttctctgaagaactgtggctggaaaatgagaaaaagtgtgctgtggttcggaagtctaagcagggcaggaaacgccaagaactgctggccgtagccttcggggtgaaggtgggtgtcaaaggcggctttctttggccccctctcaaactctttgcctgttcacagatctcctccctggttcgaagggctgccctcacacacaacgacaaccacttcaattatgagaagacacacaactttaaggtaagcaagcctctgcattccttcttctgttacaaaagggcaggtggaaaggtacagtgtatagtttccgtctggtttctgactgtaaagtcaagagacaatgaattcctttgctttccacatttagctataagcttaacacctgcgctttctgtcagttcaaactggagacctcagaaagcagtctgctcagtgcttatgcctggaaacaccttatctggatgttgacttagttttggagaattgggcccattgccacttcacgttcccatgtccagtgaaataaacacagagcatgcccagtctctctcagtcagagatgttctgctgagagctgagcagtacttttccactcagtaaagaatattgctgtctccgagcaagggaaaacagttgcctgtttctcgttttgtgttttgtcttttgttttcagtgatgctaactcctttcctttatgcgtagacacctgtgaaatcaaataatgacaggagatgccatccagaagcttttatttgtgctccgggtacggctagcagsgggggcacccttggtcacagcctttatcctgctcaccagaccaaacaaaaagatctggaaacctggtgaggggttaagtggaatttcccaagtgaatttataaactggaaagaccgctatgttcgtttcagactggtacttgtagaaggggcctgccatcagaaaattatggcctgtttcctttgcccaagtgttttccaagaagggctggaaagggatgctgctgccaaattgtctagcttgaattgcagttgagaggaggagagacaggttagagttagaggcttcaccccaaaaagtgagctggcagtttgaaagttggggagagtggagatgga

SEQ ID NO: 23403 - DNA, 1128 bp, Homo sapiens
aggcactatgttctctgaagaactgtggctggaaaatgagaaaaagtgtgctgtggttcggaagtctaagcagggcaggaaacgccaagaactgctggccgtagccttcggggtgaaggtgggtgtcaaaggcggctttctttggccccctctcaaactctttgcctgttcacagatctcctccctggttcgaagggctgccctcacacacaacgacaaccacttcaattatgagaagacacacaactttaaggtaagcaagcctctgcattccttcttctgttacaaaagggcaggtggaaaggtacagtgtatagtttccgtctggtttctgactgtaaagtcaagagacaatgaattcctttgctttccacatttagctataagcttaacacctgcgctttctgtcagttcaaactggagacctcagaaagcagtctgctcagtgcttatgcctggaaacaccttatctggatgttgacttagttttggagaattgggcccattgccacttcacgttcccatgtccagtgaaataaacacagagcatgcccagtctctctcagtcagagatgttctgctgagagctgagcagtacttttccactcagtaaagaatattgctgtctccgagcaagggaaaacagttgcctgtttctcgttttgtgttttgtcttttgttttcagtgatgctaactcctttcctttatgcgtagacacctgtgaaatcaaataatgacaggagatgccatccagaagcttttatttgtgctccgggtacggctagcagggggggcacccttggtcacagcctttatcctgctcaccagaccaaacaaaaagatctggaaacctggtgaggggttaagtggaatttcccaagtgaatttataaactggaaagaccgctatsttcgtttcagactggtacttgtagaaggggcctgccatcagaaaattatggcctgtttcctttgcccaagtgttttccaagaagggctggaaagggatgctgctgccaaattgtctagcttgaattgcagttgagaggaggagagacaggttagagttagaggcttcaccccaaaaagtgagctggcagtttgaaagttggggagagtggagatgga

SEQ ID NO: 23404 - DNA, 1175 bp, Homo sapiens
ttgctggtgacatggagacttatgcagaaagggtgttacagggctttccttctgatggcatctcatgaccaacaaccccgagagaatgcgtggctgcatttctgaaacccaaatcagaaaagattcagaagtccaaaccttcaaagagagaaaccgagggagtaacatgtttagtcatctctcggatgtcagcaaaagcctccctgcccttggctgcataactgtgccccccaacttgggtacttacgtcaacgagatgtgtgatgctgccaccttttacactaacagggtcttaaagggctacaaacatgatttacaccgtgtggattgggtgaggtcatatgtgaacatttggagtgagtttcaagcatgmgtcaaggagcaccacaccacgggcctcacgtggagcagaacaggtccgcagcacccacatcagcgctttctgttctctcctgagggcctgacctttctccacatcctcctcacctcctccagggcccctccactttttgagaatgaagacacaaaagaaaagtcctctccttcatgctcagctttatttgcccggtttaaccagggagaagcctaaccctgcagaaccagggctctggcacatcactgatgaccagaaggcctatataagaatcccagcctgcaggctcacggagggcaaagtacgtctccccacagaagctacattccaagtcccacatctcccaaacctcatccttcccagcaacatgcacccgtgttcaagttggaaggaagtaaatggagagcagagtaccaagaagacaggaatgaccttgtgatttcagagactgagctgaaacaagtggcttacattttcaattgtgaaaaatcagctctcccgatgaaagggaaagtaaactccattccagtggaaaactgtaagaagtttggtctggtctttgacagtttggtgggcattggggaaatgaccaactccaagtacattcaaatccaggtaatggggagagtaccagcaatttccactaataagacagaaggttgccacacatacctaactcggggaagatgcattagactgtgagattgtgagcatcatatcatccaaaatgaatatacttattcgtcagggtggtaatgacagagaatttcctgtccctgagcagttcaagacagcatgggat

SEQ ID NO: 23405 - DNA, 1175 bp, Homo sapiens
ttgctggtgacatggagacttatgcagaaagggtgttacagggctttccttctgatggcatctcatgaccaacaaccccgagagaatgcgtggctgcatttctgaaacccaaatcagaaaagattcagaagtccaaaccttcaaagagagaaaccgagggagtaacatgtttagtcatctctcggatgtcagcaaaagcctccctgcccttggctgcataactgtgccccccaacttgggtacttacgtcaacgagatgtgtgatgctgccaccttttacactaacagggtcttaaagggctacaaacatgatttacaccgtgtggattgggtgaggtcatatgtgaacatttggagtgagtttcaagcatgagtcaaggagcaccacaccacgggcctcacgtggagcagaacaggtccgcagcacccacatcagcgctttctgttctctcctgagggcctgacctttctccacatcctcctcacctcctccagggcccctccactttttgagaatgaagacacaaaagaaaagtcctctccttcatgctcagctttatttgcccggtttaaccagggagaagcctaaccctgcagaaccagggctctggcacatcactgatgaccagaaggcctatataagaatcccagcctgcaggctcacggagggcaaagtacgtctccccacagaagctacaytccaagtcccacatctcccaaacctcatccttcccagcaacatgcacccgtgttcaagttggaaggaagtaaatggagagcagagtaccaagaagacaggaatgaccttgtgatttcagagactgagctgaaacaagtggcttacattttcaattgtgaaaaatcagctctcccgatgaaagggaaagtaaactccattccagtggaaaactgtaagaagtttggtctggtctttgacagtttggtgggcattggggaaatgaccaactccaagtacattcaaatccaggtaatggggagagtaccagcaatttccactaataagacagaaggttgccacacatacctaactcggggaagatgcattagactgtgagattgtgagcatcatatcatccaaaatgaatatacttattcgtcagggtggtaatgacagagaatttcctgtccctgagcagttcaagacagcatgggat

SEQ ID NO: 23406 - DNA, 1175 bp, Homo sapiens
ttgctggtgacatggagacttatgcagaaagggtgttacagggctttccttctgatggcatctcatgaccaacaaccccgagagaatgcgtggctgcatttctgaaacccaaatcagaaaagattcagaagtccaaaccttcaaagagagaaaccgagggagtaacatgtttagtcatctctcggatgtcagcaaaagcctccctgcccttggctgcataactgtgccccccaacttgggtacttacgtcaacgagatgtgtgatgctgccaccttttacactaacagggtcttaaagggctacaaacatgatttacaccgtgtggattgggtgaggtcatatgtgaacatttggagtgagtttcaagcatgagtcaaggagcaccacaccacgggcctcacgtggagcagaacaggtccgcagcacccacatcagcgctttctgttctctcctgagggcctgacctttctccacatcctcctcacctcctccagggcccctccactttttgagaatgaagacacaaaagaaaagtcctctccttcatgctcagctttatttgcccggtttaaccagggagaagcctaaccctgcagaaccagggctctggcacatcactgatgaccagaaggcctatataagaatcccagcctgcaggctcacggagggcaaagtacgtctccccacagaagctacattccaagtcccacatctcccaaacctcatccttcccagcaacatgcacccgtgttcaagttggaaggaagtaaatggagagcagagtaccaagaagacaggaatgaccttgtgatttcagagactgagctgaaacaagyggcttacattttcaattgtgaaaaatcagctctcccgatgaaagggaaagtaaactccattccagtggaaaactgtaagaagtttggtctggtctttgacagtttggtgggcattggggaaatgaccaactccaagtacattcaaatccaggtaatggggagagtaccagcaatttccactaataagacagaaggttgccacacatacctaactcggggaagatgcattagactgtgagattgtgagcatcatatcatccaaaatgaatatacttattcgtcagggtggtaatgacagagaatttcctgtccctgagcagttcaagacagcatgggat

SEQ ID NO: 23407 - DNA, 614 bp, Homo sapiens
tgtgatagctttcacttgatcatttggccttagatgaagaagtcttacagacttgttccttatagaaccctgattgaaacacgctttcagtgtctttaaaaatatattggtaacacatggtttacatttaattgttttttttcttttttttgagacagggtcccgctctgttgcccaggtcagagtgcagtggtgcagtcatggctcactgtagcctcgaattcttgggcttgagtgatcatcccacttcagtctcctgagtagctgggaccacaggcctgcgtcacgacacccagytagtttttaaatttttggtagagatgggattttcctatgttgctcaggctggtctcgaactcctgggctcaagcgatccttccgccttggcctaagcgctggaattacaggtgtgagccactgcaccagcctacatttaacttgttgaaagccattttaaattttatttttaacattgtgatattgacctggatttgaatagttccctcagcgattaaagagtatcagtgcatattgttattagtgtggtgttttttgttttatatcttgtaggtttgctggagattttttttttttttaccccatgagacagcgca

SEQ ID NO: 23408 - DNA, 557 bp, Homo sapiens
ggcattctgggaggccacttggcctagttggacagcctctgctctgggatggcttggtggaccaagcagatttgtctgaattgcttccactccctgcatctttgtggtgcaagaactagagctcagtgatgatatttcaaggcaagtttccctatgctcattactacttacaaagcctcagtggtgggctaacacattttagaaagacaatactgataaatacttagcaagaaaactaaatttgttagtataactcctcaaatagttcaggtaatcaaggttgacatcaattttgatctgggaaactaatgtattaatacagttttagaagggggatttttttgccttgttaaacctcagtaggaaaaccaagatccacactgagtggaactctcctgtgagtgggcactggcgctctccagcacgtgcctgccatgtgcggatactgagatcgaagttaattaaacttacgtaaaattgacacgccagtgactcagttgcaccagccatattttggtgctcacggycacatgtggccagtggctgccacactcgac

SEQ ID NO: 23409 - DNA, 581 bp, Homo sapiens
taatacaaagctttctgccttatttcttagtgacttttagttaggattcttctcaggccatgtaagaaatgcaagggtgtttctgatttattagcaggcaagggatgaaggtgttatctcagaaataacactcaggcaatagagacaaatttattgctacctattcttagctcttcttycaacttcctttttaaatgtgaagacataattgaagcatatgatcaagtgtttttacctgctgaagacaacaggatggagggggcccatgttccttatcctaaatatatgttgtgattaattttcccaataaatcagttgttggagaaaaactgggcatctttgggaaattaatgagttcttttgacattgaaggggctctcattaaatgtcagagttaaaacagctttaagaagtatttagccagctcttgggacaagtggctaccagaggctctaccacgttgcatagaaaatcgtcttgtaatgatgggtttatattccagtatcacccctccctatgtcctgcttccacaactccctgttccccaggaatccaggcaactccctgcttctactccaagc

SEQ ID NO: 23410 - DNA, 526 bp, Homo sapiens
tattttcttatgttaacagaattcaaattatgattattttaggaataagtaaaactgggttttagcattaagataaaatgagtagtgtactttaaagaaataacactggaagkcatatatatagcactattatttgtatttgaaaatgaacctacaaatagtgatcaatgtctgtgttagtccgttctcacactactaataaagacatacccgagactggataatttataaaggaaagaggtttaattgactcacagttcagcatgacttgggggtgcctcaggaaacttactatcatggtggaaggtgaagcaaacacacccttcttcacagggcagcaggaaggagaagaattagagctgagtgaagggggaagccccttacaaaacgatcagatctcctgagaactcactatcaccagaacagtcccttgacaggtggggattattacaattcaagatgagattttgggtggggacatagccaaaccttatcagtatctatacagaatcatacagttttaaat

SEQ ID NO: 23411 - DNA, 526 bp, Homo sapiens
tattttcttatgttaacagaattcaaattatgattattttaggaataagtaaaactgggttttagcattaagataaaatgagtagtgtactttaaagaaataacactggaagtcatatatatagcactattatttgtwtttgaaaatgaacctacaaatagtgatcaatgtctgtgttagtccgttctcacactactaataaagacatacccgagactggataatttataaaggaaagaggtttaattgactcacagttcagcatgacttgggggtgcctcaggaaacttactatcatggtggaaggtgaagcaaacacacccttcttcacagggcagcaggaaggagaagaattagagctgagtgaagggggaagccccttacaaaacgatcagatctcctgagaactcactatcaccagaacagtcccttgacaggtggggattattacaattcaagatgagattttgggtggggacatagccaaaccttatcagtatctatacagaatcatacagttttaaat

SEQ ID NO: 23412 - DNA, 525 bp, Homo sapiens
acttgcagtctcaaagttcaaagccacttaatgaaaaacagagctcttcaccatcctcaaaaagcattttctaaacagccaattgcatgtggtgctgtaaagggaattacgtagacctagcctgtgacatttagaaaggcattcaaagtttagaaataaaatacttacggtgttgccaagtcactacacaagccttttagtaaatctctgtttagaaaactcactgccaggcactatggctgatgcctatagtcccaacacttagggaggctgaggtgggaggatcacttgagccaaggagtttgaggttacagtgaactgtgatcacaccactgcactccagacagtgcgatcatagctcactgtaacctcaaactgtctgaaaataaataaatacatggagagaaaaattatcatagaygaaaatatttagaaaagccatcctaggccggtcacggtggctcacgcctgtaatcccagcactttgggaggccaaggctgatggatcacctgaggtcaggagtt

SEQ ID NO: 23413 - DNA, 657 bp, Homo sapiens
ctgttccttataaaacttgattagaaaaaaggagtttcctcctcgagactaggattattcctattgcatcttctatttgcagaaacagttaagaacatactcgctcttaaaaaggtgatagcaattaatgaccgtactatttgcaattaacttttcatcactacaggatcaaaagtactataagagttgaatttttgagtactataggaattgaatagtggcatgtcatttatgattattttagaaatrtattttataagaaagtactatatcacttagatttagaagaactctatatacttaaggagaagtggtggcaggcattaggaaagagatttgaccttgattatgcaatccttgtgaaattacaagtgctattataagtaacagttgttaatctacacaagtaaagccttgactcatctgaccacagaaaagacaataattgcaatagaagataaaatgccgggaaaaaattgtaaaagctaatacatttttaaatgcccaaatgtgaaagtaatgagaaattaggtttttaaatattttttggtttcgaaaggctttcatccagtccttgaaattttttaacaaaacctccctgatacataaataaaaaatataaaatattccaccaaagatcatgacaaaatacaacta

SEQ ID NO: 23414 - DNA, 657 bp, Homo sapiens
ctgttccttataaaacttgattagaaaaaaggagtttcctcctcgagactaggattattcctattgcatcttctatttgcagaaacagttaagaacatactcgctcttaaaaaggtgatagcaattaatgaccgtactatttgcaattaacttttcatcactacaggatcaaaagtactataagagttgaatttttgagtactataggaattgaatagtggcatgtcatttatgattattttagaaatgtattttataagaaagtacyatatcacttagatttagaagaactctatatacttaaggagaagtggtggcaggcattaggaaagagatttgaccttgattatgcaatccttgtgaaattacaagtgctattataagtaacagttgttaatctacacaagtaaagccttgactcatctgaccacagaaaagacaataattgcaatagaagataaaatgccgggaaaaaattgtaaaagctaatacatttttaaatgcccaaatgtgaaagtaatgagaaattaggtttttaaatattttttggtttcgaaaggctttcatccagtccttgaaattttttaacaaaacctccctgatacataaataaaaaatataaaatattccaccaaagatcatgacaaaatacaacta

SEQ ID NO: 23415 - DNA, 657 bp, Homo sapiens
ctgttccttataaaacttgattagaaaaaaggagtttcctcctcgagactaggattattcctattgcatcttctatttgcagaaacagttaagaacatactcgctcttaaaaaggtgatagcaattaatgaccgtactatttgcaattaacttttcatcactacaggatcaaaagtactataagagttgaatttttgagtactataggaattgaatagtggcatgtcatttatgattattttagaaatgtattttataagaaagtactatatcacttagatttagaagaactctatatacttaaggagaagtggtggcaggcattaggaaagagatttgaccttgattaygcaatccttgtgaaattacaagtgctattataagtaacagttgttaatctacacaagtaaagccttgactcatctgaccacagaaaagacaataattgcaatagaagataaaatgccgggaaaaaattgtaaaagctaatacatttttaaatgcccaaatgtgaaagtaatgagaaattaggtttttaaatattttttggtttcgaaaggctttcatccagtccttgaaattttttaacaaaacctccctgatacataaataaaaaatataaaatattccaccaaagatcatgacaaaatacaacta

SEQ ID NO: 23416 - DNA, 657 bp, Homo sapiens
ctgttccttataaaacttgattagaaaaaaggagtttcctcctcgagactaggattattcctattgcatcttctatttgcagaaacagttaagaacatactcgctcttaaaaaggtgatagcaattaatgaccgtactatttgcaattaacttttcatcactacaggatcaaaagtactataagagttgaatttttgagtactataggaattgaatagtggcatgtcatttatgattattttagaaatgtattttataagaaagtactatatcacttagatttagaagaactctatatacttaaggagaagtggtggcaggcattaggaaagagatttgaccttgattatgcaatccttgtgaaattacaagtgctattataagtaacagttgttaatctacacaagtaaagccttgactcatctgaccacagaaaagacaataattgcaatagaagataaaatgccgggaaaaaattgtaaaagctaatacatttttaaatgcccaaatgtgaaagtaatgagaaattaggtttttaaatattttttggtttcgaaaggctttcatccagtccttgaaattttttaacaaaacctccctgatacataaataaaaaayataaaatattccaccaaagatcatgacaaaatacaacta

SEQ ID NO: 23417 - DNA, 1152 bp, Homo sapiens
tcccatcccaagttctaaaagcatggaaagtactccagttggcctaaaaatggatcacttgctcatcctagaccaatcagtggaggcctagctggtggaatcagtaaaaatatctatttccatccaaaccgcattattagggtgaggaaaagaacatttcttagaaacaacatggggtgggcagtttccttggaagagaaacaagcagtccactgctcactgtatgttcacataggagaatgaagacacatacgtatgcatgcacaaggggtttctctatgctaatcctggggtgacagtaaacatcattttcatgaatcattttgtcacctggccctaaggaaaaggctctctctagccaggaaaacacatcagccagatttccaatgagaagtaaatcttatctttcaaagagaaaggaaaaaaaatagcctaaagcagccccaaagtagaaaatacctctgagatttctttcctgagaacctagggtctagatgatgagagaggaataacaataataatgataatagatgccatctatcatgcacatgtcaggtacattaagctactggatatcattttgactcatatcacacaactgataaatgccagagcctagatgactcctgagtctgtctgctgccaaagtctaaacacttaatcactatgcaaaataccagagaaggaattacagaagcccaagcctcaaccaagaccatggttagctcctaagctaaagaaaagcagagcaagctgtcctcagctcagaagctattttctgtaaatttcatgtcaaccaagatctcatttcagcattcccctgagagccaggtggaagaactgaactccagctcactcctgctgctcttgtctatgaaacagagcaagacccaawgcaaaagttttcagaattttgttataacaaaatctctatttttcattgtcttcagaaataagttttgcaaatcaattccagctttgggtggttctcagaggcagttacataaaaagaaagcccatgtgactcattcctgctgagagtgggccactttgctctcttggaaaaagggaatttaagtgttcatcaaggcaggcatgacatcatcactgacaagtcaggccaaccttcagatgaggaccatgtctgttgtt

SEQ ID NO: 23418 - DNA, 640 bp, Homo sapiens
ggttcctctctcttggcataggaaataaagtatgttttacaaagtcagttgtcaaaaatcagcattaagaagtaaataatcttggccaacggcgtgaatgtttttactgttttaattccaccaagtatgcttgaataggcatttattcaattaaaatactttgaagttactcaagattattttgaaagcacatatamctttagatgaaaataaataattttttaaaagctaatctaggccaggcgcagtggctcacacctgtaatccctcccttgggaggccgaggcgggcagatcacaaggtcaggagatcaagaccattctggctaacacggtgaaaccccatctctactaaaaatacaaaaaattagccaggtgtggtggcgggcacctgtagtcccagctacttaggaggctgaggcaggagaatggcgtgaacccaggagacggagcttgcagtgagccgagattgtgccactgcactccagcctgggcgacagagtgagactctgtctcaaaaaaaaaaaaaaaaaaaaagctaatctatattaggatgtatttatatgaaagctctttaattttattttaaaattttcataacatcttatagtttcatatcttaaaatccatcactacattaa

SEQ ID NO: 23419 - DNA, 540 bp, Homo sapiens
tgagtttgggataccagatttaaagctaagctttgtcactctcagattttcacattttaatattgataatgatagttaacattctcttttctgttttcaatctcctaaatcaagtattcttaatctgaggttcatgaacagccttggtgtgaactgcctataactttatgcaaaatgttatatgagtatatagacacaaagggagcagatgcatcaaatgtaacgtgagtatggctacacgaccataaatgggttaaatgtaacagtcccaaatcaagataccagaaaatatctataaggagagtagaaaggacaaagagtaattccacttaagtactattattatacaaaggaaatacattcagagaaattaaatccatcattgttcttggaaaacatgaattacataattcactgagtttcactgttgaagatcactagtttgagaygcagactgcacaaaatgccctatgtaaagaccatagatggccaagtgaggtgggtcacacctgtaatcccaacactttgagaggctcaggc

SEQ ID NO: 23420 - DNA, 1080 bp, Homo sapiens
atcatatagcattcattgtctgttacatattgctgtgtctcatggactatactatgtcatttaataaacgcagtgggaactcaaagtgccagaatcctcagagaaagggagccagggtgaatcctgactctagcatcctttaggttataatctattctggaagcataagtgtctctatagttgagggtttatcctttaagtgcttttgaagcatccatagagttatcccatatctgtctttttgggggccatcgaggcttatgtggtccgtgtcccatgccgtcctggactgcaggggtgccctctggcttctgtcacctcagtgctgctgcttgtcttctgtgctgtcagtgtctgcctggcactttccccatcaccctctctaatcccattgtagatcttaactgcacgcattctaggtctttctaagtgttgctcatcctgacttcagaacttgcccttcaagctgtcatttatctaaataaatcattgctatcagctgcttttgtgtgatttgccactcttctcaaagtagggtacagaaaaagaaattatagttcattgcagttttcatctgcttggggctgtgctgttctcagaggatgaggaccaagctccaggccrctaacagacacaacctcttaggcccggatctactggtccatgttggaacccaggagagtctcaggaagacacctctctcttcctcgggcatacgctgaagcagcttcctaacccctgcgggcccttgtggagggcaggaactgtgtgttcatcttgtcccccagacacacggcagtttctgaaatataggaggtattcagtataagtttgcagaatcagcagaagaaaggcggggaggaagaggcagaattgaaaatatgagataccagattcccttccagggcaaaaagttagatggtgtcaagtggaggatttagtacgtgggcttattgctgcttcatatgtctgaaatttcctcccagggagtatctgatatgctagaagaatctgatatcataaatactgaaataaataccataaactggaagggtttccaataaggttagaaataaaatc

SEQ ID NO: 23421 - DNA, 1080 bp, Homo sapiens
atcatatagcattcattgtctgttacatattgctgtgtctcatggactatactatgtcatttaataaacgcagtgggaactcaaagtgccagaatcctcagagaaagggagccagggtgaatcctgactctagcatcctttaggttataatctattctggaagcataagtgtctctatagttgagggtttatcctttaagtgcttttgaagcatccatagagttatcccatatctgtctttttgggggccatcgaggcttatgtggtccgtgtcccatgccgtcctggactgcaggggtgccctctggcttctgtcacctcagtgctgctgcttgtcttctgtgctgtcagtgtctgcctggcactttccccatcaccctctctaatcccattgtagatcttaactgcacgcattctaggtctttctaagtgttgctcatcctgacttcagaacttgcccttcaagctgtcatttatctaaataaatcattgctatcagctgcttttgtgtgatttgccactcttctcaaagtagggtacagaaaaagaaattatagttcattgcagttttcatctgcttggggctgtgctgttctcagaggatgaggaccaagctccaggccactaacagacacaacctcttaggcccggatctactggtccatgttggaacccaggagagtctcaggaagacacctctctcttcctcgggcatacgctgaagcagcttcctaacccctgcgggcccttgtggagggcaggaactgtgtgttcatcttgtcccccagacacacggcagtttctgaaatataggaggtattcagtataagtttgcagaatcagcagaagaaaggcggggaggaagaggcagaattgaaaatatgagataccagattcccttccagggcaaaaagttagatggtgtcaagtggaggatttagtacrtgggcttattgctgcttcatatgtctgaaatttcctcccagggagtatctgatatgctagaagaatctgatatcataaatactgaaataaataccataaactggaagggtttccaataaggttagaaataaaatc

SEQ ID NO: 23422 - DNA, 606 bp, Homo sapiens
acagtcactttacagccatattggtgcaacatgcattagcaaaagaagtgcatgccgcgtgcacgtgtgtgggtgcrgcagcagctctccgcagcaagaggtaaacaagacaagcactacggtggttcaagttgaagctggaggtcattttttgcccctgtaagctgagccctgaagaagaaagtcaccatgtatccatcttgttacctttttggatttgacgctgatccagatcctcctgggaccttcaatccgctgcttttacaaggatgaaaaggattctgatgactttttttgaactgtttgggcaggaatgctacagagagaatcaatttctgtgaactgagagtccccaggtgataatttggtgtttcacacacaggcagttttctttttaatgtgtggtgcttgtttagtcatctggctcttgcaaaccctagtgtttgaaaaacagggatgtagttcagcagtgtctgaataaggctgatgactcagaatcatgcagtgcctggcttctcaggccgccgccagccgggactgctttaggcgcgaacccacgcttctgacctgtgctctgtctttgcagttctgcacggagctaaacca

SEQ ID NO: 23423 - DNA, 669 bp, Homo sapiens
acagtgtagatgagcaaaaataaaggttctgagaagttctgcgggaagaaacatgtttccttttgtttagtggactgttccgcagaccttttatcacttacgagctccttccaytgcaagacaccaattagctcaccccacaccatggatctactatgtggaccacacctggggaacaccggataactgtcactgggagacaaccctttcccacagcccagcccagacgcacctagagcacgttaatcaggaagccttgagcctcccagaagcaccttctccatattcccatcccgttttcatttcaacatgcttccaaagctcctgccaggagcaaggggtgctgcttcttaacgtagctggaagactacccatgcgccccgccacacacacacatccacaccagcacaaacacacatgctggggggcgatcttaaccagagagcatttaaataccaaggcaaggagaaaatccttgaattcaaacgtaacaggctggcacaaattaggaaagattaatagagtcagacgcacgctccttgagtcatttttagataatcagtaggttctcactggcattatcctaatcccgcaccacagtggaaagaaattcactgatggctcttgtggtcaactccacaggaacccaataagctacattaatgtgca

SEQ ID NO: 23424 - DNA, 1224 bp, Homo sapiens
tgcatcctccatgcccacagagcatgtgcccaggatgaatctcactgtatcccagttcctcatgcttggccccaaacctctttttcacagtaataaagaaaacacactttacaaaaaggcagttcatctatgaacatattggctaggataacacatcttagagctaaatgtgtcactgtaaatggactcattttatatctccacatactgtagatgtttaaaaaaaggtacatgcacagaaactatgggaactgaactggagtatgagccaattaccctagactttgctgtaatctgacttttgwgtagcacattttctttagcatttttcttaatgggggatggggagtggaggcaaaggagacaaactgacagcagagcattttatttagacaaaagaaatatattcagcctgtcttaaattatttgtcattataatgacgttttctaatttaaaagtattttgcttaataatatataattgaatattatatgcaattaatcatatcatcatagctctttaaagatttatctctcaatatctaattaattacgaggtcttgtttcttccatcttcaaaatacacctggaatttttacttattcctatctctactgtcttaagcctagtccaagtcaatgtcctctcttattagaaaactgtggaaacctcctccttggtatcctgctttgcattcttgtccttaaataatctattcttcaaatagcagtcagaggacttttctaatcctattgttctcactcttaaatctctcagagcctccccaccgaactcaaggtagagcccaatttccttctagaatcctataaggcccctatccagcttcatctctcaccacacacccttccttgctcatactctgctgatcttgagctctggcctggagacaagccttcttgtgtagtggttagagatcctggctccccacctgattagctatatgatgttggatgagttacttaaccattagacttgcctcattgccaaggcaggggcaacaatgatccttatctcctaagctcattttagaaatatatgggttaaaataacttcaacaggtttgcactagccagaggctggagggcattttaagattttgttctctctgggaaaaagggaccttctttccacatctcctttgtaccttggatagattcaccaggagctcatcatcacagtgaatgctgcactttgaccagacag

SEQ ID NO: 23425 - DNA, 1224 bp, Homo sapiens
tgcatcctccatgcccacagagcatgtgcccaggatgaatctcactgtatcccagttcctcatgcttggccccaaacctctttttcacagtaataaagaaaacacactttacaaaaaggcagttcatctatgaacatattggctaggataacacatcttagagctaaatgtgtcactgtaaatggactcattttatatctccacatactgtagatgtttaaaaaaaggtacatgcacagaaactatgggaactgaactggagtatgagccaattaccctagactttgctgtaatctgacttttgtgtagcacattttctttagcatttttcttaatgggggatggggagtggaggcaaaggagacaaactgacagcagagcattttatttagacaaaagaaatatattcagcctgtcttaaattatttgtcattataatgacgttttctaatttaaaagtattttgcttaataatatataattgaatattatatgcaattaatcatatcatcatagctctttaaagatttatctctcaatatctaattaattacgaggtcttgtttcttccatcttcaaaatacacctggaatttttacttattcctatctctactgtcttaagcctagtccaagtcaatgtcctctcttattagaaaactgtggaaacctcctccttggtatcctgctttgcattcttgtccttaaataatctattcttcaaatagcagtcagaggacttttctaatcctattgttctcactcttaaatctctcagagcctccccaccgawctcaaggtagagcccaatttccttctagaatcctataaggcccctatccagcttcatctctcaccacacacccttccttgctcatactctgctgatcttgagctctggcctggagacaagccttcttgtgtagtggttagagatcctggctccccacctgattagctatatgatgttggatgagttacttaaccattagacttgcctcattgccaaggcaggggcaacaatgatccttatctcctaagctcattttagaaatatatgggttaaaataacttcaacaggtttgcactagccagaggctggagggcattttaagattttgttctctctgggaaaaagggaccttctttccacatctcctttgtaccttggatagattcaccaggagctcatcatcacagtgaatgctgcactttgaccagacag

SEQ ID NO: 23426 - DNA, 1224 bp, Homo sapiens
tgcatcctccatgcccacagagcatgtgcccaggatgaatctcactgtatcccagttcctcatgcttggccccaaacctctttttcacagtaataaagaaaacacactttacaaaaaggcagttcatctatgaacatattggctaggataacacatcttagagctaaatgtgtcactgtaaatggactcattttatatctccacatactgtagatgtttaaaaaaaggtacatgcacagaaactatgggaactgaactggagtatgagccaattaccctagactttgctgtaatctgacttttgtgtagcacattttctttagcatttttcttaatgggggatggggagtggaggcaaaggagacaaactgacagcagagcattttatttagacaaaagaaatatattcagcctgtcttaaattatttgtcattataatgacgttttctaatttaaaagtattttgcttaataatatataattgaatattatatgcaattaatcatatcatcatagctctttaaagatttatctctcaatatctaattaattacgaggtcttgtttcttccatcttcaaaatacacctggaatttttacttattcctatctctactgtcttaagcctagtccaagtcaatgtcctctcttattagaaaactgtggaaacctcctccttggtatcctgctttgcattcttgtccttaaataatctattcttcaaatagcagtcagaggacttttctaatcctattgttctcactcttaaatctctcagagcctccccaccgaactcaaggtagagcccaatttccttctagaatcctataaggcccctatccagcttcatctctcaccacacacccttccttgctcatactctgctgatcttgagctctggcctggagacaagccttcttgtgtagtggttagagatcctggctccccacctgattagctatatgatgttggatgagttacttaaccattagacttgcctcattgccaaggcaggggcaacaatgatccttatctcctaagctcattttagaaatatatgggttaaaataacttcaacaggtttgcactagccagaggctggagggcattttaagattttgttctctctgggaaaaagggaccttctttccacatctccttygtaccttggatagattcaccaggagctcatcatcacagtgaatgctgcactttgaccagacag

SEQ ID NO: 23427 - DNA, 1399 bp, Homo sapiens
tattttcaatttaattctcaagtaaacgctgtgtgtaaaaactatcccatcattttagcaactcaacatcaaagatataatctgatcaatgaaggatgatcctccaatctcttcacactctmgtgcccaagttttttggttgaggaatctctcacttaggaatcctcctatacactgaatctgaatggccccaagtgctgggttatagctaccttgcacctcagtccttggtcattcatttattcatccatttagtgaatattgttggacatctatgtgctatgtatagggttccaataatgactaaaacaagcccttatggagcttacagtttcttggtggctaaagcattggccctgcaggtcaaatcagcatttcactttcaatgctaaggatggaaatgactttggtcaaatcaacctaaaactgaaaagccaagaaggaaaaaacgatgtttatatagttgatgtgaatcagttcaatcaattcctacaggtcatagacttctccttgtctcagagcccagtaaatattactggagagagagagagagagagagagagagagagagaatgaagaaactgccaaaaaatgaacaaaagagggaatgaaaggaatgtccatctatgcaagcaactcttggttgcaatattacctttttccatatcacagaggatgtttgaagaaaaatattacttctaagtgcataagcactgacctgctttaataattcagatcagagtacaggttctaagatcttccagaatgttgcattaaaatctaagatacacaaggcaggaaaaggtatagtcaaattcgagggcacaaaagtcagccaccatgggtgggctggaaaggggtgaggggagttctccctgcaaagtgccagggagaaggttttgctgatgccagagaacaatggagacagggaagaagtagggagagtcagaggcacctcagattagtttgtttttccttcctatagatttctatgtgtttgaaatctttgagaccttttttcccctttgtcttctgaaacacatgaaaatgttcagtgtaatgcatttgtcatcaaggcagataaagcacatctgcagtcagccaagaataatgtagcaatggcccaattgtgtctgggtctgcatttgactagctgtatgcagttctccaacctggacaaggtcagaatgagttcctatcaccaggctttatcaagtagccatgagtctggacaaaagcaaatcatgcgtgttcactgcatcattgtttgcaatgcttaagactgggagtggcccaaatattactggaaggggaattgatacttacactatggtgaattcaaataatgcagctccatgcaaagcgttcaggcaaaacagctagatccatatggagtaac

SEQ ID NO: 23428 - DNA, 1399 bp, Homo sapiens
tattttcaatttaattctcaagtaaacgctgtgtgtaaaaactatcccatcattttagcaactcaacatcaaagatataatctgatcaatgaaggatgatcctccaatctcttcacactctcgtgcccaagttttttggttgaggaatctctcacttaggaatcctcctatacactgaatctgaatggccccaagtgctgggttatagctaccttgcacctcagtccttggtcattcatttattcatccatttagtgaatattgttggacatctatgtgctatgtatagggttccaataatgactaaaacaagcccttatggagcttacagtttcttggtggctaaagcattggccctgcaggtcaaatcagcatttcactttcaatgctaaggatggaaatgactttggtcaaatcaacctaaaactgaaaagccaagaaggaaaaaacgatgtttatatasttgatgtgaatcagttcaatcaattcctacaggtcatagacttctccttgtctcagagcccagtaaatattactggagagagagagagagagagagagagagagagagaatgaagaaactgccaaaaaatgaacaaaagagggaatgaaaggaatgtccatctatgcaagcaactcttggttgcaatattacctttttccatatcacagaggatgtttgaagaaaaatattacttctaagtgcataagcactgacctgctttaataattcagatcagagtacaggttctaagatcttccagaatgttgcattaaaatctaagatacacaaggcaggaaaaggtatagtcaaattcgagggcacaaaagtcagccaccatgggtgggctggaaaggggtgaggggagttctccctgcaaagtgccagggagaaggttttgctgatgccagagaacaatggagacagggaagaagtagggagagtcagaggcacctcagattagtttgtttttccttcctatagatttctatgtgtttgaaatctttgagaccttttttcccctttgtcttctgaaacacatgaaaatgttcagtgtaatgcatttgtcatcaaggcagataaagcacatctgcagtcagccaagaataatgtagcaatggcccaattgtgtctgggtctgcatttgactagctgtatgcagttctccaacctggacaaggtcagaatgagttcctatcaccaggctttatcaagtagccatgagtctggacaaaagcaaatcatgcgtgttcactgcatcattgtttgcaatgcttaagactgggagtggcccaaatattactggaaggggaattgatacttacactatggtgaattcaaataatgcagctccatgcaaagcgttcaggcaaaacagctagatccatatggagtaac

SEQ ID NO: 23429 - DNA, 663 bp, Homo sapiens
aggttatcaatagaaaaaaattacagggaagattacacacaggagttatcactaaaatatttagttagaaacattacacaatgcaggctcttaacttattcacactggcctcttgacaaagaggacagaacgttccatatagagtgtatttgtgcactgtgggttattcattatttcagtttttcatcctcacaacacagataataaagaacttcctcctaggttgtcataaggattaaataaaataagccccataaagtaagagtgaatacctaataaacgtcactgttatttctcagcaaccattcctgagcccatactatgtaatggcacatggactccctaaactggaaaaagtcaacaacatatgtatcaaaaggttaaattccttgatgtctgaagagctcctaaaattaataagaaaagaataacctaatkgaaaactgggtaacagatagaaacagatagttcacggaaaagaaaacacaagtggcttctaaacatacgaacatccactcaacctccctcataacaagaaaactgcagaccatccttagcaaggaattatttttcatcaatcaaggttgaaaaaaacaaaacacttaaaataatgtattcaagcaggtgtgagaaacaattttatacattaatagagaagtctat

SEQ ID NO: 23430 - DNA, 1049 bp, Homo sapiens
tgtaagatgggagctgcaaatatttttccacatttattttgctttactttaatgtttgcttttttgttatgcagccttataaagattttcttgtaggcaaattgatcaatgttttcttttatggtttctgatgattcagtcatattttgaaaaatcttaccaattctgagattattttaaagtttctctatattttcttcaattcttttatgttttagtgtatgtataaaaacattgattcatctggaatttatttttgtataagttgtgaggtagggatccaactttatattttttccagatgagtacccacttattccaaatatttattaaaagatgtattaaatgagccttctttaccctagtttttgaagttcccaaactttaatagcagctgttatttcagtattcttcacttatttcatcgctggaaggttatataatgatctcgaactgataataccactcacaatgcttgtggaagccattttgcacaaagtttagatgatatagataaaactactttgatgaagaacaagggcagtaagtacacaccaaccaaagagctacatccaattgatgttataaataaaaaacatggtgggaatacttcacattatgcaactctgattgtgtttaggtttcagccaccaagagaaaaaaatatttaaataccaaaacgggrtatgaaagtgcattgctctgtaagcaaaaatttgtcacacgaaagttgaggagggtcttatgtgaaatgcaattcctagtacacgtcaactcatccctagctaggacagcttccagaacgtgctgctaaacttgaggttgtgaccctgcagccatgacactcaaccgcccctcaaccagagctcacctcattgctctacagcaacagttttaactactggagcctgcctggagcttgaggtgatcctcggacctgcctcccaccagggaaggcctaagtgctctttaatcttcttagagcaaaatccactgagcaaaattataatttgatatggctgcacttaaccaatagaaactcataaacc

SEQ ID NO: 23431 - DNA, 1049 bp, Homo sapiens
tgtaagatgggagctgcaaatatttttccacatttattttgctttactttaatgtttgcttttttgttatgcagccttataaagattttcttgtaggcaaattgatcaatgttttcttttatggtttctgatgattcagtcatattttgaaaaatcttaccaattctgagattattttaaagtttctctatattttcttcaattcttttatgttttagtgtatgtataaaaacattgattcatctggaatttatttttgtataagttgtgaggtagggatccaactttatattttttccagatgagtacccacttattccaaatatttattaaaagatgtattaaatgagccttctttaccctagtttttgaagttcccaaactttaatagcagctgttatttcagtattcttcacttatttcatcgctggaaggttatataatgatctcgaactgataataccactcacaatgcttgtggaagccattttgcacaaagtttagatgatatagataaaactactttgatgaagaacaagggcagtaagtacacaccaaccaaagagctacatccaattgatgttataaataaaaaacatggtgggaatacttcacattatgcaactctgattgtgtttaggtttcagccaccaagagaaaaaaatatttaaataccaaaacggggtatgaaagtgcattgctctgtaagcaaaaatttgtcacacgaaagttgaggagggtcttatgtgaaatgcaattcctagtacacgtcaactcatccctagctaggacagcttccagaacgtgctgctaaacttgaggttgtgaccctgcagccrtgacactcaaccgcccctcaaccagagctcacctcattgctctacagcaacagttttaactactggagcctgcctggagcttgaggtgatcctcggacctgcctcccaccagggaaggcctaagtgctctttaatcttcttagagcaaaatccactgagcaaaattataatttgatatggctgcacttaaccaatagaaactcataaacc

SEQ ID NO: 23432 - DNA, 670 bp, Homo sapiens
atgaggtgtcttttgtgaaggcttgrcatcttagggagtttcaatacacagttcttagaaaatgaagtcagacagacttgagtttcatacttgctggccatgagacattgggttacttttcagtgctgtgaatgttggctttccaatctacaaaatggggcttaaaaaatgcccttatatggtatgttggggaactaagctaggctgaactaatacaaacggcttctatgatttttgacacagagcaagagtgtagtaatgctagtcattgttattgtttttagatgaggtcattgggatgggcagaaggaacgtgatgattggtagctaattgggtttagcagcccaattgggttataactggttgctaattgggccaagagctgtgctctgtatgggtggtgctgggttccaatggtgggatctttgccctgtgccccataatgcactacttatggccctcccccaccagccagaagtgacagatggaactcctgagctggggcctaaaaatgttggctggcctgggactccctgggtcttcaaggcattctgggagggttgtccttggcagtgagccctgcccagcctacacacacatacacgcaggcacatgctcacatatacatacacatacctgtgcacccttcccgtgcttgtgcatatactt

SEQ ID NO: 23433 - DNA, 670 bp, Homo sapiens
atgaggtgtcttttgtgaaggcttgacatcttagggagtttcaatacacagttcttagaaaatgaagtcagacagacttgagtttcatacttgctrgccatgagacattgggttacttttcagtgctgtgaatgttggctttccaatctacaaaatggggcttaaaaaatgcccttatatggtatgttggggaactaagctaggctgaactaatacaaacggcttctatgatttttgacacagagcaagagtgtagtaatgctagtcattgttattgtttttagatgaggtcattgggatgggcagaaggaacgtgatgattggtagctaattgggtttagcagcccaattgggttataactggttgctaattgggccaagagctgtgctctgtatgggtggtgctgggttccaatggtgggatctttgccctgtgccccataatgcactacttatggccctcccccaccagccagaagtgacagatggaactcctgagctggggcctaaaaatgttggctggcctgggactccctgggtcttcaaggcattctgggagggttgtccttggcagtgagccctgcccagcctacacacacatacacgcaggcacatgctcacatatacatacacatacctgtgcacccttcccgtgcttgtgcatatactt

SEQ ID NO: 23434 - DNA, 636 bp, Homo sapiens
aaggcacacacatgcggcaaaaagcatatttacccattattaagcactctttcatgccatctataggggagctgaacatgcttttctatctggtgtttataaaatcttttcccagatggacaactattctttagttcaattctataaatcataatcacatatttcttctatatgtgcaagtgctcatattttttctgttattttcatcactaccaacattaagcactcaaatgctgactgggacaggaacaattcttatcattttttactggcatgaacataaagacacaacmtttcaatttatgtgtgtcttgctcacacccacagccttgtagacatactagaaaatatttctggaccacctgagactagctataagaatagaatcagcacatttgggagctggagggcaactttgagatcacctgaaaggctgagagaagggaaggaacttgcccgaagtcacaccgtgagtaaataaaaatgattgaaaaagccatgatcttggaagcctattctaaattatttgctataacaccatgctgattttcagagtcctacaaaaaatgtgatgcttattactcagtttttggctaaaagtctggcttatagttggtactccttaaagatttttta

SEQ ID NO: 23435 - DNA, 1089 bp, Homo sapiens
tactactgtcctgggtgggatccgataaaaaggcatctctgtgtccactccatagctgacaaatctatgattagtagttatttatccaaggtcacatagatggtaccagaacactcaactcaaacctgtgtcatggacccaccaagtctagtccttttattaatctctaaaaagtatagcaataactcaaattcagaaggcagcagaaggaagagaggttaaaaatttgctctgaaactgttgggttagagccatcttaaccctcagtgggttaagtgatagatgagtcaccagggaaatgggtgcaagggagaatctatctcaggagaaataaaggtaaagtcaccacaatccaagactaatagctctaggattctcctcttccaatttggacctaacagcytctccctttcctgaattttcccagctctcgcccaaattgactatgagcagaacactgcaacagactgttctctgtacatgtgtgcagctcccaaaatatctgacatcacagttttcaaatagagaaataacagttttacttgtctacttgttttatttttaaaaatctttttgtcagatgaaatcttttgtcaagttacaaaattgacatgtgtctaccacaatccttaaaaccagtgaaataatataaaactatgtaaagaaaatgttaatcatacttctacccccaacaagagtaaataatatggcagtctggtgtctttctacttaaacttttttattttttgttttgttttattgaggcagagtttcactctgtctcccaggctggactgcagtggcgggatctcggctcactgcaacttccgccccctgggttcaagcaattctcctgcctcagcctcccgagtagctgggattacagacgcccaccactgcacccagataatttttgtgtttttagtggagacagggtttcaccatgatggccaggctgatcttgaactcctgacctcaagttaatcccaaagtgctgggattacaggcatgagccaccactcccagacacatcttttcacattaaaaaaaaattgaaataagggatttggagttgttattgccatttga

SEQ ID NO: 23436 - DNA, 1089 bp, Homo sapiens
tactactgtcctgggtgggatccgataaaaaggcatctctgtgtccactccatagctgacaaatctatgattagtagttatttatccaaggtcacatagatggtaccagaacactcaactcaaacctgtgtcatggacccaccaagtctagtccttttattaatctctaaaaagtatagcaataactcaaattcagaaggcagcagaaggaagagaggttaaaaatttgctctgaaactgttgggttagagccatcttaaccctcagtgggttaagtgatagatgagtcaccagggaaatgggtgcaagggagaatctatctcaggagaaataaaggtaaagtcaccacaatccaagactaatagctctaggattctcctcttccaatttggacctaacagcctctccctttcctgaattttcccagctctcgcccaaattgactatgagcagaacactgcaacagactgttctctgtacatgtgtgcagctcccaaaatatctgacaycacagttttcaaatagagaaataacagttttacttgtctacttgttttatttttaaaaatctttttgtcagatgaaatcttttgtcaagttacaaaattgacatgtgtctaccacaatccttaaaaccagtgaaataatataaaactatgtaaagaaaatgttaatcatacttctacccccaacaagagtaaataatatggcagtctggtgtctttctacttaaacttttttattttttgttttgttttattgaggcagagtttcactctgtctcccaggctggactgcagtggcgggatctcggctcactgcaacttccgccccctgggttcaagcaattctcctgcctcagcctcccgagtagctgggattacagacgcccaccactgcacccagataatttttgtgtttttagtggagacagggtttcaccatgatggccaggctgatcttgaactcctgacctcaagttaatcccaaagtgctgggattacaggcatgagccaccactcccagacacatcttttcacattaaaaaaaaattgaaataagggatttggagttgttattgccatttga

SEQ ID NO: 23437 - DNA, 1089 bp, Homo sapiens
tactactgtcctgggtgggatccgataaaaaggcatctctgtgtccactccatagctgacaaatctatgattagtagttatttatccaaggtcacatagatggtaccagaacactcaactcaaacctgtgtcatggacccaccaagtctagtccttttattaatctctaaaaagtatagcaataactcaaattcagaaggcagcagaaggaagagaggttaaaaatttgctctgaaactgttgggttagagccatcttaaccctcagtgggttaagtgatagatgagtcaccagggaaatgggtgcaagggagaatctatctcaggagaaataaaggtaaagtcaccacaatccaagactaatagctctaggattctcctcttccaatttggacctaacagcctctccctttcctgaattttcccagctctcgcccaaattgactatgagcagaacactgcaacagactgttctctgtacatgtgtgcagctcccaaaatatctgacatcacagttttcaaatagagaaataacagttttacttgtctacttgttttatttttaaaaatctttttgtcagatgaaatcttttgtcaagttacaaaattgacatgtgtctaccacaatccttaaaaccagtgaaataatataaaactatgtaaagaaaatgttaatcatacttctacccccaacaagagtaaataatatggcagtctggtgtctttctacttaaacttttttattttttgttttgttttattgaggcagagtttcactctgtctcccaggctggactgcagtggcgggatctcggctcactgcaacttccgccccctgggttcaagcaattctcctgcctcagcctcccgagtagctgggattacagacgyccaccactgcacccagataatttttgtgtttttagtggagacagggtttcaccatgatggccaggctgatcttgaactcctgacctcaagttaatcccaaagtgctgggattacaggcatgagccaccactcccagacacatcttttcacattaaaaaaaaattgaaataagggatttggagttgttattgccatttga

SEQ ID NO: 23438 - DNA, 1354 bp, Homo sapiens
attgttcctgcctttctttcattcttttttgatggcagaaatgaagatctttgattctagagtcggaggtgggcaggagagtgttacaggtcttacataatgcatctttcacatcttatttttaaacgcgggcataatcagggctgggcagaggctgggcttggtttgcacccgtgtgtggggagaggcggttgcctgccctgcagtgctagcccrggggtaggtggggacaggcagtcctgtgcaactgaatgaaaattactagaggaagcttcccccacttccaccccttcctaaatataacctggagggagtttttcctaattgttcccttatggtgaaaaatgtgttgagagagggcaggacaaggaaggccctgcccacccagccaggggtctcttggtggcgccctgggaggcctgcccactgtttattagtggatgttaataaactataggggacaaaccacgggggtggtgtatgaacagtaactcaggtacccaagatgaaataggggtgctctgccagatgtggggaggtggcagacatggagggggtgtcgccatctggttcttctgtacacccttcctggggcttccctccaggcaggagaccctggggcagacagagatgagaaggtgaggccttctccatggttaggaacatgcgatccaaggtgggatggggatgcgaggctggtgcagggatcgcaggttctgatgatgatgggggttctgcctgggaggtgaggaagcatgggtacaggctggcggggctggtgagtcgagatcatgcttgctcctccatctgttcctgtccatggcttctagatttccaagagaagccagtcacttgggtctttatgggaaatctcttagagatgagaagaagaggtctgccttggtcaggggacagtgatagtaaggtaggtaggaagcctggcaggtaggaagcctgggtgtggtgggagagggggtgattggagcgtccaggccactcaagtgtggtgggtctggcaggaaaggctgggagggcactgacaggggacctgcatcctccgtgtggggcgtacgcaggcctgtgtactccgagtggctgcagggctgcttcctggcagtgagctccacagggccagaaggtttttgtacatgatacctgaggcttcatgtcacctccactacgtgcctggtattcatgacggtgtggtcccctcctgccccagcatggaagacagagcctctgtgagacccgccttgcactttggatgatgctaaggaaggttgcgaggctggccttcctgcctgcctacccgagactcaagcagcaggactttcataattaatatgaattaatg

SEQ ID NO: 23439 - DNA, 1354 bp, Homo sapiens
attgttcctgcctttctttcattcttttttgatggcagaaatgaagatctttgattctagagtcggaggtgggcaggagagtgttacaggtcttacataatgcatctttcacatcttatttttaaacgcgggcataatcagggctgggcagaggctgggcttggtttgcacccgtgtgtggggagaggcggttgcctgccctgcagtgctagcccaggggtaggtggggacaggcagtcctgtgcaactgaatgaaaattactagaggaagcttcccccacttccaccccttcctaaatataacctggagggagtttttcctaattgttcccttatggtgaaaaatgtgttgagagagggcaggacaaggaaggccctgcccacccagccaggggtctcttggtggcgccctgggaggcctgcccactgtttattagtggatgttaataaactataggggacaaaccacgggggtggtgtatgaacagtaactcaggtacccaagatgaaataggggtgctctgccagatgtggggaggtggcagacatggagggggtgtcgccatctggttcttctgtacacccttcctggggcttccctccaggcaggagaccctggggcagacagagatgagaaggtgaggccttctccatggttaggaacatgcgatccaaggtgggatggggatgcgaggctggtgcagggatcgcaggttctgatgatgatgggggttctgcctgggaggtgaggaagcatgggtacaggctggcggggctggtgagtcgagatcatgcttgctcctccatctgttcctgtccatggcttctagatttccaagagaagccagtcacttgggtctttatgggaaatctcttagagatgagaagaagaggtctgccttggtcaggggacagtgatagtaaggtaggtaggaagcctggcaggtaggaagcctgggtgtggtgggagagggggtgattggagcgtccaggccactcaagtgtggtgggtctggcaggaaaggctgggagggcactgacaggggacctgcatcctccgtgtggggcgtacgcaggcctgtgtactccgagtggctgcagggctgcttcctggcagtgagctccacagggccagaaggtttttgtacatgatacctgaggcttcatgtcacctccactacgtgcctggtattcatgacggtgtggtcccctcctgccccagcatggaagacagagcctctgtgagacccgccttgcactttggatgrtgctaaggaaggttgcgaggctggccttcctgcctgcctacccgagactcaagcagcaggactttcataattaatatgaattaatg

SEQ ID NO: 23440 - DNA, 1292 bp, Homo sapiens
taaatagtaaaacggccgagcacagtggctcacgcctgcaattctgacactttggcaggctgaggcaggaggattggtttagcccaggagtttgagatcagcctggcaacatacatagcgagtcctcatttctacaaaaaaatataaaaaattagccaggagtggtggcacacctgtagtcccagctacttgggaggctgaggtgggaggatcacatgagcctaagaggttgaggccacagtgagctatgattgcgccactgcactgcagcctgggcgacagagtgggactctattkcaaatttaaaaacccaaaccaccccccgctaaaacaagtaaaacatcaaagactaaatatgagtgagtaaataaataatatagattttaagaaagcccggcacgtaggaagtgtctggtgagtgtggctgatattcaggtctgtttgtgagcaggagcacataatgaggcacacagatgagggcctggttccagtgggaggaggtggtggccactcgggctgagaaagcagggacaggcagggtgctggggcgggggttccaaggaaagagtcagcgatgctgggaaagggtgggggacccacatgccccagccttgatgcctaggacttcaggggccctgccccacactccggaatccagtcaggggaatgccctgccacagctgccttcagggacctgacgtgctggccaaacaaactggaactcctcctcctcgtggtggtccagggccaggtggctgcctctctgctgctgctgccatatcccagagccttccccaggcctgatgagtcgttttcatctcctgcccatcacgggcagggctggggcagccttcagccatgaggctcaacagcccagctacaaagtccacgacgacaattactctaggggtggaaacatgaaaatcgggaaaattggaatttcctctgtcgtgttgtagatttggatgagtttaggggtgagtggggccctcagaggggccgcctggctagcccagcacatccttgaaaatgctctggctcttctcttcctggccctcctcaggccccgggctccttgcagcgcccagcccacctcttctctcctgcctgcctctggccaggcacggtgctggggacacagcagctatgaaggtgcgccctcgtccctgcactgccctgtctggagggggagagggacagaccaagagctgcagtcactgcagtatgggccagggcagcaggacttgcgccacatctagggctgcccagcccagtttctggtggttcatgca

SEQ ID NO: 23441 - DNA, 1292 bp, Homo sapiens
taaatagtaaaacggccgagcacagtggctcacgcctgcaattctgacactttggcaggctgaggcaggaggattggtttagcccaggagtttgagatcagcctggcaacatacatagcgagtcctcatttctacaaaaaaatataaaaaattagccaggagtggtggcacacctgtagtcccagctacttgggaggctgaggtgggaggatcacatgagcctaagaggttgaggccacagtgagctatgattgcgccactgcactgcagcctgggcgacagagtgggactctatttcaaatttaaaaacccaaaccaccccccgctaaaacaagtaaaacatcaaagactaaatatgagtgagtaaataaataatatagattttaagaaagcccggcacgtaggaagtgtctggtgagtgtggctgatattcaggtctgtttgtgagcaggagcacataatgaggcacacagatgagggcctggttccagtgggaggaggtggtggccactcgggctgagaaagcagggacaggcagggtgctggggcgggggttccaaggaaagagtcagcgatgctgggaaagggtgggggacccacatgccccagccttgatgcctaggacttcagkggccctgccccacactccggaatccagtcaggggaatgccctgccacagctgccttcagggacctgacgtgctggccaaacaaactggaactcctcctcctcgtggtggtccagggccaggtggctgcctctctgctgctgctgccatatcccagagccttccccaggcctgatgagtcgttttcatctcctgcccatcacgggcagggctggggcagccttcagccatgaggctcaacagcccagctacaaagtccacgacgacaattactctaggggtggaaacatgaaaatcgggaaaattggaatttcctctgtcgtgttgtagatttggatgagtttaggggtgagtggggccctcagaggggccgcctggctagcccagcacatccttgaaaatgctctggctcttctcttcctggccctcctcaggccccgggctccttgcagcgcccagcccacctcttctctcctgcctgcctctggccaggcacggtgctggggacacagcagctatgaaggtgcgccctcgtccctgcactgccctgtctggagggggagagggacagaccaagagctgcagtcactgcagtatgggccagggcagcaggacttgcgccacatctagggctgcccagcccagtttctggtggttcatgca

SEQ ID NO: 23442 - DNA, 807 bp, Homo sapiens
ttaggagttcatctctctagtgttcttgtctctgctttcgtttttgttggcttcattctctgccaggctcttcctaaaagagggcaagttaatcccccttcctccggtggccccaagctcatagcctccttgctgaggtagagcatctctttcctgtagtgtaatgaggtctcaggattcackctgattggcctggattggtcatgtattcatccttaagccaatcactgtggctggagggtgcagtgctatttggccaggcttgaagtacctgaatcacatagcgggtagggagtgtttgctcaaggaagacagggctggtctacagaatgcagggatagatgctggccaggctgaaaagcatggagcatttcaccacggtcattgataagcatcctttgaaccttattcacgcataagacaggaccaggagcctgactgtgggttctaatcccacgtatgcatccttcttactgtgtgacattgggcaggtaacttaattctcttagcctcagtttcctcatctgtaaaatggaactaacgatagcatatacctcatactcacgggttcttcccacaccctgctcatttctgtggacccctattattagcatagggaataaagatgcttaatagatatttgatgaatggaaaggagggaagtaggaaggggaagccggagggagaagtaaatgtgttaatcaatttaaagtgctcagaacaatgcttggcatgtaataagcacttaatgttagctatcactctttttatttattcacacatttattcatgaactctatggctcat

SEQ ID NO: 23443 - DNA, 666 bp, Homo sapiens
ggaaaaaaaaaaaacaaggctcaggagcccattcaaagcacgtgccaggaagggcagagaggaatttgtatccaggtcttctgactctagatcctgactcttttttttttttccaagacagagtttcactctgtcacccaggctggagtgcaatggtgcaatctcagctcaccgcaacctctgtcttccaggttcaagtgattctcctgcctcagcctcctgagtagctgggattacaggcaagcaccatcatgcctggctaattttcatatttttagcagagacagggttttgccatgttggccaggctggtctcaaacttctgatccacccgcctcggcctcccgaagtgctgggaatacaggtgtgagccaccgcacccagctgatcctgactcttaaccactayacggaaaggcagaaagggaatgcctgcaaaatcacggggcaggggacagctggctgggtccactgccaggaaaaggggaacggggagaggccccaggggaccagactgcccacaggctgccaggtctgagaacagcacatttcctaccttcccagcagggcttcgcgaggtcatgagccagggccaccagggcctcaccctcccaagggccagctagaaaagggtcagccaatgtcggcccctggccagcagacgaat

SEQ ID NO: 23444 - DNA, 571 bp, Homo sapiens
acatgtatgtgaaggcccatatatgtgaatgtgtgtattgtgtggagtatgcatatgccaatgtgcacatacgtgtgtgtttacatgtgcatgggtggtacatgtgcattgtgtgcaaatgtgtacctacatgtgtgtgaatgtccatgtgcattgtgtggagtacatttgcactgagtgagagtatgagcatatatatgtatgaatgtgtgcatgcatccttgtgttggtgtgcatgtaatatgtgtatgttgtgtgtgcacatgcatgcacacacaatgacttgtgaatttacacatcaccaccaaagagcactcacaggtttttgcccatyagcaatcactcattcccacactgaccctggtggcttctcactagtggtgtgtcgctgcaatgacattagggattacagcacattctagtgcccgtcattccaccaagatgcagtaagtctccactgagtcccaggcactgtgaattagcaactacagaaagcgtgccctagactcagacaaaaccccaactagctgtgcagactggactagtctctttagctctttggcctcagttg

SEQ ID NO: 23445 - DNA, 1117 bp, Homo sapiens
gagtctaggatccacagaaagcttgcagggtcagccccctctctcttccccactatggggtagagcaggaggatgatccatagatctgtttacgaagcaggccactggccatggaaggaatcactggacaagatgttatatgagagcccggtatagaaactcaccctaggccaggcgyggtggctcacacctgtaatcctagcactttgggaggctgaggcgggaggatcacctgaggtcaggagtttgagaccaggctgaccaacatggagaaaccccgtctctattaaaaatacaaaattagctgggtgtggtggtacatgcctgtaatcccagctacttgggaggctgaggcaggagaatcgcttgaacctgggaggtggaggttgtggtgagccaagatcacaccactgcactccagcctgggcaataagagtgaaactctgtcaaaaaaagaaaaaaaaaaaagaaataaagaaactcaccctaatggtcaaggggaatagcaaaattcaatgccaggttctcctggaagaataacaacaacgacaatggcaatgatcaccaccaccaccatagaacgccttccccaattataaatatctatgtgtgcacacttactcaaagggctgtcattgggccattttgtagatgaggaaactgaggctgagcaaaggcaactcatttgtccaaggtcatagggtgagcaagaagcaggaccagaatgttgaattgcagtctgtcaaccactgagccctgaaccttgatgctcctagggcaatggactctagagcaaagccagcccctagcatcgggcatccttgggaagaaaaggcagcttttgcaggacttaaggatgagatcaagacctataggaaaagcctcttctgaacaccagtccacactccaagtagcatctgagcatctggagctggccaaaggcctgaggaatgggccaatgggctattggcaagaccatggcacgggtgcccagagggctcgagccagtgattcaaagatcaatgtgtgctcatttcaaaatatatagtgggtgtccccagtgctgggatgcctctgctctgccttcaggctctgggtggctgggttggatggggct

SEQ ID NO: 23446 - DNA, 1117 bp, Homo sapiens
gagtctaggatccacagaaagcttgcagggtcagccccctctctcttccccactatggggtagagcaggaggatgatccatagatctgtttacgaagcaggccactggccatggaaggaatcactggacaagatgttatatgagagcccggtatagaaactcaccctaggccaggcgtggtggctcacacctgtaatcctagcactttgggaggctgaggcgggaggatcacctgaggtcaggagtttgagaccaggctgaccaacatggagaaaccccgtctctattaaaaatacaaaattagctgggtgtggtggtacatgcctgtaatcccagctactygggaggctgaggcaggagaatcgcttgaacctgggaggtggaggttgtggtgagccaagatcacaccactgcactccagcctgggcaataagagtgaaactctgtcaaaaaaagaaaaaaaaaaaagaaataaagaaactcaccctaatggtcaaggggaatagcaaaattcaatgccaggttctcctggaagaataacaacaacgacaatggcaatgatcaccaccaccaccatagaacgccttccccaattataaatatctatgtgtgcacacttactcaaagggctgtcattgggccattttgtagatgaggaaactgaggctgagcaaaggcaactcatttgtccaaggtcatagggtgagcaagaagcaggaccagaatgttgaattgcagtctgtcaaccactgagccctgaaccttgatgctcctagggcaatggactctagagcaaagccagcccctagcatcgggcatccttgggaagaaaaggcagcttttgcaggacttaaggatgagatcaagacctataggaaaagcctcttctgaacaccagtccacactccaagtagcatctgagcatctggagctggccaaaggcctgaggaatgggccaatgggctattggcaagaccatggcacgggtgcccagagggctcgagccagtgattcaaagatcaatgtgtgctcatttcaaaatatatagtgggtgtccccagtgctgggatgcctctgctctgccttcaggctctgggtggctgggttggatggggct

SEQ ID NO: 23447 - DNA, 670 bp, Homo sapiens
taaagaacctctcccagtccctttgtccaatcctggcatctcatttttcaatgcttacatagacctctcctctggggtcacctggcacaacaacgctttactaactgccttcaattcttaggtcatactgaggcattaggcttgccaacctggttgaagtgtgagatcttagagaaaaagaatcttctttcctcctcctttatcttcttttctcctcctctgcttccttcccctgctcctccttcttcttctctgtttttcttacaagggttaaacaagkgtctattttgagcttagcacaaagtctgttcccactttctccaagtgtcccacctaagtgctgaagctcagtaaataagcccaattggaagtggatacatgattagttaattgttcagtggcaaagttcttacagttgattttctctgcaatcactctagaaaaagataagtaaaagccttggttggtgggaaagatggtctttttgaagataaaaaacatattcagaggaatgtttttgggttagttctttttttttttttttttttttgcacttagcatctgacaaagagagagtcattaatgccatagcgtgcatatgagactgtaatgagatgattctcacctgagtgatttctgaggcattcatctcattgaatctaaataccag

SEQ ID NO: 23448 - DNA, 721 bp, Homo sapiens
aattttaatccttaaaaataagtactcgcttattctgattttatcttgtaatcataatatagtatgcttttttaataaaatagaaaatgaaggcacacatataagtaagactatacttggactacatagaaatataggaatattaattacagtgatcaaagagagtctaaatttgcagaaggatatgagaagagaacaaaatataagagaaattattttattattcatcatagtcttaattgcattgcaattcatattagtacttttttttttataaaactagtcaagtgtagtcgtgagaaggggaaaagtagagttcaatctgtagctctgaacaacccattaaataactaccttcagaccagccatattatatttttaaacaagcataaaaacaaatataataaatggttattgagaatatacctagcttaaaacatattttaaattgctyatttatgtaactatatgtaatctactttaaaatatcaaaagattatccaaaattaataagccagagaccaccaactctttctgtggaaggctcaattagtaaatatttcaagctttgtgtgccacataagatctctgtcacacattcttgtttgtttgtcataatcctttaaaaaggtaaaaaagccattcttagttggcaagccagatttggtccacaggctgtagtttcccaattcctacattaaacccaaatcataattgtttg

SEQ ID NO: 23449 - DNA, 1010 bp, Homo sapiens
acacacattcttttccttttccatctctccttcttctccttttcccttcttcctccacattcttccttcctttctttttgccaagtacttggccaaggaaaacagagtatcccactgtcctgctcagacctgccgagattcagaactgaaagacttccgggtataggagtctcccagttaaaatctttcacagtggctgctgtytctgtctcctccagctctgcctccactgcttatctctgagaatccagcgtcaggacgcttgtgaacctagaatctgccctggtttctttttttttttttttttttttttttttgagatggagttttgcttttgctgcccaggctggagtgcaacggcacaatctcaggtcactgcaacctccgcttcctgggctcaagggattctcatgcctcaacctcccaagtagctgggattacaggcacccgtcaccacacctggctaatttttgtatttttagtagagacagggtttcaccatgttggccaggctggtctcgaactcttgagctcagttgatccgcccgcctcggcctcccaaagtgctgggattacaggagtgagccaccacgcctagccgccccagtttcttaaaaccaagaaaggtccatcccaaatatgctactgcatgacactttcacttgcttctttcattcatggattcatctggtacgtctcgagtgtctcctctattccaagcactatgccgggtgctacagaagccatgacaaaagggtctcctgtcctcatgggtcttgttctggcaggggagaacaattttaatcagttatatggttatttaagttcacttggagaaaaataatacaaaaattaagtatggggtgcgaaaagagtgagtgtgttaggggattctgacctaatctggggatttgaaggcttcctcaaaaacagtgacatttaagcagggaaatgaaggataatagaaattgacaggtcaggggaaagggagggaagaatgttccaggagg

SEQ ID NO: 23450 - DNA, 1230 bp, Homo sapiens
tgacctctagattccttccacacttgtttctccttgctccttccctttctctgctgaatacagaagagtatgaccaggttttggggcaagggtcagcaaaccatgtcccaagacccaaattcaacctgtcacgtctttttgtaaattatgttttactggaacaaagctaggccattaatttatgtgttgtcaatgactgcttttatggtacaatggcagcattgaataaaggtgacagagacattataacctgcaaaacctacagtaattatgatctggtactttctgctgtaaaaaaaaaaaaaaaaaaagtaacttcagctctaggggatggcagagtcacaagatggaaggagcctgggtccctgaataaacctgccaacatgaaccagtcactaagtaagaaataaatttctatgatgagtcattatattcctgggtctctttatgagagcagctgtcctaccataacttatttgcaggacattctagttacagaaataattacttccttccacattcaataggaataacctatttggtttcccaaaatgatccaaattgcttctccatatcatgcaattcttatttctcaccaccacactcagtaatgcagccactttccccctttcagagagtataacacacaatcatccccattgcacccaggagagacctgccaacagcaacgttctatctggtatcccaacttattgggtttttttggtttgtttggcttttttttttaatttgggrtttcaaaattccaaagagaaacagaatcgcagcacttatccaataattctgtctgtgttgagaaataggattctggcaagcatagaaaaaaatatatttttattagtatgtccaaatctagaatgcaataaaatacagacctttcagaagaggaggaaaaaaaaatccttagtaaagggaaggaaagccaagagccgattacttactgctacagaatccaatattgcaaagccctttttttcttttcctatgccacatttttaatgtctctgtgagctcagtgtgctgtgactatcaatcacaggaaactactgacattgtgaaactgcttttaagatatacagagttttcaaagccaaagttgtctgaagaataaaaatcttcagagatcgtatattttcaaaaatatctatttgcacaccaagctgagtaatgaccagctgtccttactctgcaactgcttgacagaatgca

SEQ ID NO: 23451 - DNA, 522 bp, Homo sapiens
gaggatttatttttccccacattaggagacaatttcctgatatctggtaaaactctagagtagcatttataaagctctgttgcggccaggtgtggtcactcacatctgtaatcctagcactttggggggtgccaaagtgggtagatcacgaggtcaggagtttgagaccagactggccaacatggtgaaaccctgtctcttactaaaaaaaataataataatacaaaattagccgggctggtggtgcgcacctgtaatcccagctacttaggaagttgaggcaggagaatcacttgaaatcrggaggtggaggttgcagtgagccgagactgcgccattccactccagcctgggcaaaaagagcaaaactccgtcaaaaaaacaaaaacaaaacaaaacaaaacaaaacagtgttgcatggcagattttgagataataataaatatttctttaaaaatttgttgagtggtcaaataagtttggcagatgccaaaatatatatccccaatgtggatggtcaca

SEQ ID NO: 23452 - DNA, 796 bp, Homo sapiens
ggagagtccagggagacaagtcacctcacttgagtgctgggctcagaaaatgtcacaatcttctctgatggaagagcccagaaaagaaggaagagccgcatcacctaggtgttgaacccactgatgtgtcgaaatctctattctgagcagagtccaggcaagtgaggagagtcacatcttttaggtgattggtccagagatatttctcaatgccccctgtgcacatggcctagacagaagacacacataagcaagattaccttgttgcttagcccagtgatgtcacaatgcttcttgagggcagggcacaaacaggatcagagagtcacatcattaagtaccaggcttagtgatatgttataaccttacctgtgagcagggtctaagtaggggaaaagatttatatcacctaggtgcaaagtagagagatacatcacaattcctttgaaggaagtgtctaggcaaaatagtcacatcacctaggtgtttattccaggtataagtcacaagatatatctgtgctgagcccagaagcactgtgaaatcactaaggttctagttgtatgtcacaattatacctgtgggaaggcccagtaatgagacctccaaatccaaayatttctccactccaggtagaactcctgttgcgttgggtccaagtacttgagtcacaatctcaacagtggactgcatcctcacatgagagccccaatcccttctccaagctatgtcctggtaagggagtcacagcctcaatgctgtgctgaatcttggtgagagagtcaccatttcgcct

SEQ ID NO: 23453 - DNA, 1137 bp, Homo sapiens
aagtgactgaccrgagtgaggggctttcggggtggcccgtgactgggagacccacagaaagctggtgagtggggctgatctgcctggtgtccatagcctgagctgccccggacagctgtgccttgtcaagaaaggactggaagtgtgttgcagaaaccactgctggcatccagcctcaccccagaggtaggggagggacctggctgtgctgctggctgtttgtgctggggaaggggctgttggcttgtttctctggcttccagcagacttgtgaagagttgttaccaaaacggaggggttttgaaaacagcccaggaggccagagaggaaacatttagagaagagataaacaaaagaagcgacagacttctcactctaacaaaaggggctttggtttacctgtgaaacttcactcctcctcttcccctagccttaatttataaagctggtccatggctccaagagattaccctattttaaagccctagttctgaggaccatattggtcttgctgtgttttggcacccagggttggtgatgtcctgacttaaattccagctgaacagttaagagtaagccggctaactgactccggtgtctggtattagctgtgtcgttactatttttattaacagctaacatttattgagtgtttaccatagtcaggcattgtgctaagcccttaacccacacttcttgagtcttcatcctcatagcagcactttgaggtggctacagtttatttgacacattttacagatgggaaaaccaaggcatagagaggtccagggttatacaggtagtaagtcaaagaatgggacttttttgagacggagtctcactctgtgacccaggctggagtgcattggcaccgtctcggctcactgcaacctccgcctcccaggttcaaacgattctcatgcctcagcctcccaaatagctgggattacattacattcatagtggcatctgccactatgcccggctaattgcttgcatttttagtagagatggggtttcaccatgttggccaggctggtctcaaactcctgacctcaggtaatctacctgccttggcctcccaaagtgctaggattacaggcttgagccaccatgccagcttaagaatgggacatt

SEQ ID NO: 23454 - DNA, 1137 bp, Homo sapiens
aagtgactgaccagagtgaggggctttcggggtggcccgtgactgggagacccacagaaagctggtgagtggggctgatctgcctggtgtccatagcctgagctgccccggacagctgtgccttgtcaagaaaggactggaagtgtgttgcagaaaccactgctggcatccagcctcaccccagaggtaggggagggacctggctgtgctgctggctgtttgtgctggggaaggggctgttggcttgtttctctggcttccagcagacttgtgaagagttgttaccaaaacggaggggttttgaaaacagcccaggaggccagagaggaaacatttagagaagagataaacaaaagaagcgacagacttctcactctaacaaaaggggctttggtttacctgtgaaacttcactcctcctcttcccctagccttaatttataaagctggtccatggctccaagagattaccctattttaaagccctagttctgaggaccatattggtcttgctgtgttttggcacccagggttggtgatgtcctgacttaaattccagctgaacagttaagagtaagccggctaactgactccggtgtctggtattagctgtgtcgttactatttttattaacagctaacatttattgagtgtttaccatagtcaggcattgtgctaagcccttaacccacacttcttgagtcttcatcctcatagcagcactttgaggtggctacagtttatttgacacattttacagatgggaaaaccaaggcatagagaggtcyagggttatacaggtagtaagtcaaagaatgggacttttttgagacggagtctcactctgtgacccaggctggagtgcattggcaccgtctcggctcactgcaacctccgcctcccaggttcaaacgattctcatgcctcagcctcccaaatagctgggattacattacattcatagtggcatctgccactatgcccggctaattgcttgcatttttagtagagatggggtttcaccatgttggccaggctggtctcaaactcctgacctcaggtaatctacctgccttggcctcccaaagtgctaggattacaggcttgagccaccatgccagcttaagaatgggacatt

SEQ ID NO: 23455 - DNA, 1137 bp, Homo sapiens
aagtgactgaccagagtgaggggctttcggggtggcccgtgactgggagacccacagaaagctggtgagtggggctgatctgcctggtgtccatagcctgagctgccccggacagctgtgccttgtcaagaaaggactggaagtgtgttgcagaaaccactgctggcatccagcctcaccccagaggtaggggagggacctggctgtgctgctggctgtttgtgctggggaaggggctgttggcttgtttctctggcttccagcagacttgtgaagagttgttaccaaaacggaggggttttgaaaacagcccaggaggccagagaggaaacatttagagaagagataaacaaaagaagcgacagacttctcactctaacaaaaggggctttggtttacctgtgaaacttcactcctcctcttcccctagccttaatttataaagctggtccatggctccaagagattaccctattttaaagccctagttctgaggaccatattggtcttgctgtgttttggcacccagggttggtgatgtcctgacttaaattccagctgaacagttaagagtaagccggctaactgactccggtgtctggtattagctgtgtcgttactatttttattaacagctaacatttattgagtgtttaccatagtcaggcattgtgctaagcccttaacccacacttcttgagtcttcatcctcatagcagcactttgaggtggctacagtttatttgacacattttacagatgggaaaaccaaggcatagagaggtccagggttatacaggtagtaagtcaaagaatgggacttttttgagacggagtctcactctgtgacccaggctggagtgcattggcaccgtctcggctcactgcaacctccgcctcccaggttcaaacgattctcatgcctcagcctcccaaatagctgggattacattacattcatagtggcatctgccactatgcccggctaattgcttgcatttttagtagagatggggtttcaccatgttggccaggctggtctcaaactcctgacctcaggtaatctacctrccttggcctcccaaagtgctaggattacaggcttgagccaccatgccagcttaagaatgggacatt

SEQ ID NO: 23456 - DNA, 1102 bp, Homo sapiens
gttctttgagcttggaaaagtttttctgtattatgttctcaaatattttttcagttctattttttaggataggaggcttctgtttcagtgatggatatcaatttaccctctatttctattcatttcttaatagttgctttaattattgctttccccctctgttttaacttgtattacctcaagtattttcctgatgtgttcctttcattttgggggctggtgctttttgtgcctttagttttttctgacttacagaaggtgatgatttcttggtccttaattgtttctttagctgcctgatctctcctttcatctcattcttttgatagtttgtttcaactttgagttgactgagtatttgtccctaagggttaccaaagaggcagaggaacattcccgcccttgacactgtagtatagcttggggagagagaaaaagttaaatggcaatcaaaactctatatgctcaagaagagtaactagacatcaggtgctgtgagtgctcagaagaaggaagaggagtttcaaaagttggtggttgggatgttcaaacacctgggacagagggatgcgcagcatttcagcaggaagtcctctggtctgtggaggactgggtaggagcaggcagatggcagacagtgggaatcacagtgtatggcgggttcatttagcacagcatttgggtctccaggcttcagagtcacacaacctgggttcaactctgctctactacttgtaagctgtgtaaccttgtgccaggtacttgatctctctgagcctcactttcctagtctatgacacagcaataagccatttcatggcatcattaagactaaatgagataactcatctgaaggggaaggcaatcagcacattgttataagtgcttaataaaggtgactactattgtggaagcccttgagtycctaactagattactgagtccttaggagaaggaattgtgtcttattcctcattgtgtgcctcacgcataatagatgagcaataaatgtatggatgactttattttatcatttaggtcatatttcattgcacgtagcagaaaccctaactcaaactggctaaaaccagggatgcatgta

SEQ ID NO: 23457 - DNA, 577 bp, Homo sapiens
ctggctggaaagtaaactgtgaaaaggtataggcaggaaaattgctggtacttactgagggcatactacgtggtggggtggttctaagtgttctgcaggtattaactcatttaatagacaggataatcctacagtgtagacaagatcatggcatagggttgcgtgactgggctgcttgttgaaaggcactcggcagagagtgggatggggcagaaatccagccctcactcactgcatcctgttctgtgaccttgcctgggactctttctttgcatcaagatacctttaggtagtaaaattaatgggtatctgtcccggtgatatacttttcccaaattcacacaaaagcacagaataagcaagtggcgttcctagtggtaggcactataagtattcaatttacagttgaggaaactgaggcacaatgaagtcaagaaatctgccaaagtttatataactagtaagggacagcgaggagatgcaaacccaggctcatggctcagagactgcatgcttattcactgtsatatgctggttctctgtcacatttggagtgctttgcccatgctagtttaca

SEQ ID NO: 23458 - DNA, 791 bp, Homo sapiens
ggagatactgtttcgtccatttaactaaggcatagaaaggttaagtactttgtctaaggccacaagctagtaagaatttggaccccaggcagcctggaacaaattccaagctattaatcaccacactaggctacctcctagtaggtacttagtaaatctccattggaacaaatagatgaatgagattcagataaacaggcaggtgggatggagtgctaggaaatggtcctattgaaaaagatgtgggtaagaagtgargaaaaaattatcaagagctagactaagtgagtaagaggaaacattgataatagtactatagtaacaccagggggtaatcagtattagtgtcctttgcagatacataaaactttattttctgagttggaaagcttctggattgcaaaaagtagctttatgcctcaaatgagctcagtttatatcccaattaaaatatattacaatgagaatttatttttccaccgtgatagagttactggcactggtcctccctcctatttcaagtaacaagaaaactggacacaatgtatgaaagaactgtttccaacactggacaacaggcagtgcagacagggatctctaagagaggggaacagagtcagtcttgggatcaccacaggtttctgagtgcaggcactatgcatccaccatgtagcagagctgagggaggagagagattggaggtcagtgaagctgaaaagactgggacttgtgaggcaaagtgccagagaggagggagctatgcagaaaaagaacttcacacatctgcatag

SEQ ID NO: 23459 - DNA, 3178 bp, Homo sapiens
ttagttttaggccccttagggtgggcagaagatggaggagcacccacgtgattcctccacgtgggagtctccaaccccgccctggagctcaggggcactttgggtctttagaaaaattgggtagaagacatgggttttttaggctttggtcttcaccagccaagggaggagataaagtggagtgtcaaagccccggggtgacctaggaagccaatgggtcacaggcccccctttcgtgaactccaggccccycctccgcaggaaccacagcaccccctccctagagtcacctacacgtccttagctcctgctactgcttcatcttcaagttgcagcccagcgaagcctttttgaaaggtcccttgcctctccaaagggtggttaaagagctattgttattttcttagagtgcctgaggaaagagaggcttctgaggagctaggagctgggccgaccctgaccttggccagcctgagccaggcccagaaaggcctggaggggctgatgcgcctggcttcttgccctccggttcttgagggcatgtcgtgtcttttctcctttaaattgggccctgcttaaggaggtggttgttacacaaagccctgagagtgagagttcccactgccctccccctctaggagttggaggcctcttctgaatatgctcattgtaatgttactgcagtgtgtcaggcaaacttaaggaaaatgacttcactttttattatgttgcattgtattcctttctgtaacagcttagatagaattaggattaaaaatcaagattatatgcattttacaatcttactgggtgtgtggagtcagttttgccttataatacaaaacagagaaatggtggcaaaactgccttgaggtacacttcatcaggggtccgtattcacacctctgaggtgcatccaagatttggtgtgtgtgtctgttcctgcttacaggttttgcttaccgagccctctgccctccccttccaggcagcattacagatgtcttatcaggctttctctaaatcattaggattagcacacagctctggccagctggatcattctaattggaaattaggtgcttctcacattgaaatccttctgaaaatatctccaaagatctctttcagctatgggaattctactaaatgcctataatattttgcatggcctgtatactttttaaataggtgaattctgtagattcagtgattatttctagaaaaatgcagtattaaaaaagccctgttgtttgttctagtaacaagtctttaaaaagacaattctgcattgatgactgtaagaagagtctacaccatcttccctaaatgttacctctcctccagaaaaccgataaaaatccacagtggcaataagctagtttgttttcggttgtattttgttttacacttacggacagtgcttctcaagctttctgtgattaggggctctcttggttccctggccccccaatctttcacagacttcagtaagacacaataaaaataattatcataaaatgaaataaaaatacaaagttatggaaaatagaagccccattttaaaaattccatgtacagacataacagttactgtgtaaatttgctgtagaagtttctaaataataaaatgtctctctctacatacctcatcgtggaccagtaacagttcgcagacaggcaccatctgtggccacactttgagaaacactattttagagtgtgtatgtatctgtgtactcacacatttaagtatgttgccatgatcacattataacataacataaatcttagaactttatatgagaattaaatgcacttagctctttagcaaaagtgaaatttttctataagtatttaaatgcttaaattataagcaaataccaatagcatacctgtgaatacagttatgtttcaaaacccagttgtccagtagtacctctcatgcatgaagtagaaaacgttttgcaatatgagatgaaaccacctccactctgattcaccttcaagtttaaacagatactttagataggaaatgttctatgcaaagtaaatacacagatgagaattttagcactaaacagtaggaaatatgtctatcacttgaagtattagacaaaccaactgttactatcataacctttattgccctgaagaacaattaattactggactggtcattgtgattgacattgacagccattttttaaatgttaacaaaatgaggggaaatgtttcatgcaagtaactccacattcttcataagtattaacaaatctcaagccgattctgatgttgataggtcgcagcttgttcatctgtctcttctggagacctcatgagacatgaggtaagacggttaccccaagtggcaggctccatgtctacctgtatactggccttgagggcagcatggcctgctttgtgacaaagtatgagaaagaagttctgtgaagtttatattccatttagccttatttctttaggtcgagacttgaaattcaaaatggtgatcaggtgtaggaggggctatttagcctcttgaaggccagggtgttcatgtgggactccccactgggcctggccaaatgcctatgacagtgtagatgtggataagttattaaaggattgaatgaggtgtgatcaatcagctgaagcagttcattaaaaggtaagtggcatttagaagagaaattgaataactacaaagcagttgcctgtatatgaagacatgagagtgagtcacactgaggacaggattagcaggagtccctgagagtgctgtagctggaggcggggacggtgagggagcaagcatgggcctggcttcattcgaaccacgatcctggtccgaacaccaaaagacaggtttcttgttaaatggttagaaagtgagatctttgaggcaaaggctaatgaacttgagattgttctgtttagacagtagaagttctgaaaggaggttgtgacgatgtcacatgatcttggaaagttggaaggcccactccccagaaggtgacaaccagttgataaaatgtattcactaaggccagagcaagagaggacacagcctggcctgtgagcagcaggcaagatggggcaggagttcctggctgcagttttaaaattcaacccattaccagattctcagggtctgagatatgaggtcatggtttcc

SEQ ID NO: 23460 - DNA, 3178 bp, Homo sapiens
ttagttttaggccccttagggtgggcagaagatggaggagcacccacgtgattcctccacgtgggagtctccaaccccgccctggagctcaggggcactttgggtctttagaaaaattgggtagaagacatgggttttttaggctttggtcttcaccagccaagggaggagataaagtggagtgtcaaagccccggggtgacctaggaagccaatgggtcacaggcccccctttcgtgaactccaggccccccctccgcaggaaccacagcaccccctccctagagtcacctacacgtccttagctcctgctactgcttcatcttcaagttgcagcccagcgaagcctttttgaaaggtcccttgcctctccaaagggtggttaaagagctattgttattttcttagagtgcctgaggaaagagaggcttctgaggagctaggagctgggccgaccctgaccttggccagcctgagccaggcccagaaaggcctggaggggctgatgcgcctggcttcttgccctccggttcttgagggcatgtcgtgtcttttctcctttaaattgggccctgcttaaggaggtggttgttacacaaagccctgagagtgagagttcccactgccctccccctctaggagttggaggcctcttctgaatatgctcattgtaatgttactgcagtgtgtcaggcaaacttaaggaaaatgacttcactttttattatgttgcattgtattcctttctgtaacagcttagatagaattaggattaaaaatcaagattatatgcattttacaatcttactgggtgtgtggagtcagttttgccttataatacaaaayagagaaatggtggcaaaactgccttgaggtacacttcatcaggggtccgtattcacacctctgaggtgcatccaagatttggtgtgtgtgtctgttcctgcttacaggttttgcttaccgagccctctgccctccccttccaggcagcattacagatgtcttatcaggctttctctaaatcattaggattagcacacagctctggccagctggatcattctaattggaaattaggtgcttctcacattgaaatccttctgaaaatatctccaaagatctctttcagctatgggaattctactaaatgcctataatattttgcatggcctgtatactttttaaataggtgaattctgtagattcagtgattatttctagaaaaatgcagtattaaaaaagccctgttgtttgttctagtaacaagtctttaaaaagacaattctgcattgatgactgtaagaagagtctacaccatcttccctaaatgttacctctcctccagaaaaccgataaaaatccacagtggcaataagctagtttgttttcggttgtattttgttttacacttacggacagtgcttctcaagctttctgtgattaggggctctcttggttccctggccccccaatctttcacagacttcagtaagacacaataaaaataattatcataaaatgaaataaaaatacaaagttatggaaaatagaagccccattttaaaaattccatgtacagacataacagttactgtgtaaatttgctgtagaagtttctaaataataaaatgtctctctctacatacctcatcgtggaccagtaacagttcgcagacaggcaccatctgtggccacactttgagaaacactattttagagtgtgtatgtatctgtgtactcacacatttaagtatgttgccatgatcacattataacataacataaatcttagaactttatatgagaattaaatgcacttagctctttagcaaaagtgaaatttttctataagtatttaaatgcttaaattataagcaaataccaatagcatacctgtgaatacagttatgtttcaaaacccagttgtccagtagtacctctcatgcatgaagtagaaaacgttttgcaatatgagatgaaaccacctccactctgattcaccttcaagtttaaacagatactttagataggaaatgttctatgcaaagtaaatacacagatgagaattttagcactaaacagtaggaaatatgtctatcacttgaagtattagacaaaccaactgttactatcataacctttattgccctgaagaacaattaattactggactggtcattgtgattgacattgacagccattttttaaatgttaacaaaatgaggggaaatgtttcatgcaagtaactccacattcttcataagtattaacaaatctcaagccgattctgatgttgataggtcgcagcttgttcatctgtctcttctggagacctcatgagacatgaggtaagacggttaccccaagtggcaggctccatgtctacctgtatactggccttgagggcagcatggcctgctttgtgacaaagtatgagaaagaagttctgtgaagtttatattccatttagccttatttctttaggtcgagacttgaaattcaaaatggtgatcaggtgtaggaggggctatttagcctcttgaaggccagggtgttcatgtgggactccccactgggcctggccaaatgcctatgacagtgtagatgtggataagttattaaaggattgaatgaggtgtgatcaatcagctgaagcagttcattaaaaggtaagtggcatttagaagagaaattgaataactacaaagcagttgcctgtatatgaagacatgagagtgagtcacactgaggacaggattagcaggagtccctgagagtgctgtagctggaggcggggacggtgagggagcaagcatgggcctggcttcattcgaaccacgatcctggtccgaacaccaaaagacaggtttcttgttaaatggttagaaagtgagatctttgaggcaaaggctaatgaacttgagattgttctgtttagacagtagaagttctgaaaggaggttgtgacgatgtcacatgatcttggaaagttggaaggcccactccccagaaggtgacaaccagttgataaaatgtattcactaaggccagagcaagagaggacacagcctggcctgtgagcagcaggcaagatggggcaggagttcctggctgcagttttaaaattcaacccattaccagattctcagggtctgagatatgaggtcatggtttcc

SEQ ID NO: 23461 - DNA, 534 bp, Homo sapiens
tcaatattgtgttaactgttctagtcttttgcctctctacataaacttaagaattgctttgccagttccacaaaagagacwactgggagttgattatgattatattgaatctatagatcaagctggaaagaaccgatatctgaacaatattgagtctcaccatccacgaacatggaatatctctctatttatttagatctttgatttattttaccagcattttattgttttactcatatagattttgtacatgttttgttagatttatactagagtatttcttattttgaggtgctaatgtaaatggtattgtctttaatttcaaattgtaaaacattcaacattttaacattccaaacatgaatcagttcacaatctgaccctcgaaatttatttttcccactgaacttagactctcaactccttctctagccagacctgccctctgagctcactttttcctatgtgtccctcactcagtgccctgtcattgcaccaccttttctgagctgagactgccactccaatctcagt

SEQ ID NO: 23462 - DNA, 534 bp, Homo sapiens
tcaatattgtgttaactgttctagtcttttgcctctctacataaacttaagaattgctttgccagttccacaaaagagacaactgggagttgattatgattatattgaatctatagatcaagctggaaagaaccgatatctgaacaatattgagtctcaccatccacgaacatggaatatctctctatttatttagatctttgatttattttaccagcattttattgttttactcatatagattttgtacatgttttgttagatttatactagagtatttcttattttgaggtgctaatgtaaatggtattgtctttaatttcaaattgtaaaacattcaacattttaacattcyaaacatgaatcagttcacaatctgaccctcgaaatttatttttcccactgaacttagactctcaactccttctctagccagacctgccctctgagctcactttttcctatgtgtccctcactcagtgccctgtcattgcaccaccttttctgagctgagactgccactccaatctcagt

SEQ ID NO: 23463 - DNA, 534 bp, Homo sapiens
tcaatattgtgttaactgttctagtcttttgcctctctacataaacttaagaattgctttgccagttccacaaaagagacaactgggagttgattatgattatattgaatctatagatcaagctggaaagaaccgatatctgaacaatattgagtctcaccatccacgaacatggaatatctctctatttatttagatctttgatttattttaccagcattttattgttttactcatatagattttgtacatgttttgttagatttatactagagtatttcttattttgaggtgctaatgtaaatggtattgtctttaatttcaaattgtaaaacattcaacattttaacattccaaacatgaatcagttcacaatctgaccctcgaaatttatttttcccactgaacttagactctcaactccttctctagccagrcctgccctctgagctcactttttcctatgtgtccctcactcagtgccctgtcattgcaccaccttttctgagctgagactgccactccaatctcagt

SEQ ID NO: 23464 - DNA, 486 bp, Homo sapiens
tggcagcagggggtctgcccaaaccaratttaagttaaaaacaaaacaaagcaaaacaattcctaaagtgccccagcttatcatctaacaggcaatggagtttctcagcactgcctgaggttgtttgtaattgtaaactaatagtagtaagggcagaggccagatgttagataaccgaagtcagtggtagaccagctggagagccacgctgggcttagattttaactcttaagttgtcttgctgtccactccacacctagatataatatgagcagaaaacaaagaatttcaattttagttcttcgggaaaacattagctttttattttaatacttcagagtttgttgaaaaaaccgtttttggcaggttggtacaaggaataataccatctgtatttgtatggtgccttgcagtttgtaagtgctctcatgagcattatcctatttaacacccacagccacaaccaccttgtgaggtattgtctcc

SEQ ID NO: 23465 - DNA, 486 bp, Homo sapiens
tggcagcagggggtctgcccaaaccaamtttaagttaaaaacaaaacaaagcaaaacaattcctaaagtgccccagcttatcatctaacaggcaatggagtttctcagcactgcctgaggttgtttgtaattgtaaactaatagtagtaagggcagaggccagatgttagataaccgaagtcagtggtagaccagctggagagccacgctgggcttagattttaactcttaagttgtcttgctgtccactccacacctagatataatatgagcagaaaacaaagaatttcaattttagttcttcgggaaaacattagctttttattttaatacttcagagtttgttgaaaaaaccgtttttggcaggttggtacaaggaataataccatctgtatttgtatggtgccttgcagtttgtaagtgctctcatgagcattatcctatttaacacccacagccacaaccaccttgtgaggtattgtctcc

SEQ ID NO: 23466 - DNA, 486 bp, Homo sapiens
tggcagcagggggtctgcccaaaccaaatttaagttaaaaacaaaacaaagcaaaacaattcctaaagtgccccagcttatcatctaacaggcaatggagtttctcagcactgcctgaggttgtttgtaattgtaaactaatagtagtaagggcagaggccagatgttagataaccgaagtcagtggtagaccagctggagagccacgctgggcttagattttaactcttaagttgtcttgctgtccactccacacctagatataatatgagcagaaaacaaagaatttcaattttagttcttsgggaaaacattagctttttattttaatacttcagagtttgttgaaaaaaccgtttttggcaggttggtacaaggaataataccatctgtatttgtatggtgccttgcagtttgtaagtgctctcatgagcattatcctatttaacacccacagccacaaccaccttgtgaggtattgtctcc

SEQ ID NO: 23467 - DNA, 486 bp, Homo sapiens
tggcagcagggggtctgcccaaaccaaatttaagttaaaaacaaaacaaagcaaaacaattcctaaagtgccccagcttatcatctaacaggcaatggagtttctcagcactgcctgaggttgtttgtaattgtaaactaatagtagtaagggcagaggccagatgttagataaccgaagtcagtggtagaccagctggagagccacgctgggcttagattttaactcttaagttgtcttgctgtccactccacacctagatataatatgagcagaaaacaaagaatttcaattttagttcttcgggaaaacattagctttttattttaatacttcagagtttgttgaaaaaaccgtttttggcaggttggtacaaggaataataccatctgtatttgtatggtgccttgcagtttgtaagtgctctcatgagcattatcctatttaacacccrcagccacaaccaccttgtgaggtattgtctcc

SEQ ID NO: 23468 - DNA, 773 bp, Homo sapiens
agacctttgtcagatgtatcatttgcaaatattatctcccattctgtaggttgcttctactctgttgatagtttattttgctgtgcaggagttctttagtttaattaggtcccatttattgacttttgctttcattgcaattgcttttggcattttcatcatgaattctttgccagttcctatgtccaaaatggtatatcccaagttatcttccagggcttttatagtttcaggtgttacatataggtctttaatccatcttgagttgatttttttgtactacaaacttgtaattcgtagccagggttgagaatccctgccagaaagagcgrggggggtggagagagagagagagagagagagagagtccccgatgaagaccaaggagtgattggatctggcaagcaggacatcagtggcttttgagggagcagtttcagtaaagtgatgagactagattccaatttatagcaggaagggctggataaggatacagggttttgtggtcaatgtaaagtacatggagagaattgatgctgcatggccccgatgttatgaggtaatattgttaactgctacgagttggatctttttgagctgtggaactttctgagacttgtggagagtggggaagcactgaagagatgctcttaggaatataagaagagtctgcaaggccacagtgatggcctggaagagtatgaattgcattctgtaattatgtggcccctattaccgactgttaatgatgtaacacatacagtgctgatgca

SEQ ID NO: 23469 - DNA, 773 bp, Homo sapiens
agacctttgtcagatgtatcatttgcaaatattatctcccattctgtaggttgcttctactctgttgatagtttattttgctgtgcaggagttctttagtttaattaggtcccatttattgacttttgctttcattgcaattgcttttggcattttcatcatgaattctttgccagttcctatgtccaaaatggtatatcccaagttatcttccagggcttttatagtttcaggtgttacatataggtctttaatccatcttgagttgatttttttgtactacaaacttgtaattcgtagccagggttgagaatccctgccagaaagagcggggggggkggagagagagagagagagagagagagagtccccgatgaagaccaaggagtgattggatctggcaagcaggacatcagtggcttttgagggagcagtttcagtaaagtgatgagactagattccaatttatagcaggaagggctggataaggatacagggttttgtggtcaatgtaaagtacatggagagaattgatgctgcatggccccgatgttatgaggtaatattgttaactgctacgagttggatctttttgagctgtggaactttctgagacttgtggagagtggggaagcactgaagagatgctcttaggaatataagaagagtctgcaaggccacagtgatggcctggaagagtatgaattgcattctgtaattatgtggcccctattaccgactgttaatgatgtaacacatacagtgctgatgca

SEQ ID NO: 23470 - DNA, 773 bp, Homo sapiens
agacctttgtcagatgtatcatttgcaaatattatctcccattctgtaggttgcttctactctgttgatagtttattttgctgtgcaggagttctttagtttaattaggtcccatttattgacttttgctttcattgcaattgcttttggcattttcatcatgaattctttgccagttcctatgtccaaaatggtatatcccaagttatcttccagggcttttatagtttcaggtgttacatataggtctttaatccatcttgagttgatttttttgtactacaaacttgtaattcgtagccagggttgagaatccctgccagaaagagcggggggggtggrgagagagagagagagagagagagagtccccgatgaagaccaaggagtgattggatctggcaagcaggacatcagtggcttttgagggagcagtttcagtaaagtgatgagactagattccaatttatagcaggaagggctggataaggatacagggttttgtggtcaatgtaaagtacatggagagaattgatgctgcatggccccgatgttatgaggtaatattgttaactgctacgagttggatctttttgagctgtggaactttctgagacttgtggagagtggggaagcactgaagagatgctcttaggaatataagaagagtctgcaaggccacagtgatggcctggaagagtatgaattgcattctgtaattatgtggcccctattaccgactgttaatgatgtaacacatacagtgctgatgca

SEQ ID NO: 23471 - DNA, 1173 bp, Homo sapiens
tgtgtgattataaagatacgtttgtgcaagagattcaaaccataaaggcataacccccctcccgcaagccctccacccagaatcaactggcatcattttaatgaatgagcttctagaccccaccctcccccagggtatatatatatagagagagagatagataactttatataaataaaatcatactatagatgctgttttgctttctgttactttgagtcatggggatctttccatgtcagtatagactgtctttttaaatggcagcatagtattccaatgtgaatgtataataatttattcaacaaaccagtatttccaggcatctgtcttgtttttcattgtactcttgtaggcattgtgctgctgggaacatcatttaaacctaacattttctcacatttttttcatttttctccatggggtacatttgtaggtatgggcttgctgagtctagcagaacgtacattacaatattttatgatgttgccagtttgtcccccaacgtctgattgttatgtagtcagatgtatctttctaggcaggctttctccaccctaaaattataaaagtgttcactcattggagtagccagggttcttggttgtaaaaacagaaactgggccgggcgcggtggctcacgcttgtaatcccagcactttcrgaggccaaggcgggcggatcacgaggtcaggagatcgagtccatctggctaacacggtgcaaccccgtctctactaaaaatacaaaaaaaattagccgggcacggtggcgggtgcctgtagtcccagctactcgggaggctgaggcaggagaatggcgtgaatccgggaggcggagcttgcatgagccgagatagcgccactgcacttcggcctgggcaaaagaggagcgagactccgtctcaaaaaacaaacaaacaaacaaacaaacaaaaacagaaactgattgtggtctatttaaaaaaacaaaaacaaaaatggtatccggtgctcctagcattggcaggaagactagaaataaggtgttaagggagctgggtgccctgcatcacagtaaggccacatagcagggataggctggtgagaccaaccttccccatccctgaacttgctgccgctcaaataatatcaggaatatgttgttttcccacttttcttcattggtttcccc

SEQ ID NO: 23472 - DNA, 1230 bp, Homo sapiens
accctcctaagcccatccccccacccccagacccacatttcttcctcttctcccctctctgcagtgtccgtaaggattacaagtatgtccagtgtggtgtgcaaccccagcagtcctcagtgaccaccatcgtcaaatcatattactggagggtcactatggccccacaccccaaagacattatttggtaagcctcctccatccctcccctctcctctgagctcctctgagactgaagaaggcagcaggacagggccttctctccccatgtcattgcccaacagagactccaaggggactaagttccatgctctcctaagcaccacaacctgtgtgtatgcccagactcattcccacaagtgtgggtggcatccaacccttagcaaaaaggcttttcctgcagagggaactcaggtccatttttttttggctctatgctctggatcctttataaatggtgtgacaggggacggtccagggtcctgttgcatgcaagtctgggcccaggaggctggattagaccagggcaggctgggtccacagctggcctgcagcaaacagcacgtgggctctaagaactgatgtctctaaatgtgcctccttcttccatccttccccaggaaacacctgtctgtccgccgcttcttttggtgggcccgctttatcgcaatcaacaccttcctcttcttcctcttcttctttctcaccacgcctgccatcatcatgaacactatcgacatgtacaacgtcacccgccccatcgagaagctgcaggtgcctcctctgctcaggccaggcctggggaccccagggagatcaaggaakaattcaggcgaggatgggatggggggagccccctgggagggggctgtggagcccatacagtgcgaacattgtggaggtggccatggtgcaaatggcggggtagggcttgctttgttctaaagggatgaaggtgggtgactgccagtcttagggaccagggctagagtgggaagggagagtggggagtccacaggcaggtcctggggtgagttggagggggtgtcgtcctgtcaacatgggctcagaggtcttcatgaacggggtcatcccaggccagcttggggtccagagggtgtggcaagtgtgagtggctctgctctctgcaagttgtccgaggcagcaggctcctggtttgtgtagtagggttaaaggtgaggaagagtgaggtaagccccaacgcagccc

SEQ ID NO: 23473 - DNA, 1184 bp, Homo sapiens
cagaggtcacagcagctctgcctccctctcaccttcctgatgtggtccaggaactcaggcgaggagagacagtcctctgggctggagaactggcggcagttgtactggaagaggggcagcaggtcaggctccagggcaaacagcctgtgggagtgaggcccaggtgttagccctggggtgtgagctcctgcaagccccagcaagcctggctgtcctgcagtcagcgggcgggggtgccaagccaggtctcagctgcaaaccacagctgactctcccacctggcactgctcccccgccagcttcggtagtgccctcctcctcatgccttctactggctctgggcagcatcctagaaagggcaaatgtgtcccagggcctctggtaagcaggggtccctcggtgaatagctgaggggtgtgatttgggacaggaagaggtccccaaacaggaaacctggagttacgttgtgtggagaggaaagccctttctctctctctctctctctctctctctctctctctctctctctctctctctctctctcttctctctctctctctctctctctctctctctctctctctctctctctctctctctccctctccctctccccccccccccccccccccccccccccctgcgctgagtactttccgtgtggttaacttttaactgtattcctcactgtcctaagcagtgggtacaactgttatcccagttttatagaggagaaaacagaagcccgrggaggctagaactcgcctaaggtcacacagcttggatgtagtgcagccacagcgggtgcctgagaaaaaagtgagctggggggagtccggaggcagaagcagaggccctcctcggcatttgggaggtctcaccgggtaactgaatgttttccccttttgtcttgggggtggttttgcggaagcctgggtagaagttctggactgtccaagggtgccaaggataggtaacaccacggtgagggaagcagtgcccggttggtgatagcggaagggttaccaaaactgcgagctgaggttggagactggccttcccttcccacccggcctgcacaccccccacccctctcccctgcggtgaggctcccgcatctgtcaccccttccccggctgctctctggctctttcctcggaaaggtttgtcttgttggttgtcag

SEQ ID NO: 23474 - DNA, 990 bp, Homo sapiens
cacctcaaaccaattaaatcagaaattctgggggaggagcctgggcattagtacttgtttaaatagctcccagggtgattctattgtgcaattgggcctgagaaccactgccttactccaagcaaacasagaatctttacaatgaagctccctattgacagtacagcttcgccaagggcatgttccaacaccctggcaagccacagctggccaagtgccaaagaagcactgagccctccagatctctgcctgccaccaggtctaaggcatatatcggccccaccgtgcctctaggaatctcctgaaccacacatcttttcttcccaaacgatgttatggaattgcattcataatgatgctttagattagagatttgttacttaaagtgtggcccctagaccagtagcctcagcaacacctgggagcttgggagcttgctggaaatgcagaaacttagacctcactccagtcctactgaatcagaatctgcattttagcaagatgcacagtaaagtttgagatgaactgctctaaagtgatggttctcaaacaatgatccttgcaccagcagcatcggcatctcctaaggagctcgctagaagtgcaaattctaaggcccaccagacctacagaatcagaaatgctgggagtggggctcggtaatctgggtttgaacaaaccctagaggtgattctcatgcatactatagtttgaaaatttagtgccagaataatgactgtcaacctcggctgcccattaaaaaccctaggagaagattaaaaatccaaaagctcagagtgcaccccagaccaattccaattaaacagaattactggaagtggtaccctggtatcggtatatatttttttttacagttccccagctgactccaatctgcagtcaatgctgacctattgttctagggaccctcaaccccttcatcctctacactcccaggagatttaaagctgctttaattcttaggaaatc

SEQ ID NO: 23475 - DNA, 990 bp, Homo sapiens
cacctcaaaccaattaaatcagaaattctgggggaggagcctgggcattagtacttgtttaaatagctcccagggtgattctattgtgcaattgggcctgagaaccactgccttactccaagcaaacagagaatctttacaatgaagctccctattgacagtacagcttcgccaagggcatgttccaacaccctggcaagccacagctggccaagtgccaaagaagcactgagccctccagatctctgcctgccaccaggtctaaggcatatatcggccccaccgtgcctctaggaatctcctgaaccacacatcttttcttcccaaasgatgttatggaattgcattcataatgatgctttagattagagatttgttacttaaagtgtggcccctagaccagtagcctcagcaacacctgggagcttgggagcttgctggaaatgcagaaacttagacctcactccagtcctactgaatcagaatctgcattttagcaagatgcacagtaaagtttgagatgaactgctctaaagtgatggttctcaaacaatgatccttgcaccagcagcatcggcatctcctaaggagctcgctagaagtgcaaattctaaggcccaccagacctacagaatcagaaatgctgggagtggggctcggtaatctgggtttgaacaaaccctagaggtgattctcatgcatactatagtttgaaaatttagtgccagaataatgactgtcaacctcggctgcccattaaaaaccctaggagaagattaaaaatccaaaagctcagagtgcaccccagaccaattccaattaaacagaattactggaagtggtaccctggtatcggtatatatttttttttacagttccccagctgactccaatctgcagtcaatgctgacctattgttctagggaccctcaaccccttcatcctctacactcccaggagatttaaagctgctttaattcttaggaaatc

SEQ ID NO: 23476 - DNA, 990 bp, Homo sapiens
cacctcaaaccaattaaatcagaaattctgggggaggagcctgggcattagtacttgtttaaatagctcccagggtgattctattgtgcaattgggcctgagaaccactgccttactccaagcaaacagagaatctttacaatgaagctccctattgacagtacagcttcgccaagggcatgttccaacaccctggcaagccacagctggccaagtgccaaagaagcactgagccctccagatctctgcctgccaccaggtctaaggcatatatcggccccaccgtgcctctaggaatctcctgaaccacacatcttttcttcccaaacgatgttatggaattgcattcataatgatgctttagattagagatttgttacttaaagtgtggcycctagaccagtagcctcagcaacacctgggagcttgggagcttgctggaaatgcagaaacttagacctcactccagtcctactgaatcagaatctgcattttagcaagatgcacagtaaagtttgagatgaactgctctaaagtgatggttctcaaacaatgatccttgcaccagcagcatcggcatctcctaaggagctcgctagaagtgcaaattctaaggcccaccagacctacagaatcagaaatgctgggagtggggctcggtaatctgggtttgaacaaaccctagaggtgattctcatgcatactatagtttgaaaatttagtgccagaataatgactgtcaacctcggctgcccattaaaaaccctaggagaagattaaaaatccaaaagctcagagtgcaccccagaccaattccaattaaacagaattactggaagtggtaccctggtatcggtatatatttttttttacagttccccagctgactccaatctgcagtcaatgctgacctattgttctagggaccctcaaccccttcatcctctacactcccaggagatttaaagctgctttaattcttaggaaatc

SEQ ID NO: 23477 - DNA, 990 bp, Homo sapiens
cacctcaaaccaattaaatcagaaattctgggggaggagcctgggcattagtacttgtttaaatagctcccagggtgattctattgtgcaattgggcctgagaaccactgccttactccaagcaaacagagaatctttacaatgaagctccctattgacagtacagcttcgccaagggcatgttccaacaccctggcaagccacagctggccaagtgccaaagaagcactgagccctccagatctctgcctgccaccaggtctaaggcatatatcggccccaccgtgcctctaggaatctcctgaaccacacatcttttcttcccaaacgatgttatggaattgcattcataatgatgctttagattagagatttgttacttaaagtgtggcccctagaccagtagcctcagcaacacctgggagcttgggagcttgctggaaatgcagaaacttagacctcactccagtcctactgaatcagaatctgcattttagcaagatgcacagtaaagtttgagatgaactrctctaaagtgatggttctcaaacaatgatccttgcaccagcagcatcggcatctcctaaggagctcgctagaagtgcaaattctaaggcccaccagacctacagaatcagaaatgctgggagtggggctcggtaatctgggtttgaacaaaccctagaggtgattctcatgcatactatagtttgaaaatttagtgccagaataatgactgtcaacctcggctgcccattaaaaaccctaggagaagattaaaaatccaaaagctcagagtgcaccccagaccaattccaattaaacagaattactggaagtggtaccctggtatcggtatatatttttttttacagttccccagctgactccaatctgcagtcaatgctgacctattgttctagggaccctcaaccccttcatcctctacactcccaggagatttaaagctgctttaattcttaggaaatc

SEQ ID NO: 23478 - DNA, 990 bp, Homo sapiens
cacctcaaaccaattaaatcagaaattctgggggaggagcctgggcattagtacttgtttaaatagctcccagggtgattctattgtgcaattgggcctgagaaccactgccttactccaagcaaacagagaatctttacaatgaagctccctattgacagtacagcttcgccaagggcatgttccaacaccctggcaagccacagctggccaagtgccaaagaagcactgagccctccagatctctgcctgccaccaggtctaaggcatatatcggccccaccgtgcctctaggaatctcctgaaccacacatcttttcttcccaaacgatgttatggaattgcattcataatgatgctttagattagagatttgttacttaaagtgtggcccctagaccagtagcctcagcaacacctgggagcttgggagcttgctggaaatgcagaaacttagacctcactccagtcctactgaatcagaatctgcattttagcaagatgcacagtaaagtttgagatgaactgctctaaagtgatggttctcaaacaatgatccttgcaccagcagcatcggcatctcctaaggagctcgctagaagtgcaaattctaaggcccaccagacctacagaatcagaaatgctgggagtggggctcggtaatctgggtttgaacaaaccctagaggtgattctcatgcatactatagtttgaaaatttagtgccagaataatgactgtcaacctcggctgcccattaaaaaccctaggagaagattaaaaatccaaaagctcagagtgcaccccagaccaattccaattaaacagaattactggaagtggtaccctggtatcggtatatwtttttttttacagttccccagctgactccaatctgcagtcaatgctgacctattgttctagggaccctcaaccccttcatcctctacactcccaggagatttaaagctgctttaattcttaggaaatc

SEQ ID NO: 23479 - DNA, 990 bp, Homo sapiens
cacctcaaaccaattaaatcagaaattctgggggaggagcctgggcattagtacttgtttaaatagctcccagggtgattctattgtgcaattgggcctgagaaccactgccttactccaagcaaacagagaatctttacaatgaagctccctattgacagtacagcttcgccaagggcatgttccaacaccctggcaagccacagctggccaagtgccaaagaagcactgagccctccagatctctgcctgccaccaggtctaaggcatatatcggccccaccgtgcctctaggaatctcctgaaccacacatcttttcttcccaaacgatgttatggaattgcattcataatgatgctttagattagagatttgttacttaaagtgtggcccctagaccagtagcctcagcaacacctgggagcttgggagcttgctggaaatgcagaaacttagacctcactccagtcctactgaatcagaatctgcattttagcaagatgcacagtaaagtttgagatgaactgctctaaagtgatggttctcaaacaatgatccttgcaccagcagcatcggcatctcctaaggagctcgctagaagtgcaaattctaaggcccaccagacctacagaatcagaaatgctgggagtggggctcggtaatctgggtttgaacaaaccctagaggtgattctcatgcatactatagtttgaaaatttagtgccagaataatgactgtcaacctcggctgcccattaaaaaccctaggagaagattaaaaatccaaaagctcagagtgcaccccagaccaattccaattaaacagaattactggaagtggtaccctggtatcggtatatatttttttttacagttccccagctgactccaatctgcagtcaatgctgacctattgttctagggaccctcaaycccttcatcctctacactcccaggagatttaaagctgctttaattcttaggaaatc

SEQ ID NO: 23480 - DNA, 2033 bp, Homo sapiens
atttttaattttttgaggaaactccaaactgttttctatagtggctgcatcattttgcattcctaccaacagtgtacaggagttccacatccttgtcaacactttttatctttttctttttgataagcggggctgctgggccaactctctcttccctgggagctgagaactggacgtttttttaatccacaagctctgtgttgtgcaaggggaagggccaatggcacctatcagccagagactccacctccattctcccctcggtatccaaactgtaactgatcatgagacttccaggactggcaaaataaaagctagtgtttggggaagtcctctcacaagagttggggtgctggacacaaagaccaacctctcccctcctctggtggaagcttgggagtgaggggatcttctcatggtcatacagcayggggttaggggcagggtctccagtgagagagtgtccttagtctccttactggctttagtgagtctgatgtagcattttctgggggtgcaggagcctttcaggtagtttctgatcttttgcaaagggattttgtcaatgaatttttgctgaatcagtatgtggaggggaggggggaaggataattcagggttttttatactgccaagttgctgacataacctcttattaacacaactacttatttttgtgagtctagaaagttgttaatcctttttgaacctcatttcttttaaaaataactataaattggaggtagcaacactgagactttattaggttgcagtaagcattaaatgagataatgtatgcattttgtgtggatgttactggcccctactcccagtggagcagaagactggatccatttcatggactcactaggggtggcttacatttccttaacaccaaactggctaattaaaagatggctttagccatttgctccctttcctactctgggctatattctctgagagccaccatttctgcccagcacttttttttttttttttttttgagacagggtctcactctgtcacccaggctggagtgcagtggtgccatctcagcttactgtaacctccacctcccaggttcaagcaattctcctgcctcagcctcccgagtagctgggattacaggcccccaccaccacgcccggctaatttttgtatttttagtagagacggggtttcaccatgttggccaggctggtctcgaactcctggcctcaagtgatccacctgccccagcctctcaaagtgctgggattacaggtgtgagccactgtgtccggcctctgtccagcacttctaaccctcctccagcaactacttcctcttgttcctccatgcctgggatatgggctctattccaggcactactgctggttcctccactaggatctgaaccttcctgtcacccataaacaggccctttcctagggtcagagcaatgctttggtctgtggtccgtcttggggattgggggactgctgccctcccacatccctgttagagagacgataggaaagctgggctgcatgtgtaccagcatcttccagcattgatatgtagccttgccccttactgtttaaaaccagtttcctctgctccttccttcactctgaggactttgtaattggacaaatgtcaacgtccctactgttttctcccttaggatcaattttctctcaggaggctcttcattgactcatgcaaacagatttctggcgggaactgctccaaggccttccagatgtgcacaggcatggatgaatcagagcagaagtggacagatgtagctcaaatggagggttctgctatgtaagtaaagcatccagccttccacgttgggagtcaccactagtcccaagcttgagttgagtcatctttaattgaggtacacagagtagggcagctttgaagtcatttacacctgaagctggactcctacccagtgtctttctctctttgtgacctggagttggctacttaactttctgagtttcaatttactcacagttaaaatagtaataataatt

SEQ ID NO: 23481 - DNA, 2033 bp, Homo sapiens
atttttaattttttgaggaaactccaaactgttttctatagtggctgcatcattttgcattcctaccaacagtgtacaggagttccacatccttgtcaacactttttatctttttctttttgataagcggggctgctgggccaactctctcttccctgggagctgagaactggacgtttttttaatccacaagctctgtgttgtgcaaggggaagggccaatggcacctatcagccagagactccacctccattctcccctcggtatccaaactgtaactgatcatgagacttccaggactggcaaaataaaagctagtgtttggggaagtcctctcacaagagttggggtgctggacacaaagaccaacctctcccctcctctggtggaagcttgggagtgaggggatcttctcatggtcatacagcatggggttaggggcagggtctccagtgagagagtgtccytagtctccttactggctttagtgagtctgatgtagcattttctgggggtgcaggagcctttcaggtagtttctgatcttttgcaaagggattttgtcaatgaatttttgctgaatcagtatgtggaggggaggggggaaggataattcagggttttttatactgccaagttgctgacataacctcttattaacacaactacttatttttgtgagtctagaaagttgttaatcctttttgaacctcatttcttttaaaaataactataaattggaggtagcaacactgagactttattaggttgcagtaagcattaaatgagataatgtatgcattttgtgtggatgttactggcccctactcccagtggagcagaagactggatccatttcatggactcactaggggtggcttacatttccttaacaccaaactggctaattaaaagatggctttagccatttgctccctttcctactctgggctatattctctgagagccaccatttctgcccagcacttttttttttttttttttttgagacagggtctcactctgtcacccaggctggagtgcagtggtgccatctcagcttactgtaacctccacctcccaggttcaagcaattctcctgcctcagcctcccgagtagctgggattacaggcccccaccaccacgcccggctaatttttgtatttttagtagagacggggtttcaccatgttggccaggctggtctcgaactcctggcctcaagtgatccacctgccccagcctctcaaagtgctgggattacaggtgtgagccactgtgtccggcctctgtccagcacttctaaccctcctccagcaactacttcctcttgttcctccatgcctgggatatgggctctattccaggcactactgctggttcctccactaggatctgaaccttcctgtcacccataaacaggccctttcctagggtcagagcaatgctttggtctgtggtccgtcttggggattgggggactgctgccctcccacatccctgttagagagacgataggaaagctgggctgcatgtgtaccagcatcttccagcattgatatgtagccttgccccttactgtttaaaaccagtttcctctgctccttccttcactctgaggactttgtaattggacaaatgtcaacgtccctactgttttctcccttaggatcaattttctctcaggaggctcttcattgactcatgcaaacagatttctggcgggaactgctccaaggccttccagatgtgcacaggcatggatgaatcagagcagaagtggacagatgtagctcaaatggagggttctgctatgtaagtaaagcatccagccttccacgttgggagtcaccactagtcccaagcttgagttgagtcatctttaattgaggtacacagagtagggcagctttgaagtcatttacacctgaagctggactcctacccagtgtctttctctctttgtgacctggagttggctacttaactttctgagtttcaatttactcacagttaaaatagtaataataatt

SEQ ID NO: 23482 - DNA, 1251 bp, Homo sapiens
ttttttctcatgtaaaacccctcatgagaaaaaaaaaaatttccctccatgacactaaaccccttgagattaaaaaaaaaaaaaaaactgatgatctccacttctggcaatggtggcagtgcttgttaaaggcttaccttcccactgaaaacaactagaacacctggacgagatactttttaaaatgtatttattggcttcagagaactaccaagccaaggaagacttgaggagccacattcctggagagaaaactgcagagaattgagtccaatattcatcactgcttttgccctctcgctgttcacaggtttcaaagcaatagctraaagttgaaagcctgagcagaaagtggcagctgaaagactagacagagcattgacagtctcaggtggggagggaagcaaaaattggagttccgagatcaccaaagagaaggtgccctggtaaccacattatgctttcagttgggactcccactggcataatggtgaacaaaaattaatccgacctcacaaaatctgaagcctaccttcaaatcatcgcaatcccaggtctgatcaaggtgatctgtccctgggttaacttcatgccagacacaaaacaggtcctctggaaaaatgtaacatcatacagaacttcaaattagctctacagctcttacatgcatgtctaagcatgctaggagatgagaccaaataaccaaaaaccaacagaaaagaacagacaatagaaacagactaacacaaaatcaagacattcgagtttcacatattataaagtaactgagattaatttgttcaagatattgtatgatgaaacggaaaatttcaaacgtaagcttttttaaaaggatcaagtataaatgctagaacagaaaaatacaattggaattaaaaattcaagagtggggcttagcagcagctaaaaagataatggttgtctggaagacaggccagaagaaaatagccaggctgtgggaaatccaaatcttgataaacacagtaaaattttgaaggtcaaagaaaaagagaaaatcctaaaagcagatgggacaggggtggaaggacacattacttttaatagagtgacaataagactgacagctgaattcccaacagaaataactgaagcctgctggacatgtccccagatgaccttggtgaccaattcttttttttttttttttttttttttttttttttttttgagacggagtctcgctctgtcgcccaggctggagtgcagtgg

SEQ ID NO: 23483 - DNA, 592 bp, Homo sapiens
aggtgcaatacagaaaaccttgaataaattataaataagagaaatttaaaatagtatatgttcccatagagaggcatgagggggcttttggggtgctgatgatgttctatttcttaatctggggccagttgctacaatgtattgagttcattaaaattcactgtatgcttattatatgtgctgtcttatctatatgtacattatattttaataaaaagctttttaaagtggcatatgttcagatgaatccctttaaaaagctgcagagtgagtaacatgcatacaaaaacacagaagtgctctatgattttcccagagaaaacatagatcacccgttaaaatgcaggggccctctgaactctggctaactttcaaagcaagatgaggttgtttttagaaacaatttcccatctattaacaatgaaatccaattcagcttcgaatattagaaagtgaaacatatatacaactccgasggactgttgaagtatcaaacagatagggcattatttagggaggctcaacagtcaaggccactttacaccattacggaccagactaaacaaacctgacccgcagggtgaccctccca

SEQ ID NO: 23484 - DNA, 556 bp, Homo sapiens
tcatccagtttcattacacacccyaagggtggagtagggtggagtttcttttactgttgttgttgttgttagcataagccaaaacttagcttccttttttcaaagctttgaaacccttccaacatttatgatacattgattgatgctgtcttattcatcttttatcctcagagatgtcttacatttagtagacatttggtaaagaacacatacctgctcttctaaaaacatgatactggaaatacagttttattgatgagatgatttatagttattagagctgaaaagagatagaaatgagcagataagcatcagtattctttcccatcttgtttcatatatccggtgccttagttgtgcccaagctgatcccactagcttagattgtcagataattagtttgtagagcttgtttttcctgggattgtgcaaaaggccaggggttcttctagaatgctctgaaatttttaaagttatttatttcctgaactttttccttattccacataagaatgtggattaggactttggactattttactggcaaatgttatag

SEQ ID NO: 23485 - DNA, 566 bp, Homo sapiens
ccggcaaactctcaaagatacgctgagcttccagctctcattgaatgtcagagttacagggacttcgaaggcagcctggcctgggccttcactggcctaaccattcctcagcctttcctgctgacccctgcaggctcccatggcagctggctccatgctgggttgggggcaattagaggcactgcctgaagatgggaggagatgccagggcactccttccctcatgcactgtctcaagaaatacctcctccgtggccccagcttctgccagaggcccaccatgcaccatgttccttccagtttctgcaaggtgaccttgacccctgggctggaataacamtacctccttcctccctctgcctcagggtaggtctctgagccacttccccaagccttgtttgttggttggttggttttcagctccttcattacctgcgtaaattttctgcattaaattccctcggttggaacacttgaagaaatttctatttaccttgttaggccctgactgaaacatagcccaacctcttccccaccccttcattgaacttatgaagaaaccaagg

SEQ ID NO: 23486 - DNA, 566 bp, Homo sapiens
ccggcaaactctcaaagatacgctgagcttccagctctcattgaatgtcagagttacagggacttcgaaggcagcctggcctgggccttcactggcctaaccattcctcagcctttcctgctgacccctgcaggctcccatggcagctggctccatgctgggttgggggcaattagaggcactgcctgaagatgggaggagatgccagggcactccttccctcatgcactgtctcaagaaatacctcctccgtggccccagcttctgccagaggcccaccatgcaccatgttccttccagtttctgcaaggtgaccttgacccctgggctggaataacactacctccttcctccctctgcctcagggtaggtctctgagccacttccccaagccttgtttgttggttggttggttttcagctccttcattacctgcgtaaattttctgcattaaattccctcggttggaacacttgaagaaatttctatttaccttgttaggccctgactgaaacatagcccaacctctyccccaccccttcattgaacttatgaagaaaccaagg

SEQ ID NO: 23487 - DNA, 566 bp, Homo sapiens
ctgagctcaagcaatccacccgcctcagcctcccamagtgctgggattacaggcatgagccactgtgcccaccccggattaattttaaaattaaaacttttagtatttataagccagaaggggaaaaataaaacaaaatcatggtcctcaagttgcaacataggaagagtgattgggaagggggtgtgaagtgttcgaagtgtaaggatcgatgaaactaatcggtaggtctactccatggtatcgacatgcctttgtgatcacagtgtgccacattttcatcttctacagtatagaaatcatacatcccctctcatcaagagcctagtctcttgatctttctccttctttaaaaaattaaattattaaaggaacagctgtcatagtttaaaaagtaaattagaactataggacttaaatgaaaaggcagtctctgctccacttgatttctccttaccagaggtggccactttaaatgatatcagctatttcttttagcagataacatgctcatgccattttacttgatattattttctcaattttagactttatttattttctac

SEQ ID NO: 23488 - DNA, 523 bp, Homo sapiens
gattttgctaacatgtatgcaaaatgttggcaagcttgtaaagtctttataagtctgartgtgtctttattttgccctctctcttgaatgagagttcacctcagtaaaagctccagattgtcagttaatttcactctgcactgagaaggtatcattacattctctttggcttccgttgttgttttccagaagtctgtgtcaatctaattgttgctcatttgtaggtaatctcttttgtgtctgttagcttttaagatgtcttcaagcttttctattctgcagtttcactacaaagtgtctagttacagatttgagtttatttatcctgctccctgcacagagtgtacttttgatctgaggttcattgtcttccttcagttgtggaaaattaagagctattatcttttcaaatattggtttctttcattctttttcgtcctttcttgtcctgagagaagctttggaatggtattgactggcttcaaattctgtctgcttattaactctttgacaaccagaagat

SEQ ID NO: 23489 - DNA, 549 bp, Homo sapiens
gtaataaattcaattgtctaagtaagagctattgagagtataaactaaacctgggttagatgaaatgaagaagaggaaacaaatcctagagaatcaaacacttttgagtacagagatacaggtgcatcagccctaagaaactaaacactttatcttgaatccacatttctggaaaatrtcacgtagtagttaggctatactaaatttagcaggagggctttttggaagtaaattatgtgttgaattgaatcatgataagtgtgagctgtttcaaaggtcttttcttactacagtggcatagactatttagttcaattacagaatcagaattaaccttaccaggtgtcttagcagatacaaagtcttggatctcagctagtggcaaaactgtggagactggatgccaattgaattactcactagcgccaccaagataagaaagtgtgtaatttaccaagtaaatattgattagaggtgttttgtaaaaataataattttttgaagacatttaaagatgctcctcaaagcaaagtgcaccagctatcaggt

SEQ ID NO: 23490 - DNA, 753 bp, Homo sapiens
gtgccatctgtaaatattgaataaatatttgtggaatacatgaatctaaaagtgaatggaatgataaagaggtaagatatcaggtgagggagtaagattttacagtacggtgactttactagaatgcaaactctatgagggctggaccttgatgagtattggttgcttcatctgtacaataaagaggcttgatttggtgaactctgaaatcattttggttataaacctcaatgactctgattctgaactgtcacagaaagatatgagcccagaataaaatatctagaacatatatatttaactcaatttttgtgacttcagttcagaatttaattaattttagttgggaatttagcaaacccacgtgatcatttagtgtctttattcttatattttgacagggaaaggrtcatgacatctactacagcatttggcacagacccaggtaaataagataaaacttctaagtcacttctcctcttcgagatcatggaatatattgtgtcagacctcagcaatcagctgtggactttttaaaaaggaaaatcagatatggatttattacctgagcatttgccgttgtcaaaatgtgtagatgttaccccattcactaggttttctcttgtaaggaagcatttctctaatggtgatcttccaaccacctgtcttagagtcactggggtgatgtttataatgaaactagcttcctcaccactagaccaaacgaattagcagttctagggatgtagctca

SEQ ID NO: 23491 - DNA, 1852 bp, Homo sapiens
cacaaattaatctctaaaaatacagccatagtacacctgtaacaatgactctgctactattttcccctaacaggatactaatggggagggtgtgacttgtcatttggtggtgttttttctcatccatcatcacttcaggtggagaaacgctgacagtgaggtcgattctcaccaacagcatttccctyggcccctaggacatggcgttttgaaaaacagttttcctggagttgttggacaagctggttggcagcatgtttagctcctcggtaactgctgaaggtaaagtgaattctcttggagcgggaaacatgccgtgatctattactaagccacactcactatacatgtatatatagagagaggtatgtataactgtacatatatactctgttcctaatgtgcaactttttaaaaagaacactatttcctgctaactagaacaaacaagctttaagtaaggttttaacaatattcttcaagatattatgttttccctcaatgaaatggcctgtgtgtttcagcaacatatagaggtttgttctggagtgccagagggaaaaggcattcccataaactcatgttctgcgaaggatgattacagatcctggcccagtctttctatctcctcaatgaggaagtcaatgtcagactgggtagcggctgggttggagatgaccatccggaagaagttggccttgtccccttggggctggtagccaaccatggtcgtacctgactccatcatcagggctttgatttttggagccaccttgtgatggaaaacacaaaacaaaactcaagattgatatgaacaccctctctttttaacaattcaacccaacttgcattttactatttgtgtttacattgacataaaagcaaagaaatatttcatatccaggaatcttcaggggctaatatcaaatgactacctggtcacaagttccctcagaaagtactgtgcaaccgaattttgaaagtcagtcatggaacaatgatagtaaaataaaaaatgaagacaaaaccaaaaaactcttatagacaacaccacaaattcagggttttgtataacccagagcccaggatactgcctggcacacagactgtgtttaacaaatatttgttgaatggttggatgaatgaaatgttatataaattaaatataatcttaagaaccctggataagatataaactggatatagaaaacagttagaatgaatcagcattacagtgggcctgaacttaaaatgttattgtaacagacacagtttaatctagaatgtccctaggaatatgcacattattcccttaccctgcatagggctcctttaatgaagaacatcaaccaaggacaaggagacaagatgcatcctttagaagttcccgtggtaaccacagtaagggggcgatgcaggctcaagaggaatataacaggatggctccccaccaccccattactagaaacccaccccaaggctttattttttatatttcccccactagaaaggcacattggaatgaggatgtcctgaccagccagagaaattgcagaggattagatgagacaaaaagcaagtccataccttgtgtagcttttcccgtcgttgagggctgtctggcacacccctgaggctttgtggaatataccaaaaacagacgtttgtgtgctcaggctgcagagattttaaaagacaaacaaagaaaattaggataacttgagagaaagctgttcccaaaccaatatgcatccttggtggaagtctcttggaccaaagaaagaggttgaatgttcatctcaaaggcaatgttacttccacaccagggagaacaatgcctcatttatccaat

SEQ ID NO: 23492 - DNA, 625 bp, Homo sapiens
tgcatgggagggctgcggtgattagaatcctcccacacaagggagccaggggctatttctggagggaagaaggggaaagcagagccaccaagctttttgttgctcccagcaccttttacatttatcactaaagcccaaaggacatgagaaggggggaaatacactataatagagctccacacttgggtataaagatgggattgtatccttttccatatctctttgcctacttcctgaattcctcctccaaatcctcaaagtccagagccaggagccagcactcatttgccagagggatgcaggatcagatggcacctgaactctgagactgctcctctcatcccagaacattgagctgtggaatttgccagacttgaaagaccaaacccatgtggcctcatgtagtgaggtcctgcccagctgaacctccactctgttgtccccgacgcctgcttaggcttctgactcactccctgagtctccccaccttgaagccccttccctctgggcagctgcaggaagcagaaactcggcttgaggttttgacacaggctctcccagagatgcgctcatgaggctgagaaacgatcrttatgccacagctttttttttttttttttgagac

SEQ ID NO: 23493 - DNA, 549 bp, Homo sapiens
gttttatggtaaactaaaaacatacctattgtgaacacacttaatttgttatatataggcagcaaaacaagtataaatgaaagatggctttcattatcttaatcctcaccttttgcagcttcaaatacattttaraaaaaaaagtaaagtaagaataaataaataataaagtaattttcctttgggttttgggaaaagatggactttcgttaaattcacattttgcactttctcaagtttcttcttatgtctgtttacatatttgtgtgatggctgactagggcttagaggtaacatatttaactatggaaaatttttctctgcacatccatatggcctagttaatacagttattgagttaaatttgcacacttactctaggaaaatcaagtctttttctaagaattccttttgcaggcatgtttctgtgtcctgtagacacagaaaaatataatttggagctggtgcaagcctactgaataacttcatatgggacctgtcataccttggaaactttgcactctgagccatgtaggtgcgtgcatggcc

SEQ ID NO: 23494 - DNA, 1250 bp, Homo sapiens
agtcacattttagagtgttcatcacatgccaggcacagtgctaagtgcttttacttaatttaccttcttaggtagctttttttgtttgtctgtttgtttgggacagagtctcgttctgtcgcccaggctggagtacagtagtgtaatcacagctcactgtagcctctgcctcccaggatcaagtgattctcctgcctcagcctcccgagtagctgggattacaggtacctgccatcatgcctggctaatttttctatttttagtagagacagggtctcaccatgttggccaggcttgtcttsaactcctgacctctggtgatccgcccgtcttggcctcccaaagtgctgggattacaggcgtgagccaccactcctggcccttcttaggtagcttttactgtaggcaaacagaggttagggaaggtgtcttaagtcctgtttcttgtgagtgacccagccaggatttgagtccaggctggctggttgaccccagagcttgtacttgccactgctccattagcaacaccagcatcatggcaggagaacactctcatggcctgtgctcttgccaatggacattgctggccagcactggatgaatcagggtgcatgaaaatccagtgactcagagcccagtgaggccctagagccatctatccccatcacataattggggttgaggattcttcagttttcagaatttagaaactcaacaggaatgtaccatctcccaacatacacacttaaaaaatattattttttatttctaaaaatagtttcaacttttgttttcaattcgggggcacatgtgtagttttttttacatgggtatatcttgtgatgctgaggtttgggacacaactgatcctgtcacctaggggctgagcatggtacccaatagttttttaactcttgtccttcttcttccctcccctctctggtagactcgtgtctattattgcatctttatgagtacctgatgtttagcttccacttataagtgagaacgtgtggtatttggttttctgttcctgtgttaattcacttaaaataatggcctccagctccatccacgttctgcaaaggacatgatttccttctttttcatggctgtgtagtattctatggtgtatatgtctcacattttctttatccaatccaccattgatgggcacctagtttgattccatgtctatgctattaacacacacttttaaatattctttatgggtatttttctttacacaa

SEQ ID NO: 23495 - DNA, 530 bp, Homo sapiens
ggtgcaatctcagctcactgcaagctccgcctcctgggttcacaccactctcctgcctcagcctcccgagcagctgggactataggcgcctgccaccacactcggctaattttttgtatttttaatagagacaggtttcaccgtgcttgccaggatggtctcgatctcctgaccttgtgatccgcctgcctcggcctcccaaagtgctgggattataggtgtgaaccactgcacctggcctccaatgttctattattgtaaataaaactgtgataaacatcttgatgcatgagtctgcttttgaattagtttcttaatatttctatatatgtaattattggtgcaaacmatgtgaacattttaaaaaagtattacatattgccaaactactgtctagaaatgttttgctggttgcatatgttgaacagggtggatctgctgtaaatgtatttgttttccaatctgtttcccagctatatcctgtaacacttcataagtgctaggaaaaaaaaagtttaatttgaggttgt

SEQ ID NO: 23496 - DNA, 575 bp, Homo sapiens
gtgtccagccctatggcggggtgatttggggtcacattactgcccactcatgagaatcacattgtgagagtagggtagcaatgccggacaggataacatacaggacagcagaataaaaaatctccctctccctgcagaaaattaactacaggctagggttttgctcaccataaccaaaggcaytgggggtcaaacacgttactgtgattgctgaattgaatcctttggtcctgtgcatgggtgcactggctcacactcacccatgtgcacatctgtctgtgtaggagatcctttttgtgtctcagaactgctagtatgcctctctccattgagattggttcggcgacacatggagctggcccagcaagaggttctaacatcagtgactacagctaaaaagaaccagggcagacaaaggctaacagtcaatctttcctctgaatcttggaattggaaagggctctagtgactgtccaatccacttgttttgattaaataaattgtcctttggccttgcatcacagctactaccctccctacaacctgtcctgtatctttttattctactatgttga

SEQ ID NO: 23497 - DNA, 927 bp, Homo sapiens
gaggccactccctgggcctctgagtgcatctgccatcagtgggaaagggtgtgaaatctgccttgggagttacagggaggtcctcagcgtagacacgagccacggctgacacacactcaggagaacacttacaaagcaaactgaaaggaaattatgggacgctcatatgatggatgattacacatccattaaaatggtgtttacagagagtttttaaatgacgtggaaatgccgatgacatagtattgcacaaaaaagctataaaatttatatacgctgtgaatcatattagaattagaatcacctggggagctcttagagaagaccaactcccaggccccacctcagaccaagtaaatcagaggctctgagggtggcgcctggacatccctgtcttttaaaaccccccaggtgattatgatatgcaggttgggttgagagtgattgcagtaaagcagtattcatggaaggaaagaaattctccacactttcaccagtggttttctctggtagaggagttatggggtgggttgaaatctgtgccttaattatttgtgagttatccacggttktgcagggagcataggagctatgatgagaacaggggtctcttccagcaggtaaaaatggacagtgctggagacccaagtcgaatctcttctctgcaacactcttccctgcctgccttcttgtccccagtccttgggattctgttaatttggggatttatttcatgctcttggtgatgaggccattatgcctattcagattgtttatcagaaaagccaacaaccaaaaacaacctatttgagacaaagtgggaggcccagcatggcgcccactgcaattgctcatatgggtgtgacctgagttcacagggtcgccagagtctggcagcttgggatgcatggtatgcagaaggctgct

SEQ ID NO: 23498 - DNA, 1192 bp, Homo sapiens
gagactctgtctcaaaaaaaaaaaaaaaaaaaaaattgtagaataccagcctgatagaggaaatcatcttaatatgttaagtgaaaaagtgaataaatgagcttatacattatggtgctaattagggacaaagcttatctctgcacagaaaatacctgggaagatgtataccaaaatggtagcagtgatttttctctgaggagagagtgtatagtgatttttttcttctttgagctgttctatttttgtaaactcttgttctaggcaaagtttcttcaaatgtctatcaccattattatatttttttaaaaaaagagtttaagaaataatgtcaataattttatctaagaactgagactaatggtgagtgagagatacgtaaatgagaagaaaattggaaaattgactttttccagaacttcagttattattacaatctgcaaatgttacaaatgcttttgttaaatgcttacttccttagtcaccttctaattagaatggtgatagattagtttctattacagacaatgaagttagtaacacttgatgctagatctttacagatgtagatgcttctccttggatgcacgttagcagtttagtctgcatttgctttttaagggtgttatttcgtataccatgtaagtaattttgtgtcactgtagtataattgaaaattttctatgtttgctgaacttttacctccctctacataaagctatcactggccctgtttctgtttgatcaaccatggccttaaaaaagcaaacaaaaaccatagactctgaaggcagcaatcctgtgctttgccacttactagctctgatacctcaggccaattatctagacactctgagcctcagtttacccgcagttataaagggaagcacagccagctacacaggtggttgtagttgtgatgaaacccttcagccatatgagaaagtatatgagcaagtaggacattcttcgtaaaatgtggaatggtagtttgatgtaataacagtatttttccttctctctcctcaacactgtgcatcatttatctrtatatgagaactcaaaatggtttatctcaagaatagcaattgcccctgtttaagaaaaagtagccctaagcttgaggaagttccgttcagaagctgcaaaatccttttcttgggatgtaattcaagtgatatgactgtatcta

SEQ ID NO: 23499 - DNA, 544 bp, Homo sapiens
gattgtttgactaaatggtaacctgaagttgatagcatttcaggacaattttactctgagatattacaccaggcttttattgatataacaagagttttatttgatttttatttataactgattatcttaattgatttatattacgttttttgttttttgtttttaagacagtgtcttgctgtgtcacccaggctggagtgcagtggggtgatcttgtctcactgtagcctccgcctcccaggttcaagtgattctcctgccttggcctcccaagtagctgggactatagatgcccttcaccacaccgggctaatttttgtatttttaatagagacggggttttgccatgttggccgggcttaagaccacttaagttttsccacttaagaccaaactccaggtcttaagtgatccacccaccttggcctcccaaagtgttgggattacaggcgtgagccatcgcacctggccaaatttataatcggttcctagtagatgttttatggggaaagtagtggccagaaatttttttttttaagtaagg

SEQ ID NO: 23500 - DNA, 387 bp, Homo sapiens
tgcggcgtctcaggggccacgcctgcctcccccgccgccgcgcgcatacacagaattcctcatgctgctgctatcacggaactcagggtacgggtgcaccccgcaagcccactcctccacagtcttcttgttctccctgtgctcttgttcactcttttttgggtcacgtggacagactgggactccactrttttgtgaagtgcatctctgattttatctcttcccctctcccctaatcagggtttggctgactttgtctactaggagcagagaacaaagtgtgacttgaaccatgcacatcaaacgtgtcctccatttgtttaatttccttttcatgagacccttctcccgggtttgtaggaatggtgtgtgggttgagtttgtttc

SEQ ID NO: 23501 - DNA, 731 bp, Homo sapiens
ataaagaaaatgtggtacatatacaccatggaatattatgcagccataaaaaggaatgagatcatgtcctttgcagggacatggatggagcattttccctttttttttaactgcctttttctcttttttctcccatacacaagactgttaaaacaagtggctcaaagataagttttgctttctattacaccacaacgtttctcaaaatactgtttctagaactcatctgagcttctatatctgtggtttccaaacttcaatatgctgcagaatcataggggggcttattaacacagactttgagtcctattccaccaaagttgtagattcagtagttggggatgcacacragaatttgcatcttcaacaagctctcaggtgatgctggtgccactgacctgggataacacactgaaaaccatgttgcatagaaatgtgcatgttctttgctttagatgtcttgcttgtataccaccagctatgctttcatgaagtttatttacttccattacatctgtatggtgtaaataccacataacagtatttttctgagcatctcttcccaactacctgttcagtgacatcaccttgataggttgaaatcagccaaagcaggatgtttatagcatggaaatcagcaaatgccagaaagtcagggttcccctactacctcccacaagagacagttgttaaacatttactaacacactgttgattacacaaaaccatca

SEQ ID NO: 23502 - DNA, 731 bp, Homo sapiens
ataaagaaaatgtggtacatatacaccatggaatattatgcagccataaaaaggaatgagatcatgtcctttgcagggacatggatggagcattttccctttttttttaactgcctttttctcttttttctcccatacacaagactgttaaaacaagtggctcaaagataagttttgctttctattacaccacaacgtttctcaaaatactgtttctagaactcatctgagcttctatatctgtggtttccaaacttcaatatgctgcagaatcataggggggcttattaacacagactttgagtcctattccaccaaagttgtagattcagtagttggggatgcacacaagaatttgcatcttcaacaagctctcaggtgatgctggtgccactgacctgggataacacactgaaaaccatgttgcatagaaatgtgcatgttctttgctttagatgtcttgcttgtataccaccagctatgctttcatgaagkttatttacttccattacatctgtatggtgtaaataccacataacagtatttttctgagcatctcttcccaactacctgttcagtgacatcaccttgataggttgaaatcagccaaagcaggatgtttatagcatggaaatcagcaaatgccagaaagtcagggttcccctactacctcccacaagagacagttgttaaacatttactaacacactgttgattacacaaaaccatca

SEQ ID NO: 23503 - DNA, 805 bp, Homo sapiens
aaaatagttttttagttttctaaaaagttaaatatacatctactatatgagccagtaatcctatttttaagaattaacccaagagaaataaaagcatatgtctataaaaaagacttgtgtaggaactcagaacagctttatttgtaatagccaaaaccaatatccatcaaaaggtaactgtataaacaaacggagatgtatccatacaatgaaatattatccagtaataaaaagtaatgaactattcataacatggatgaatttcaaaatagctatgctgatgggaaaaaaagccacacaaaagactatatatcatgtgactccattcgtattaaactctgaaaaatgtaaaccattctttagtgtcagaaagmcaatcagtggttgcctggaggataaggaagagaggaacttcaggtaggaagaaggttctagaggtaaagactgtgttcactctgttgattgtgatgagagtttcatacacggaaataaattatatatttaaaatatgttcagtttattgtatataaattgtatcttaataaacttaattaaaaaaagattttgattcatggccataatatcaaggaaaacctgagtcctgtctaaaaatcagatgtactatgtcatgggctaatcaggcttggatggggtacctggcagaggtttcactacccaagatgatgaagatgctaagatctgaagcccttttgttataattacgtggtctagcttgttttgcttttcctcacttattcgtaactcattatctggtaacctaaatgtatagtgactggctggatcc

SEQ ID NO: 23504 - DNA, 805 bp, Homo sapiens
aaaatagttttttagttttctaaaaagttaaatatacatctactatatgagccagtaatcctatttttaagaattaacccaagagaaataaaagcatatgtctataaaaaagacttgtgtaggaactcagaacagctttatttgtaatagccaaaaccaatatccatcaaaaggtaactgtataaacaaacggagatgtatccatacaatgaaatattatccagtaataaaaagtaatgaactattcataacatggatgaatttcaaaatagctatgctgatgggaaaaaaagccacacaaaagactatatatcatgtgactccattcgtattaaactctgaaaaatgtaaaccattctttagtgtcagaaagacaatcagtggttgcctggaggataaggaagagaggaacttcaggtaggaagaaggttctagaggtaaagactgtgttcactctgttgattgtgatgagagtttcatacacggaaataaattatatatttaaaatatgttcagtttattgtatataaattgtatcttaataaacttaattaaaaaaagattttgattcatggccataatatcaaggaaaacctgagtcctgtctaaaaatcagatgtactatgtcatgggctaatcaggcttggatggggtacctggcagaggtttcactacccaagatgatgaagatgctaagatctgaagcccttttgttataattacgtggtctagcttkttttgcttttcctcacttattcgtaactcattatctggtaacctaaatgtatagtgactggctggatcc

SEQ ID NO: 23505 - DNA, 1186 bp, Homo sapiens
tggatcccagctcagcgtactttccaccattcgccctgactttggcctgagttggagacagctgtggctggaaaaggctttggggccctctagctccctcttcattttccagtagaggaagccgaggctcaagttggggaggagatccagggtcatggaatagcaggtgagtgtcaggtgycagggcacgcaaggaccaaggttcctgactcccaggcaatgttcctctcgcagttccaggcagcctctcctgtcagtggaaaggccaagcgtatgtgaacagaaactcaaggtcgtaaactgtgtgctgtcccgtgatatggtagctgtggcaacagcttcagaatgattaatgctaaaagtgattggtctaatggtggtgggaggtgaaggggcctgggggtactgagtagaggtgtttatgaggctcccactatgagggggagggctgcttaacttctgcgtgtcattgtcttctctgaaactgggaggccaactaagaaaaacagatgtcaatggcccagttagtgggatttgatgctcaaacggaaccttctggtgtttctcagactcaagtcaccagtgctgctgttttatccattttcaaaatattggagagggagagggctgctgttatgtacacattacttgtcatggaacattgaaaaaccctgcagtctaattttcttctgctttcagtagcatggctgatggggcagtagaacaggcccctttttagagaaatgtctggaggtgagatcgtttgttaggaccaagttggtctgaatgcaaactctgttcccaacgggtggctgaaggcctttgtcagcctttgctttttttttttttttttaatttatttttttattgataattcttgggtgtttctcacagagggggatttggcagggtcatgggacaatagtggagggaaggtcagcagataaacaagtgaacaaaggtctctggttttcctaggcagaggaccctgcggccttccgcagtgtttgtgtccctgattacttgagattagggattggtgatgactcttaacgagcatgctgccttcaagcatctgtttaacaaagcacatcttgcaccgcccttaatccatttaaccctgagtggacacagcacatgtttcagagagcacagggttgggggtaaggtcacagatcaacaggat

SEQ ID NO: 23506 - DNA, 1186 bp, Homo sapiens
tggatcccagctcagcgtactttccaccattcgccctgactttggcctgagttggagacagctgtggctggaaaaggctttggggccctctagctccctcttcattttccagtagaggaagccgaggctcaagttggggaggagatccagggtcatggaatagcaggtgagtgtcaggtgtcagggcacgcaaggaccaaggttcctgactcccaggcaatgttcctctcgcagttccaggcagcctctcctgtcagtggaaaggccaagcgtatgtgaacagaaactcaaggtcgtaaactgtgtgctgtcccgtgatatggtagctgtggcaacagcttcagaatgattaatgctaaaagtgattggtctaatggtggtgggaggtgaaggggcctgggggtactgagtagaggtgtttatgaggctcccactrtgagggggagggctgcttaacttctgcgtgtcattgtcttctctgaaactgggaggccaactaagaaaaacagatgtcaatggcccagttagtgggatttgatgctcaaacggaaccttctggtgtttctcagactcaagtcaccagtgctgctgttttatccattttcaaaatattggagagggagagggctgctgttatgtacacattacttgtcatggaacattgaaaaaccctgcagtctaattttcttctgctttcagtagcatggctgatggggcagtagaacaggcccctttttagagaaatgtctggaggtgagatcgtttgttaggaccaagttggtctgaatgcaaactctgttcccaacgggtggctgaaggcctttgtcagcctttgctttttttttttttttttaatttatttttttattgataattcttgggtgtttctcacagagggggatttggcagggtcatgggacaatagtggagggaaggtcagcagataaacaagtgaacaaaggtctctggttttcctaggcagaggaccctgcggccttccgcagtgtttgtgtccctgattacttgagattagggattggtgatgactcttaacgagcatgctgccttcaagcatctgtttaacaaagcacatcttgcaccgcccttaatccatttaaccctgagtggacacagcacatgtttcagagagcacagggttgggggtaaggtcacagatcaacaggat

SEQ ID NO: 23507 - DNA, 1186 bp, Homo sapiens
tggatcccagctcagcgtactttccaccattcgccctgactttggcctgagttggagacagctgtggctggaaaaggctttggggccctctagctccctcttcattttccagtagaggaagccgaggctcaagttggggaggagatccagggtcatggaatagcaggtgagtgtcaggtgtcagggcacgcaaggaccaaggttcctgactcccaggcaatgttcctctcgcagttccaggcagcctctcctgtcagtggaaaggccaagcgtatgtgaacagaaactcaaggtcgtaaactgtgtgctgtcccgtgatatggtagctgtggcaacagcttcagaatgattaatgctaaaagtgattggtctaatggtggtgggaggtgaaggggcctgggggtactgagtagaggtgtttatgaggctcccactatgagggggagggctgcttaacttctgcgtgtcattgtcttctctgaaactgggaggccaactaagaaaaacagatgtcaatggcccagttagtgggatttgatgctcaaacggaaccttctggtgtttctcagactcaagtcaccagtgctgctgttttatccattttcaaaatattggagagggagagggctgctgttatgtacacattacttgtcatggaacattgaaaaaccctgcagtctaattttcttctgctttcagtagcatggctgatggggcagtagaacaggcccctttttagagaaatgtctggaggtgagatcgtttgttaggaccaagttggtctgaatgcaaactctgttcccaacgggtggctgaaggcctttgtcagcctttgctttttttttttttttttaatttatttttttattgataattcttgggtgtttctcacagagggggatttggcagggtcatgggacaatagtggagggaaggtcagcagataaacaagtgaacaaaggtctctggttttcctaggcagaggaccctgcggccttccgcagtgtttgtgtccctgrttacttgagattagggattggtgatgactcttaacgagcatgctgccttcaagcatctgtttaacaaagcacatcttgcaccgcccttaatccatttaaccctgagtggacacagcacatgtttcagagagcacagggttgggggtaaggtcacagatcaacaggat

SEQ ID NO: 23508 - DNA, 1186 bp, Homo sapiens
tggatcccagctcagcgtactttccaccattcgccctgactttggcctgagttggagacagctgtggctggaaaaggctttggggccctctagctccctcttcattttccagtagaggaagccgaggctcaagttggggaggagatccagggtcatggaatagcaggtgagtgtcaggtgtcagggcacgcaaggaccaaggttcctgactcccaggcaatgttcctctcgcagttccaggcagcctctcctgtcagtggaaaggccaagcgtatgtgaacagaaactcaaggtcgtaaactgtgtgctgtcccgtgatatggtagctgtggcaacagcttcagaatgattaatgctaaaagtgattggtctaatggtggtgggaggtgaaggggcctgggggtactgagtagaggtgtttatgaggctcccactatgagggggagggctgcttaacttctgcgtgtcattgtcttctctgaaactgggaggccaactaagaaaaacagatgtcaatggcccagttagtgggatttgatgctcaaacggaaccttctggtgtttctcagactcaagtcaccagtgctgctgttttatccattttcaaaatattggagagggagagggctgctgttatgtacacattacttgtcatggaacattgaaaaaccctgcagtctaattttcttctgctttcagtagcatggctgatggggcagtagaacaggcccctttttagagaaatgtctggaggtgagatcgtttgttaggaccaagttggtctgaatgcaaactctgttcccaacgggtggctgaaggcctttgtcagcctttgctttttttttttttttttaatttatttttttattgataattcttgggtgtttctcacagagggggatttggcagggtcatgggacaatagtggagggaaggtcagcagataaacaagtgaacaaaggtctctggttttcctaggcagaggaccctgcggccttccgcagtgtttgtgtccctgaktacttgagattagggattggtgatgactcttaacgagcatgctgccttcaagcatctgtttaacaaagcacatcttgcaccgcccttaatccatttaaccctgagtggacacagcacatgtttcagagagcacagggttgggggtaaggtcacagatcaacaggat

SEQ ID NO: 23509 - DNA, 1186 bp, Homo sapiens
tggatcccagctcagcgtactttccaccattcgccctgactttggcctgagttggagacagctgtggctggaaaaggctttggggccctctagctccctcttcattttccagtagaggaagccgaggctcaagttggggaggagatccagggtcatggaatagcaggtgagtgtcaggtgtcagggcacgcaaggaccaaggttcctgactcccaggcaatgttcctctcgcagttccaggcagcctctcctgtcagtggaaaggccaagcgtatgtgaacagaaactcaaggtcgtaaactgtgtgctgtcccgtgatatggtagctgtggcaacagcttcagaatgattaatgctaaaagtgattggtctaatggtggtgggaggtgaaggggcctgggggtactgagtagaggtgtttatgaggctcccactatgagggggagggctgcttaacttctgcgtgtcattgtcttctctgaaactgggaggccaactaagaaaaacagatgtcaatggcccagttagtgggatttgatgctcaaacggaaccttctggtgtttctcagactcaagtcaccagtgctgctgttttatccattttcaaaatattggagagggagagggctgctgttatgtacacattacttgtcatggaacattgaaaaaccctgcagtctaattttcttctgctttcagtagcatggctgatggggcagtagaacaggcccctttttagagaaatgtctggaggtgagatcgtttgttaggaccaagttggtctgaatgcaaactctgttcccaacgggtggctgaaggcctttgtcagcctttgctttttttttttttttttaatttatttttttattgataattcttgggtgtttctcacagagggggatttggcagggtcatgggacaatagtggagggaaggtcagcagataaacaagtgaacaaaggtctctggttttcctaggcagaggaccctgcggccttccgcagtgtttgtgtccctgattacttgagattagggattggtgatgactcttaacgagcatgctgccttcaagcatctgtttaacaaagcacatcttgcaccrcccttaatccatttaaccctgagtggacacagcacatgtttcagagagcacagggttgggggtaaggtcacagatcaacaggat

SEQ ID NO: 23510 - DNA, 1044 bp, Homo sapiens
acagtcgcatagaaatttagaaacttattcctcagattacgtaggacagggcttgggtctggcttctttgtcctaaacagtttactgggatggggaaagacagatcttttaaccctttcctggggagaggcctaagrgtgtggaggctggaccccggacccagggtcctgcgggttcccattctgctgagaacagtgagggtgtgatgaggatggtctccgtaggggtaagaatcctggggagtgggagggaccatttcttttatgggctgtgccctgccctcccttctcatatccttggtgagaggtgtgctggcctccatgggagggttttgcccagaggtggagagttggagaatgagtgtccttgctcagcaaggtcagaccagaggcccagggatttgcaggtggtactaggaaagccatgttttcttgctccaagtggctcctgacagcagaagcaggcctgggggctgaacccaggtaatacagtattgtagttaagaatgctggcacttacttgctgggtgactttgggccagttacttaacccttctgaacctctatttcctcatctgtgcaatgggtctaacattactgcctaccttatagggctataaagatgaaataagataatatataaaaatatgagcggcaggtactgttgttaataacaatgataagaaaactatttataaaggatggaaagtagggaagtgtgttcatgctgaatacaatgttaggagtgtccctacacagaatctgttacatcttgagggagggagctctctgtcactggaggcatccaagtaaaagctagaggtctcctaactggggaggttgtcaaagtataatgcctcagactgggacgagcacgatgatcttgaaaggtctgtagcccatgattgtgggccagaaggagggggtgggctggaaggcagtggcttcattctggaaactgtatccctcatatgagacactgagccctggaggccacgtggagtcactaggctgtggggcagggaatgctaggtttgaaggatcc

SEQ ID NO: 23511 - DNA, 752 bp, Homo sapiens
ctggactcccttgccagccatgctacgatgcacacagatgtgggattatgccaggatgacccagccctgcccaacctccctccaggctccatttccaagactgccttaaagagagcaggctccctgcatgtaacatctggggtctgacagtgaggagacaactgtctttatctctcctcacttgccatcctgcaggcttttaagcacaaatgaggagctaatcccaggatggaaggtgccttgcccttgcccaggctcctaaagacaccagaatggtgtcacgctggcttggcagcagatgtagcgagctaaggggacaagtggggtgggcaggggttgccaccgcacagagtggggctcaccaggatggcaatggcttcaggcaggggcccgctggtcttgaggctttccttggcatcctccaccgcatcctcccactccaggcccatggcggtgaaggtccggcttgtggcttccttgcccttggggttgaggatgaagctgccggtgacctggttcttcaccactgaccggtggggggagagggtcacacagatttctgctcctctccacagggggcgggccatgaatatgaaattcaaggccttcccagtgagccttctgggctcctgtccaccggcctttccttcccacccaagccctcccgagtcagacaggtcaacacgctccctgtcaaacccacgtgcgygcacacacacacacacacacacacacacactcttgctgcctct

SEQ ID NO: 23512 - DNA, 583 bp, Homo sapiens
atcccagctcagcaatactagctacgtgtggctactttagcttgctgagcctcagtttacccacctgttaggtgggactgctctcatatctatacaggccttagcacagggccaggcaataagggagggctcaactagaggcaactcccttcccttttcctacagggtagcatgaaaaaaatgcacaaagctctctgggcaaagttcatctcccaagagatgaactcagtggctctcaaccttggaatcacctggggagattttacaacttcagatgcctgatcttcaccccagaccaactgagtcagaatcactaggggtaggaacttttggaggcactataatgaggtgtaatttacgtactatagaattcactcatttcaagtatgcaatgcgatgacttttcataaattcgcaaagttgtccaatcgtcaccacaatccaatttgagaatatttttatcacctcaaaaatattctccrtgctcatctgcagtcacttcttgttctataggaggggttttaaaactaccaggatgattccaatatgcagcccagatagagaaccactgatgaactgtctc

SEQ ID NO: 23513 - DNA, 1519 bp, Homo sapiens
cagcatccctaatccaaaaatctgaaatccgaaatgttccaatgagcatttcctttgactgtcacatcagtgctctaaaaagttttggattttggagtatgttggatttcagattagtgctaaattatatttgctaattgatattctgtgtattgttttcttactggtgaaaagacaaattgaactcaggaaagaaaaattacaaatatatagtcaaagagtcaccagatcatttgagcaacataatgagtttttatttcttaatatacagggtttaatttgttaaccacaccagaaaaagaaatgttcaaacagtcgactttctacttgaaattaaaatggaaattagcccttaggaaacagtgatgactttaagtttatacatcagtggctggttcatgaattattaactgattttaatgatcctggctatattttatttgaagttattctcctacttgcaacgacttttgaacccacaaaactctttcatccattctccacagacacagtacactttcatgagcactgacatttgaaaaggatccatatactcacagaatgtaaagataatacacatgcatataattgatacaaaggactctggtcatttgttaaagagagtaatgaatgaaaccctattattcacggtttgtaaataaatttaaagataagcgctaactttcacttgttaagcctagagccaagagttcggtgtttcttctaaagtttcccagatggtcattaaaacaagagagggaagaaacatactttctttgaaatccatcatttcccatccagaaagataatacatgtcatcaaaagttaagtctttagagattaattaataatgtgagtattttcaaataaaataaatgcatgtctttatatgctagtttttacattttcagtataaacctatattgaacagcaccacttcagacacacaaattagctgtgaaacaaaatgctataaacctttaattagcacttgctgctttatacccataaagttaatacttcctcttctactatattctctgtaaaggaaaattatgggaaataaaattgtgtttttcacttccgaaaataaaagtagcaaaatatagtattgtggctcagtttaaagatagttatatttttacttgcaaggaagtcaatacaaagatcccttacaataagtataatttgattcctaccaatattaagcgctatgtctaactttcataacttgggtacacagagcactgatgacgatcagattgctaaataagtaagaaagcaagttatttcaggcaaatagctgcattaagaaaatacgacagtaagccaacttgyatccacactcctgaagctgaacaagcatctcaataaataatgtctgttttcaagctttatataccctccctgaaataaatgttctgagcttaaatagactcaaaatagcctttctcagaaaataaaaaagagacacacacaaaacacccccaatttcctctggtcccttgaagtacccttg

SEQ ID NO: 23514 - DNA, 553 bp, Homo sapiens
gggactaggatttgaaaaaggcctgaggtcagaagaagaatgggaagaccaaggacttgggagcagctgagtaaaagggagctcagtgagagatgacactggagaggcaggcagggccttgttagggcttgggacagccctgcccactgcccagatggtgatggccaccctatccctgggaggtgccagcttacrcattttgttaccctgtcaccataactacctttgagctcatcagaaaattcatgccaatttttctttctgatactgtggcccccatagctaaactactattgccccgtgagagcggggaccatatattcccagtctctatcatccccctagagcctgcaggagcccattgaatgtttttggagtggagttgcctgccttgcattgacattccctaggaacaaagacagcagtgttcatgcttcacccatttctgcctcccgcatgagcccagcatgtcttctctttcttacttagccagccctccaaggtttgttttattggagtttgcaataatgtccttgaagcagagcaagattct

SEQ ID NO: 23515 - DNA, 553 bp, Homo sapiens
gggactaggatttgaaaaaggcctgaggtcagaagaagaatgggaagaccaaggacttgggagcagctgagtaaaagggagctcagtgagagatgacactggagaggcaggcagggccttgttagggcttgggacagccctgcccactgcccagatggtgatggccaccctatccctgggaggtgccagcttacgcattttgttaccctgtcaccataactacctttgagctcatcagaaaattcatgccaatttttctttctgatactgtggcccccatagctaaactactattgccccgtgagagckgggaccatatattcccagtctctatcatccccctagagcctgcaggagcccattgaatgtttttggagtggagttgcctgccttgcattgacattccctaggaacaaagacagcagtgttcatgcttcacccatttctgcctcccgcatgagcccagcatgtcttctctttcttacttagccagccctccaaggtttgttttattggagtttgcaataatgtccttgaagcagagcaagattct

SEQ ID NO: 23516 - DNA, 553 bp, Homo sapiens
gggactaggatttgaaaaaggcctgaggtcagaagaagaatgggaagaccaaggacttgggagcagctgagtaaaagggagctcagtgagagatgacactggagaggcaggcagggccttgttagggcttgggacagccctgcccactgcccagatggtgatggccaccctatccctgggaggtgccagcttacgcattttgttaccctgtcaccataactacctttgagctcatcagaaaattcatgccaatttttctttctgatactgtggcccccatagctaaactactattgccccgtgagagcggggaccatatmttcccagtctctatcatccccctagagcctgcaggagcccattgaatgtttttggagtggagttgcctgccttgcattgacattccctaggaacaaagacagcagtgttcatgcttcacccatttctgcctcccgcatgagcccagcatgtcttctctttcttacttagccagccctccaaggtttgttttattggagtttgcaataatgtccttgaagcagagcaagattct

SEQ ID NO: 23517 - DNA, 553 bp, Homo sapiens
gggactaggatttgaaaaaggcctgaggtcagaagaagaatgggaagaccaaggacttgggagcagctgagtaaaagggagctcagtgagagatgacactggagaggcaggcagggccttgttagggcttgggacagccctgcccactgcccagatggtgatggccaccctatccctgggaggtgccagcttacgcattttgttaccctgtcaccataactacctttgagctcatcagaaaattcatgccaatttttctttctgatactgtggcccccatagctaaactactattgccccgtgagagcggggaccatatattcccrgtctctatcatccccctagagcctgcaggagcccattgaatgtttttggagtggagttgcctgccttgcattgacattccctaggaacaaagacagcagtgttcatgcttcacccatttctgcctcccgcatgagcccagcatgtcttctctttcttacttagccagccctccaaggtttgttttattggagtttgcaataatgtccttgaagcagagcaagattct

SEQ ID NO: 23518 - DNA, 553 bp, Homo sapiens
gggactaggatttgaaaaaggcctgaggtcagaagaagaatgggaagaccaaggacttgggagcagctgagtaaaagggagctcagtgagagatgacactggagaggcaggcagggccttgttagggcttgggacagccctgcccactgcccagatggtgatggccaccctatccctgggaggtgccagcttacgcattttgttaccctgtcaccataactacctttgagctcatcagaaaattcatgccaatttttctttctgatactgtggcccccatagctaaactactattgccccgtgagagcggggaccatatattcccagtctctatcatccccctagagcctgcaggagcccattgaatgtttttggagtggagttgcctgccttgcattgacattccctaggaacaaagacagcartgttcatgcttcacccatttctgcctcccgcatgagcccagcatgtcttctctttcttacttagccagccctccaaggtttgttttattggagtttgcaataatgtccttgaagcagagcaagattct

SEQ ID NO: 23519 - DNA, 680 bp, Homo sapiens
aaacaaaacaaacccattagccactccctacctttcagaatcccctgaaagattaggagggccatgcaggatctttccatgcttgggactgggatcatgccaacttattttggttcttaagagacagaaaacttcagccgacatctgggtcaaagtcaaatgccacagttagaagagttggtccttccggtcttctctaacatgaactttctgatccagtttcttcacaaacatttaaacaataattggctaacactttagttttgagaacatcattttaagmaaacaatcaagcctctcagcacattttcttcctaaataccctaaataaatgtacttcatagtatggcttatacagcaaaataatttgtctagtgaatgaagccccagtgttgaaatatcagcaaggtgatctctgggcttggccttactttgtttgtattatcagcattctgagagtgttggacgtctggttgcctgcaagaacaaggaggaatgctaccaattaccaggaaacccaattgtcagaaatgccttgctcttcagaactgctggtgacaagggggagaattacagcacccacagaatattactaaacattgttcagaacaaattatagtatccaacattaactgcctctggctgggaccacagacagtggttgcattgggaatatttcc

SEQ ID NO: 23520 - DNA, 680 bp, Homo sapiens
aaacaaaacaaacccattagccactccctacctttcagaatcccctgaaagattaggagggccatgcaggatctttccatgcttgggactgggatcatgccaacttattttggttcttaagagacagaaaacttcagccgacatctgggtcaaagtcaaatgccacagttagaagagttggtccttccggtcttctctaacatgaactttctgatccagtttcttcacaaacatttaaacaataattggctaacactttagttttgagaacatcattttaagcaaacaatcaagcctctcagcacattttcttcctaaataccctaaataaatgtacttcatagtatggcttatacagcaaaataatttgtctagtgaatgaagccccagtgttgaaatatcagcaaggtgatctctgggcttggccttactttgtttgtattatcagcattctgagagtgttggacrtctggttgcctgcaagaacaaggaggaatgctaccaattaccaggaaacccaattgtcagaaatgccttgctcttcagaactgctggtgacaagggggagaattacagcacccacagaatattactaaacattgttcagaacaaattatagtatccaacattaactgcctctggctgggaccacagacagtggttgcattgggaatatttcc

SEQ ID NO: 23521 - DNA, 680 bp, Homo sapiens
aaacaaaacaaacccattagccactccctacctttcagaatcccctgaaagattaggagggccatgcaggatctttccatgcttgggactgggatcatgccaacttattttggttcttaagagacagaaaacttcagccgacatctgggtcaaagtcaaatgccacagttagaagagttggtccttccggtcttctctaacatgaactttctgatccagtttcttcacaaacatttaaacaataattggctaacactttagttttgagaacatcattttaagcaaacaatcaagcctctcagcacattttcttcctaaataccctaaataaatgtacttcatagtatggcttatacagcaaaataatttgtctagtgaatgaagccccagtgttgaaatatcagcaaggtgatctctgggcttggccttactttgtttgtattatcagcattctgagagtgttggacgtctggttgcctgcaagaacaargaggaatgctaccaattaccaggaaacccaattgtcagaaatgccttgctcttcagaactgctggtgacaagggggagaattacagcacccacagaatattactaaacattgttcagaacaaattatagtatccaacattaactgcctctggctgggaccacagacagtggttgcattgggaatatttcc

SEQ ID NO: 23522 - DNA, 680 bp, Homo sapiens
aaacaaaacaaacccattagccactccctacctttcagaatcccctgaaagattaggagggccatgcaggatctttccatgcttgggactgggatcatgccaacttattttggttcttaagagacagaaaacttcagccgacatctgggtcaaagtcaaatgccacagttagaagagttggtccttccggtcttctctaacatgaactttctgatccagtttcttcacaaacatttaaacaataattggctaacactttagttttgagaacatcattttaagcaaacaatcaagcctctcagcacattttcttcctaaataccctaaataaatgtacttcatagtatggcttatacagcaaaataatttgtctagtgaatgaagccccagtgttgaaatatcagcaaggtgatctctgggcttggccttactttgtttgtattatcagcattctgagagtgttggacgtctggttgcctgcaagaacaaggaggaatgctaccaattaccaggaaacccaattgtcagaaatgccttgctcttcagaactgctsgtgacaagggggagaattacagcacccacagaatattactaaacattgttcagaacaaattatagtatccaacattaactgcctctggctgggaccacagacagtggttgcattgggaatatttcc

SEQ ID NO: 23523 - DNA, 564 bp, Homo sapiens
tttttttctttaacattttccaatttaagtatgacccaatgcaatcaaagacagatgaaagaagtaaaaacatttgaggatcttctcaaatcctatcaatgggagaaatagtctcaactatcatgatccatacatgttactgtgatgatgtgaatgattgtttagcacgtatttccttccctcattcttgagttctaggcactgcacgtttcctatcccactgatcttgggctagactatgttacctgctttgatgagtagaagattggtggacatgagactagcagaaaccttatgggtctyttgtgcatcctggcttggcctttgtgcttctgccttgcgtaatgaggttgggggtagccattagtccaagaaggatgtggggagcacatctgactccaacccacaaggcaagttgcaaccaacccacaaacgcgtgggtgacaaaccaatgtgcgttattttaagacactgagttttggagtgccttcttatgtagcgttaccacagcaatactaactaacatactactttatcatgtaaagtaacatcctttatcattca

SEQ ID NO: 23524 - DNA, 647 bp, Homo sapiens
agcaatagggagctacagaagggttttgctcaggagagtgacaagatctaacatatgtggttaaaggatccctctggctgctgagttgtgtgcaaaccgttcaggggctttggtggaagctattgcactacatccactaatagatgctggtgcttggagaccaaggaggtggcacagaagcacaactgaaaatgtccaaggtatactcttcccaagaagcacagaagttggaggaatgcaagcctctcagatgccttctgtggcccccctcagcacactgtgaggggaaatcacattatttcagggtgagcttcatcagaagtacatggggacaatagtcatatgaggtggtcacatctaggagtgtggaatgagctctattttgcccgaccttagtttaaacacagtcccctagtagactcctctccagagcaaggactagaaggccagaccaccaatcttttrtagtaaccttggaaagaagacttttatgatgtggttgacatctcctccaaatgtttcagttctcatgaacgctctggaataactgcagttcagtgattctgacatcctaccttagataacagatatatagatgtagacagatgtagacaaaaagagatgcaatgataaatccttgtttattc

SEQ ID NO: 23525 - DNA, 647 bp, Homo sapiens
agcaatagggagctacagaagggttttgctcaggagagtgacaagatctaacatatgtggttaaaggatccctctggctgctgagttgtgtgcaaaccgttcaggggctttggtggaagctattgcactacatccactaatagatgctggtgcttggagaccaaggaggtggcacagaagcacaactgaaaatgtccaaggtatactcttcccaagaagcacagaagttggaggaatgcaagcctctcagatgccttctgtggcccccctcagcacactgtgaggggaaatcacattatttcagggtgagcttcatcagaagtacatggggacaatagtcatatgaggtggtcacatctaggagtgtggaatgagctctattttgcccgaccttagtttaaacacagtcccctagtagactcctctccagagcaaggactagaaggccagaccaccaatcttttatagtaaccttggaaagaagacttttatgatgtggttgacatctcctccaaatgtttcagttctcatgaacgctctggaataactgcagttcagtgattctgacatcctaccttagataacagatatatrgatgtagacagatgtagacaaaaagagatgcaatgataaatccttgtttattc

SEQ ID NO: 23526 - DNA, 586 bp, Homo sapiens
cccccatgacaaagaattatgggccccaaaatgtcaatagtgycaaggttgaggaactctgggctagattccggccctttccagagaattcttcccatcaccaatccactcacctgtgcctaccagtatcagtcaggataagctaggttatcttgcagtaacaaacattcccaaatcttaacagcttaactccataaatattaattcatttctttctaatgttctgtgtccagtgcaggttggatgggggactctagttcacatggtccctgaggaccaggctcctttgggacattgcaaattgcagtggtggagggaaagagcatgggagattgctcaccagtgttgcttttgctcatattttattggccaatggaagtcacatggccacatctaacctcaaagagggtggagaagagcagtcttcctttggacctgggaggagagaaacagattcttggtgaagagccctgatgatcacatcacacctagttcagtctcatccttggagattcaccttggatgccatggagaagcctatcccgattgtcctccctgggtgttgggggtacccttgctctgggct

SEQ ID NO: 23527 - DNA, 443 bp, Homo sapiens
ggctgcagatgccctccaaggctggtctccactggtccttaggagcataggctctgggttgagtgatgcctccctctgacagcaccgcacatggagtgtggagttctcaataaagggtagttattaacacgtccatggccccatcttacggctgagaaaattgaggtgccagcagttatgggacaccccctcscccccgccaggtttcctagctagctggtggcagtgctgggagcttgaatccatcacttctggctccaaagcgattactcttaacttctggggcccctgcccaagccaggatacaccctggcactccttcttgtggccactgttgggatccacacccaggcccctctctggctcattaactctgccaggacggctgggctgcctgggctcaggcgtgacccacacgcccaattagagggattcaaaacgcc

SEQ ID NO: 23528 - DNA, 443 bp, Homo sapiens
ggctgcagatgccctccaaggctggtctccactggtccttaggagcataggctctgggttgagtgatgcctccctctgacagcaccgcacatggagtgtggagttctcaataaagggtagttattaacacgtccatggccccatcttacggctgagaaaattgaggtgccagcagttatgggacaccccctcgcccccgccaggtttcctagctagctggtggcagtgctgggagcttgaatccatcacttctggctccaaagcgattactcttaacttctggggcccctgcccaagccaggatacaccctggcactccttctkgtggccactgttgggatccacacccaggcccctctctggctcattaactctgccaggacggctgggctgcctgggctcaggcgtgacccacacgcccaattagagggattcaaaacgcc

SEQ ID NO: 23529 - DNA, 511 bp, Homo sapiens
tgcagccgtccctggaccaatctttgagtagccaggctcaataaaggggtatcatgaatctatcccctgaggcagggagaaaagaatcaccaccaaactctaatwaaaaaaaaaaaaacaccactggagaatatctggaatgacatataccaaactattacagaaagtggtgagattatgagcaatttgaaatatcttccttacacctatttgtattttcaattggtctataacaaacattaattacttaggcaataaataggtttaaaactaaataactgaatcaagaaaaacctaaaatacacacatatttttaaaaacaaagtctttatcagacactgacagagcgtcagaagtgcttccctagaaccaacagcttgaaagcagccagtcgagtcctctttctttatctttttacctttttttttgtttttgagacaggatctcactgtgttgcccaggctggaatgcagtggcacaatcatagttcactgcagccttcacctcttgg

SEQ ID NO: 23530 - DNA, 1007 bp, Homo sapiens
tgcatgtgatatacaccaaattcagtacagtggttctatcagaaggaaagacagaaatgggactctgaaagggtataagggatctctgtctgccctcttctttccttaggggaaaaaaaaaatatatatatatatatacacacacacacacacatatatatatggctaaatgttgaaaactgttaaactgggatgggtggatcaagatggtagtttattattctctggactccgcattcttaaaatttaaattytgaagtaaaattgtccaacaatgcccattttatgctcatcaaaatcaagattctcaacaggatcttatggactcaaaaagctattttcttggcctatgccctattttttatttctagtatctacagcaatggttctcaaagcatggtcaccagactggcagcatcaggattatttaggattttgcaagaaacaaaaattttattttgcaagaaacaaaaattcttgtggttcgcaagctttagtgtgcattagaatcacctgaaggtctcattaaaaacacagatggctgggccttgtccctagaattactgatctgcaggtatggggtagagacagagaatttgtactttctaacaagtttccaggccatgtgggtgttgctggtacagggaccacactttgagaatcactgatctagagctctgcactctattttcagaatccaaagcacctaatacagaatatatggttgttttaaaagttccagagagcagttataaactgaactcatgcttgatcccagctaccactgttagttggttaatgtatttttaccacctcacaacatattctgttgcagtaattcttaactttggaaaattttaaatccttcgtccagaaatactggtatggatcttggtaggctggcaagtttataagatccattctatgaaataacagccacagagacacagattccttcctattaaatgtgacctgtgaagaaaggacagcttgagaggcagtatgca

SEQ ID NO: 23531 - DNA, 601 bp, Homo sapiens
ctaattttacctttttttctctttgtatctcattctgctttcccttagctccccgttagccttattggctcacaacaaaagctcaacaggagactagcagcagcatgacaaaattaaatagaatgccacaaaaaggcctgggaatttgaaagttgcctcttaactttagcagggaaacagagtaacctggcygctgtctgtggcttggagaagtttgtgtggcacatgcagatgatggttgttctatttgtttgctattatgaaacactatttttctttatatgagaaccatatctaagtggagtcactatggagggtacacatttcccagtaaagggaagtgttgtcatcctgttgacgccactgaaggctgttaggactattaattttgttgttcatttaggcatgcgtggttgccacagcaacaacaatctcatagttccttcaagccctcagtgcagtgagcatctgttgagaatcctacaaaggtgtcgtagttcctctccttcctgtcatagattgaaccccttgcttgctttccttgtaagctacatatttatcaagaatccctagagagacagagagaagagattctttgcta

SEQ ID NO: 23532 - DNA, 543 bp, Homo sapiens
aaattcttttatctaatgatacttattgttcaatcataagtaatatttaactgtaaaatcttttacttggagtaaattatctttggggtgaattcaactaaagattctgtgttgattaagtaattgtcatttttcctgttttgggtttggagaagaaatttctaggttatatactgtttttaggcaagaagtctgagcctgggttactctggctttcacaagacattagtgtatcctgagggcttcttttttgcaactctttgtggggattcctgggatcgatttttgtaagactcttccatccsaaccagcctttttggtatcttttactttttctttccgagttcttctcttcattttatttatttacttctctaggatcataagatcatagtacttctgagctggaaaacacctcccaacttctctcgtacatttctatcctcacaacttgcaatgttcaactgtgctcatgttgcctacttttaaaaactcgtatacatagatatgttaatagccaagcacaaaccaaacattttatta

SEQ ID NO: 23533 - DNA, 543 bp, Homo sapiens
aaattcttttatctaatgatacttattgttcaatcataagtaatatttaactgtaaaatcttttacttggagtaaattatctttggggtgaattcaactaaagattctgtgttgattaagtaattgtcatttttcctgttttgggtttggagaagaaatttctaggttatatactgtttttaggcaagaagtctgagcctgggttactctggctttcacaagacattagtgtatcctgagggcttcttttttgcaactctttgtggggattcctgggatcgatttttgtaagactcttccatcccaaccagcctttttggtatcttttactttttctttccgagttcttctcttcattttatttatttacttctctaggatcataagatcatagtacttctgagctggaaaacacctcccaacttctctygtacatttctatcctcacaacttgcaatgttcaactgtgctcatgttgcctacttttaaaaactcgtatacatagatatgttaatagccaagcacaaaccaaacattttatta

SEQ ID NO: 23534 - DNA, 615 bp, Homo sapiens
atgcaagtgttgagttgaattatatagatttacgaagcttactttactgcatgagttaaaaatttttggcagcarttgacaaacagagaccagcacaaatgaagtcatggactaatttagtagaagaaaaaatattctttaataagtgcttttctcactgttgctacctagagacaggaatgggatgaactgaggaagtctgtggcactcagttattgatgggatattagctaatcttgtagttcagtaaatatcattctccccgtcaccacagaaagatacttgtggagtttaatgggcagcaaaaaaatcaggattagaagtcacttggatttttaaaaccagtaacagagttgtacataaataaatacatacacctcttattttttaaaagatctttccaaagaatgttttaaggaaatggaagacggtaggaagagagttacagggactaatgaacactttgcaaagtggcttgtgtttatggcccatctctcaactagaaaaaagggggagtgtgagaggttaactttagtaggagaataactaaagctagggcaaagtaaggaagcttttcttcctccatgaactgttctttgttcaggggctactgca

SEQ ID NO: 23535 - DNA, 615 bp, Homo sapiens
atgcaagtgttgagttgaattatatagatttacgaagcttactttactgcatgagttaaaaatttttggcagcagttgacaaacagagaccagcacaaatgaagtcatggactaatttagtagaagaaaaaatattctttaatmagtgcttttctcactgttgctacctagagacaggaatgggatgaactgaggaagtctgtggcactcagttattgatgggatattagctaatcttgtagttcagtaaatatcattctccccgtcaccacagaaagatacttgtggagtttaatgggcagcaaaaaaatcaggattagaagtcacttggatttttaaaaccagtaacagagttgtacataaataaatacatacacctcttattttttaaaagatctttccaaagaatgttttaaggaaatggaagacggtaggaagagagttacagggactaatgaacactttgcaaagtggcttgtgtttatggcccatctctcaactagaaaaaagggggagtgtgagaggttaactttagtaggagaataactaaagctagggcaaagtaaggaagcttttcttcctccatgaactgttctttgttcaggggctactgca

SEQ ID NO: 23536 - DNA, 615 bp, Homo sapiens
atgcaagtgttgagttgaattatatagatttacgaagcttactttactgcatgagttaaaaatttttggcagcagttgacaaacagagaccagcacaaatgaagtcatggactaatttagtagaagaaaaaatattctttaataagtgcttttctcactgttgctacctagagacaggaatgggatgaactgaggaagtctgtggcactcagttattgatgggatattagctaatcttgtagttcagtaaatatcattctccccgtcaccacagaaagatacttgtggagtttawtgggcagcaaaaaaatcaggattagaagtcacttggatttttaaaaccagtaacagagttgtacataaataaatacatacacctcttattttttaaaagatctttccaaagaatgttttaaggaaatggaagacggtaggaagagagttacagggactaatgaacactttgcaaagtggcttgtgtttatggcccatctctcaactagaaaaaagggggagtgtgagaggttaactttagtaggagaataactaaagctagggcaaagtaaggaagcttttcttcctccatgaactgttctttgttcaggggctactgca

SEQ ID NO: 23537 - DNA, 500 bp, Homo sapiens
tggaatggggataattatacttatcttacagggctcttgtgargatcaaatgagatgatacaagtgaacagttgcctggaacacagtaagcactgagtaaatgtttgctcttctttttagtagtatttttaatatagatagagttgcttatgcttctacatttctaaggggagagaaaaacttggcatcggaaaagcttgtttcaattgaaaatttagttagattcccaaattatacattgactatatcattcaattaagtaagaggaatgattatgaaagaagttttcctaaaatgaattaggaaaagaggaagaattaaaactgcttggaagaggaggaattaaaagtaacatataatgcacatattataacacaagacttacagaaaagactgaggctatgcagactgtaataataatgttaagtgttatcttcatacagtgtctcatatctaaggatcatgtctgtatcactttacaaatgcagacaattacctcc

SEQ ID NO: 23538 - DNA, 3143 bp, Homo sapiens
caaaaacaacaaaaaagggactttaaggttacaggcatatttcacggaatacatagtagaaatatggctggaccttcggaaggcagtggcctagaaaccagcagaatgtcctctccatctgatctccatttttttctgtatgtttgttcattactctctttcttcagactcattgtgttaccttcgctgtttaacatggtagatgatggctgcctacagcccccaattttacgtgtccagatatgtcttgctttctcctgatctcagagggcagaatctgattggctcaactggggtcaagtgggtattcccaaatcattagttataatagggtggggagtgaaagaaaatgggatctgctaacgcaaacctggccactgggagcccagctccatggattggaggtgaaggagttccaaataaaaaaagaggtaagataattatgacttgaacagacataccaaatgtttctactatatcttatccctctgttactcaatgtgagtgcatactttacattgcctactaaaattcatgttatatagactggctgcggtggctcatgcctgtaatcccagtactttgggaggctgaggcgggtggatcacgaggtcaggagatcaagaccatcctgcctaacacagtgaaaccccgtctctactaaaaatacaaaaatttagccggctgtagtggcaggtgcctgtagcctcagctacttgggaggctgaggcaggagaatgcatgaacccgggaggcggagcttgcagtgagcagagatcacgccactgcactccagcctgggtgacagagcaagactccgtctcaaaaaaaaaaaaaaaaaaaaaaaagattcatgttatatatgagaactcctaaagtaaagaatcctatttaaccttgctcaattcaaggccttctgcatttattggatcatggaactaatatgaaaatatggtcattaagactccatgaaacattgggaaatgccaccctgaggaattgcatttaaattccaagttcccagaaagagaatattaattttgtatcctactttgcagttcagaaacttaacatgaggaaataatttggaagcacaataactgatagtccaataacggctgtttatttccttaacagtagaaatttttaacaaaagtcttttgatgtgtgacagcagtattgtgatgattaatttttcaaaagtgtcctgaatagcacggggcagtttctttgtgttgatggaacagctctgtattttggttgtggtggtagttatatgaatctatacatgtgataaaactgcaaagaataattgcacatatacgtacgcgcgtgcgcgcgcgcgcrcacacacacacacacacacacacacacacacaaaagtgcatgtaaaaactgacgaaatctgagtaaggtatgtagcctaattaatagtattgtcccgattttgaaattattctatagttatgcaagacgttacaattaggagaaattgggttaaggttacaggggatctctttgtactatttttaccacttcctgtgagtatatgattacttcaaaataaaagttaaaaaaagacacttgatggctgtgaaaatgattttagtttaaagcacgacacataaataaatattataaaatttctatgtcataaaagggtcttaaagccaaatgagcttaccgactgcatatgctctggccccttaaaatttgatgttatataccccaaagcctttgccctttctcgataaagtcgaattgcttgatccatgggaactcttaatcggaaccagtattccactgtgccaaaatttgggatgtctccttttgttcctacaaatcagtacataacccaaggttaaaatagtttcatacattaaaatagatagcagtaaaaatacatcaatggcattatgcattaaaactatacattttatgctgagtaaaataatatgacttgcacaaatgatgtgagattggcaaataacagatgaagaaaatagttacttctgaagtatgagtttcattgtatattaaatattattaaagaactacatcaaactatgtttgagatattccaatttgtactatttcattccttctgaaatatattttaaaaatctaaacattggatcaaatactccacagattctttttgatgctatagtataatactttttttaaacaagttgcactcaatgttgtctgacatttacaatatgaaacctcaaaagtataaatatgacattccacattctaattcaagtttcaagacatctttggcaccttcccatttctagactatctcacaagcataagggaaaatgtcatagctatgccaaatacatgtcccatgcagtacacccttgcacgatgtttgccctgcacaccctcagtactcctctcaactcaggcagctcttcatctctcttccatggggaagactttctgtgtggctcccaggagagtagagccctgtgcctccttcatggacatcgtatgtccttgttagggcactgacttctttggcccgtctgtttaccagcctatttctctaatacgccataagtttcttgagagcaagggccataatttccaccaatatactcctactacagggactagtatataaaggctacttaatatttgtcaaatagagaatattctatacataaactttcctgaacacaccagattattacaaatattacccctactctctcctactttatcaattttttccctgctaatggatcattctcatcagcatacaaatgtgacttactatctgcctgctatagtttgaatgtttgtaccctccaagaatcatgctgaaatttaattatcattgttaagagtattacgagtaggacctttaagaggtgatgaggccacgagggatccaccctcatgagtaggattggtgccattataacaggccgagattgaccccttcttgctcgctcccaccctctaaccttctgccatgttgcagcaagaaggcccttaccagatgtgaacaccttgatattggacttaggtattctgttacagcagcacaagacacactatgacagaagtcatcatttaaaaataagtcctaaaagaataatattaatgtaatatatatttgcttgtat

SEQ ID NO: 23539 - DNA, 898 bp, Homo sapiens
tatttaactttctgaggaaaacatttcatttaaaatagattttatgtgaaattagaaaagattaaaatggcagacccaagaatcttaagatctgtgggtttgagtatatgtrggattttcttggaagagggaccactactttcagtggtgtcccaaaggtagatcttgggctcaagtgattcccccactgtggcctccccaagtgttaggattagaggcctgagccactgcacccagccccgaaggtagactatttggctggagccatgggcattctctgagctcagtggtggaagccaaatgggatgccgattcaatacctgagactccatccctctgtggacaatgataatggctagtgactcaaggccagaaacctggatttttgtaagtctgatagcacttatcacttatgagtcttcatatagtttctgtttttttcttttagacagtatctggctctgtcacccaggctggagtgcagtggtgcaatctgggctcgctgaaacctctgcctccaagggtcaagccaaccacccatcttagcctcctgagtagctgggactacagttgggcaccatcatgcccagctaacttatatattttcttgtagagatggggtttcaccatgttgcccaggttggtcttaaaactcctgagctcaagcagtccacctgccttggtctcccaaagtgctgggattacaggtgtaagccaccacacctggcttagtttccaatttataattccttatggttttccttgaactttaatgtgtgtgtgtgtgtgtgtgtgtgtgtgtgtgtgtttaattccaagaaaatttgttagaaagccttaaaacttgatacacaaagagttaggtgcagaaactgagcattgggtaagtgaaaatggc

SEQ ID NO: 23540 - DNA, 898 bp, Homo sapiens
tatttaactttctgaggaaaacatttcatttaaaatagattttatgtgaaattagaaaagattaaaatggcagacccaagaatcttaagatctgtgggtttgagtatatgtaggattttcttggaagagggaccactactttcagtggtgtcccaaaggtagatcttgggctcaagtgattcccmcactgtggcctccccaagtgttaggattagaggcctgagccactgcacccagccccgaaggtagactatttggctggagccatgggcattctctgagctcagtggtggaagccaaatgggatgccgattcaatacctgagactccatccctctgtggacaatgataatggctagtgactcaaggccagaaacctggatttttgtaagtctgatagcacttatcacttatgagtcttcatatagtttctgtttttttcttttagacagtatctggctctgtcacccaggctggagtgcagtggtgcaatctgggctcgctgaaacctctgcctccaagggtcaagccaaccacccatcttagcctcctgagtagctgggactacagttgggcaccatcatgcccagctaacttatatattttcttgtagagatggggtttcaccatgttgcccaggttggtcttaaaactcctgagctcaagcagtccacctgccttggtctcccaaagtgctgggattacaggtgtaagccaccacacctggcttagtttccaatttataattccttatggttttccttgaactttaatgtgtgtgtgtgtgtgtgtgtgtgtgtgtgtgtgtttaattccaagaaaatttgttagaaagccttaaaacttgatacacaaagagttaggtgcagaaactgagcattgggtaagtgaaaatggc

SEQ ID NO: 23541 - DNA, 1019 bp, Homo sapiens
cttggtgggaaggcaagctggtgccctctcatgctttgctggccaggaaagaggttttttgtttgtttgttttcaggaggcagggcttggtgtctttaacaattttataatacttgttaatctctcctttttttttttttcgtttgagacggagtctggctctgtcgcccaggctggagtacagtggcgtgatctcggctcactgcaacctccgcctcccaggtttacaccattctcctgcctcagtctcccaagtagctgggactacaggcgcgtgccaccacgcccaactaattttttgtatttttagtagagacagggtttcaccatgttagccaggatggtctcaatctcctgacctcgtgatccacccacctcggcctcccaaagtgttgggattacaggtgtgagccactgcgcctggcctgttaatctctcctttataacaaagaggaagcagctcttaggtacagagcttcccatcactaacatttaactagaattaaacaactctgggatgtttaaacaagcatttttatgttttctttctttcatttgtggcagacaatactggtttacctgtacaataagtgaaacagagttaccatatgaaatgcattttttacaaacctaggataatttcagatgagattgagcacattcagggtggtatggcagtagacccaagataatttcaaagaaaaatattaagtaaatagtcatacaggttttacaaagaaatgccaggatagtgaagttgggaagccaagagctaaaggtggggaaacactgccttgggctttaaagttcagagccaggttcaaatggccccgtgcttgtgaagccttcctcaatccctcctctgccacatcagccaccggctccctccccaccttaagatatttagctcacgctgtgagtgttatcattggctctgtatcytttagccagagtctgagtctttttatccctgttagcactctcagttctttctatccttattcaaatgacatggtttt

SEQ ID NO: 23542 - DNA, 1695 bp, Homo sapiens
gggtaaaagccacatcaaatttgtctttgcattgccacctcctaacgttgttccaggattatagttagtagctaagaaatgataatagattgaagcaatgtcttcattccaaagatattctgaattattcgataattgatctgggcagcaaaaccctgataacaaatggcactgaccctcagctccagcatcagggagacatttgggaagggtggggactaaagtgagctaacaacagatataggaatggaaaagacagctgctacttagccttcactgattgtgtccatttaggagccaagtgttaccagatctttgtttttaaagcaaaaacataggatttttatgcacaatctcttggctttttaaatgtaaatttaacaatgctttagacccagcatgttaaaagcaactgcaaaaatacagtgtgtgtagggagggaaagaaagcctataatgtgggccaaacagaacacatctttagggcaacaccaacccaaagctatcatttgcaacctctgctataaaccatatctatagatgtagttgaagaaatggcatagcaattttattggctaaagttgctctatattaaacaaaacaagcgaaacaagaaatccatgaagaaacatggatcccttcaggatcccttcaggattcatgtttcaggtaagaatgctgaatatttcttgaatatctttttcaccttcttcagaagtcaagattttgggtaaatcatcattttttcctcccatttttggggaacagtattagtcagagttcaccagggaaatagaacccacaggagatacacacacacacacacacacacacacacacacacaaagaaatttattattaaaaattggctcatgtaattatggagcccgagaagtcccaagatcagcagccagcaagctagagactcagagagccaatgtctagttctaatatgaaagtgagcgggatcaagacgtaagaagagctgaggttgcatgcagtggctcatgtctataatcctagcactttgggaggctgaggcaggaggatctcttgaggccaagagtttgagattgacctgggcaacacagtgagaccccatctcttaaaaaataaaaaggaaaaataagtatttttttttaaatggctagacacagtggctcacacctctaaccccggcactttgggaggctgaagcagggggatcacatgagcctagacgttcaagaccagtctgggcaatatcagtgagaccttatatataccaaaatttaaaaattagcaacaccaagtgtggtggtgcrcacctgtagtcccagctacttgggaggctgaggtaggaggattgcttaagccagagaggcagaggttgcaatgagccatgattgtatcactacactccagctggagagacagagcaagactctgtcttgagaccctgtttcaaacaaagtaaaagagaagcactggtgtctcagttcgagtcttaaggtgggaaaggaccaatgtcccagctctaagcagtgaagtagaaggatttccctcttactcagcctttgttttatctaggtcttcaattacctggatgaggcctacacatatagggaagtcagtttgctttgccaagtctactgattctgatattaatcttatccataaacaccctcacagacatactcagaatactgtttgacca

SEQ ID NO: 23543 - DNA, 637 bp, Homo sapiens
ctcgttcccaggatcaggaccacatagcaaaggggacttaaggttgcaaatgaaattaaggtttctaatcagcttactttaatattattcaggtgggccctatgacaagggttcttaaagtgaaaaacagaggtagagaaagagatgtgaccttgtaggatgttcaggtgatgcaatgtgagaaggactcaacctgccattgccagctttgaagttggagaaagggcccacgagcccaggaatgtgggaggccggaggaagcaggaaatggcaagaaaacagattccctcctagactctccagaagaaatacatccctgctgacaccttgatgttagccctggggagcagtcatgtagacttctaacctgcagagctgtaagttaatgaatgtgtattgtttcaagacactaagtttgtggaattggttacrgcattggtaaaaaactgatacattaaacttcaatgattatttatgtctgtatcccaccagataatggaaacttacactcagtcaagttgagatttccccttccccgaaggtcgtttctaagttctgggggcaggattcacaggcagtgggagatgggggtgggagtgtctggtcctcagttgtgacgtgtccatgccggtgtcct

SEQ ID NO: 23544 - DNA, 590 bp, Homo sapiens
aagaatcctagaaagggatatctttactttttatttcctttgttttccaaagaaaaattataagtcttattgtttctttcccacaaattttaaaacataattttctatttcattttcagagccatttctttgaatatttttwaattatttttaccccctccatgtcacacatgagtaaactgagacatggggaggttaattaacttgccgaaagtcacataagtttttaaatagaaaaacagagattcaaacccaggcaatctggctgaggggtcgttgtgactggacctatcgagatcacattttaaataaagttaaagtgtataagattggaaaatcaatctggggattttaaaaaaagtaataaaaatatttagtgtttaaaattaactttgaaaatttatatatatatattatgtccttacaaatgtaaacatttgcaaaaacagatacatgtaaaagattgcattctaataatacaactcttagatttcataataaatgcttttaagggaaagaaatatagataccattattaactattccatcattcattcaaaaaatataaatgtatattattttaccataag

SEQ ID NO: 23545 - DNA, 549 bp, Homo sapiens
ccactgcactccagcctgggtgatagagtgagactctgcctcaaaaaaaaaaaaaaaaaaaaaaagtcctactatgctgtaaagttctgckcatggtcacatatttctctgagtcacctttaaacatgtatatagagagacatatttatattctatcaaaaaataattttatatgtatgtgtgtgcgtatgtgtgtgtgtgtgtgtgtgtatatatacatgcatatataaaatgcacaaccatgcaccaaaaatctttacctgctcatacctctccttacgccaaacacaatggaagttttaggtcaaggttactaataaatttttctttcaagaatgactcttctctttaaagaatccctacttagcatttatattacaaagtcctagtcacatcattattatctaattaattttaataatacatatattgcaagattcattgctcccattattcctctccttttcgtcttcccctgtcttgggatttctgttctgaatcaattgtcatttgatagagtatttcctcaagtgttttcctcagataagt

SEQ ID NO: 23546 - DNA, 600 bp, Homo sapiens
agttcattttttctggcttttcttcctataagctctagtgactgctaaagagcaaagatagttaatctagtttaggtttaaggaaatcaggtaaagacaagagatattctaactacatttaattagacatttcttacctaacaaaagaaagatggggagatagggaaaaagtatttcccacatagatgtgtgatgacagattctttagtgctggttctaattgtgttctaggtggccgttttttgtttatatgtttttttctttttaacctccttttgtcatagtgactttaggaaacgtaatgcaagccatggaccttttcccaggaaacacactgcaataagcatacaggttcaggggtatgcagactcccctaaaacccaattacagacacaccatgaagaagtcactagcaccacacttgagtgatgttaatacccaagattatattgtaaagataataatgttaaaataatcacattgatatgactgtctaaaagtcaatcatgagttcagagtatrttaaaaaataaaaactcatagcagaagaagggcactttaggtatcttaacacaagacagttaataaaagagttggtaa

SEQ ID NO: 23547 - DNA, 600 bp, Homo sapiens
agttcattttttctggcttttcttcctataagctctagtgactgctaaagagcaaagatagttaatctagtttaggtttaaggaaatcaggtaaagacaagagatattctaactacatttaattagacatttcttacctaacaaaagaaagatggggagatagggaaaaagtatttcccacatagatgtgtgatgacagattctttagtgctggttctaattgtgttctaggtggccgttttttgtttatatgtttttttctttttaacctccttttgtcatagtgactttaggaaacgtaatgcaagccatggaccttttcccaggaaacacactgcaataagcatacaggttcaggggtatgcagactcccctaaaacccaattacagacacaccatgaagaagtcactagcaccacacttgagtgatgttaatacccaagattatattgtaaagataataatgttaaaataatcacattgatatgactgtctaaaagtcaatcatgagttcagagtatattaaaaaataaaaactcatagcagaagaagggcactttrggtatcttaacacaagacagttaataaaagagttggtaa

SEQ ID NO: 23548 - DNA, 993 bp, Homo sapiens
tgaagcccaatgtaaacagtaaaacaaaacttaggcataaccaatcagaaactgccactaacctctaagttggggctttccaccgagtcatatccaaatatggcaaatgcctagctttagccratcaaatgatttctttatcctgcttctgtgtccagcctgctgctcaccctcctaatggggaccaccctgaacctcttctggtttcaagtgctgcctgggagaacatccttttccttctgatccctcttccctgcctacctttccaccactttcttctctgtccctatccatgagatatcatattccgggaccagctgcccaaagccaatcctacaatctcatctgccgctgcctaagcctcacttcagtgacttattcagaaggatcaggctcatccacagaaaccaagcccctttgcctgctgaagggtttctcaaacatgcctcatcacaagaatcacagataacatgtctgaaacacagattccagggtcccctccaggcctaaggaatctactaataacaccagcgtgaaaaatcctggcctggcttaaggtcactggaatacagggtggtggcaggggttgggaagaagggttaggagctggtctgtatgcgtgacttagtcctgtctctgtcctgtcaggcaccagtttcgcattggttccggcgatgggaatagaggggagggaggccagaacccaaccaaagcccagctgaatggatcatgagatctgaatcagccggaagccactgctgtgcgccccagaacccatgtctcaattccacctggcatcaccaattatctgtgcctctgacataggaggttttttttattccctcgaaatagggctataattaaatccaaaattgtactggagactttatcgtcatggtaaaagcagaacacaatgtctgcagacaaaaaaactctttcaataaaaattaattatgcacagctcatgcctcagtcccggtggcagtgtgagga

SEQ ID NO: 23549 - DNA, 993 bp, Homo sapiens
tgaagcccaatgtaaacagtaaaacaaaacttaggcataaccaatcagaaactgccactaacctctaagttggggctttccaccgagtcatatccaaatatggcaaatgcctagctttagccaatcaaatgatttctttatcctgcttctgtgtccagcctgctgctcaccctcctaatggggaccaccctgaacctcttctggtttcaagtgctgcctgggagaacatccttttccttctgatccctcttccctgcctacctttccaccactttcttctctgtccctatccatgagatatcatattccgggaccagctgcccaaagccaatcctacaatctcatctgccgctgcctaagcctcacttcagtgacttaytcagaaggatcaggctcatccacagaaaccaagcccctttgcctgctgaagggtttctcaaacatgcctcatcacaagaatcacagataacatgtctgaaacacagattccagggtcccctccaggcctaaggaatctactaataacaccagcgtgaaaaatcctggcctggcttaaggtcactggaatacagggtggtggcaggggttgggaagaagggttaggagctggtctgtatgcgtgacttagtcctgtctctgtcctgtcaggcaccagtttcgcattggttccggcgatgggaatagaggggagggaggccagaacccaaccaaagcccagctgaatggatcatgagatctgaatcagccggaagccactgctgtgcgccccagaacccatgtctcaattccacctggcatcaccaattatctgtgcctctgacataggaggttttttttattccctcgaaatagggctataattaaatccaaaattgtactggagactttatcgtcatggtaaaagcagaacacaatgtctgcagacaaaaaaactctttcaataaaaattaattatgcacagctcatgcctcagtcccggtggcagtgtgagga

SEQ ID NO: 23550 - DNA, 614 bp, Homo sapiens
gaatcccatatttcctataaattttcttagagaaaagtgtgaagagttttaagtgattagagtacctctcacattagcttcccatgacccagtgcctattaaggagagggaaagagataaaatctattggtccccttttacaagcagtacgagactatcatatctgggataaggaaaacttgtcggctctccgcctggggacaattctgcaacctcagagcagcaagctataattcaagcagaacaagatagtcccactgaactraagaggcaaagaccagaattcagttcacctgaagtgcctgaaatttctaaaaaggggcacaagggtggacggatttgtgcagagtggccacagaaatctgtaagtagatccaccccccatccttggcataggcaacatcacccgaggcctaccaaacagtgattgctacaaggctgagagtggactagagctaccagggtagctgtgcaagggacattggcagtccagctcagcaaaagtgagatttgttcggcaccttttaacaacctgggatgtaaattcagctaagattaaaaatatcccgggtattcatccaaaatgcaaaaaggaacttagaactaaggagcct

SEQ ID NO: 23551 - DNA, 582 bp, Homo sapiens
caactacacaactctgccgttgtaaacaacagcagccacacacaatacataaacaaatgataatggctatattataattaaactttatagacaccaaaattttatttttttatacaattttcacgtgccatgaaatactattcttttgtttaggcacaacatctaaaaatgtaaaagcctttcttagctcaaaagtcaaacaaaaacaggtggcagggcagatttggccttgtggactgtagtttgctcacttgatctgtcgtatcattataatatgtaatattgggataattagagtgcctacttggtgggggcattataaaataatataaagtaagygccttaacaaagcatgcagtataggatcaatcaagataagaagtatcaatggcattaaatagaaagttactcaaggtgtcagaagtgaaggagattgagacagattgggcagggaaatatcagtgagaaggaggtgactggtttaggacaaagattctgactaaagtgagaatatcaagtaccgtacagacattgaaattttgagcagaaatgaataagaatattaaggtgagaatggaggca

SEQ ID NO: 23552 - DNA, 688 bp, Homo sapiens
tatcaataagttttccacaatatttattgkgctgtcttacatttttaaatgggatttgtgcaatttgatgaaaagcaaattgtcttagagataaattatatattaatcttgtaatttgaaaaaccattgaattagctgctctagatatatgaaaaggaaatacttaatatttttcaattaaatatctacatttttgtgttgtctttattcattgtcatcatcatcagctctgaactcttgtttaccctttgaagaataagatgaagaaactggggaaggtgcttcctgtgttcagcctttttataaaacaatttcgttacaattgtatttctaagcaacttaagtggttttgtatttttcatttaatctggtggtctttatcttttaataagagaattcagttcgttcacatttaaaaactgtaaatatgatttttccttccttcttgtgtttttctattgtttcttttgcttttatttattttttgagacagggtctcactctgtcgtccaggcttgaatgcagtggcaccatcatggctcattgcagcctcgactttctgggttcaggtgatcctctcgcctcagtgtcctgagtggctgggactacaagcacgtcccaccatgctggctaattttttgtatatttttgtagagacagggtttcgccatgttgcccaggctggtct

SEQ ID NO: 23553 - DNA, 579 bp, Homo sapiens
ataaatcacttagcacagagcctggtatattgtaaacaggaaataaatgttcattgttatgtcgaaacatgtgaagttactaatttgatcacttttttttacctaaatagttttatcttatattgctatttaatagatgacaaaactgaaactcagaaaacttaagtaattttattcaatgtcttcagcaaatgagtgacagtgaaaaaattttgatcttcctacaatctatgttaagattgtgcagtgaccctatacactatgctaggagttcaggaaatattcttagcaaaaatgtrtcactaataatcgagggacttattgactcattacatttagtgccaccctaaatgcaatgaaaaggttttttgctttttctaaataaatacatctcccataaaaatgccctccagagatctctgggctaagaagccaatccaggtgccatctgattagactattaatgtcaacaatgttttcagtaaatttgaaacagagctatttgaacccattttacactctctgtcatgatccaacttatctgtcaggcaaaaatcaagaatggcctctaacatactc

SEQ ID NO: 23554 - DNA, 514 bp, Homo sapiens
aacccgggaggcagaggttgtggcgagccaagatcgcgccattgcactccagcctaggcaacaagagggaaactccgtctcaaaaaagaagaagaaggagaaggagaagagaagaagaagaagaaagaagaagaagaagaagaagaagaagaagaagaagaagaagaagaagaagaagaagaagaagaagaagaagaagaagaagaagrcggccaaatagaagcaaatggaaccaagacgtagggagagagaacctacctgatgacatagtgtgaacccttatcttcatccatgtccaaggacagcacaatctcttcaactgcccagttacatgattcaataaattcccctttgaggctttgtggttaacgtaagctgggtttctgtcacttactgcgcaaacaatcctggctaacatagacctgcttagcatcctatctacataaacctgcaacgctaactcctcttgtagctgcatccctgcctctgactccagatctgaacttagttgtga

SEQ ID NO: 23555 - DNA, 514 bp, Homo sapiens
aacccgggaggcagaggttgtggcgagccaagatcgcgccattgcactccagcctaggcaacaagagggaaactccgtctcaaaaaagaagaagaaggagaaggagaagagaagaagaagaagaaagaagaagaagaagaagaagaagaagaagaagaagaagaagaagaagaagaagaagaagaagaagaagaagaagaagaagaaggmggccaaatagaagcaaatggaaccaagacgtagggagagagaacctacctgatgacatagtgtgaacccttatcttcatccatgtccaaggacagcacaatctcttcaactgcccagttacatgattcaataaattcccctttgaggctttgtggttaacgtaagctgggtttctgtcacttactgcgcaaacaatcctggctaacatagacctgcttagcatcctatctacataaacctgcaacgctaactcctcttgtagctgcatccctgcctctgactccagatctgaacttagttgtga

SEQ ID NO: 23556 - DNA, 598 bp, Homo sapiens
tttgaagcaagaagtgggcatctcagtgcagtgctgctgagaggccaagtaagataagggcagagaagagctcaattcacagggctctccttcctggcaagcagaagagccgagagtgtcactggacactgagagcagcagaaatgactgccaaaacgaggcgtggcttgggtttttgaggccccagttccaggacctagtcctaaaagtgttttctggcccatgaaaacctgaccttaaaagtgtttccattccttatttaactttgactttgtttccctaagcaagataaagcaatataactggtgaagacccctgcacttgtctcagtggtcttaaggatccagtgaatggcttatttatcatccttcagggatgggccagtaaggagttctctcatcttctgatgaatgtaagtaggtgtggggactgttatccaaaagccygagaccttgtcacagactggggctgctttttgagacttcctaaattagtcctatagagaatatgctctgatacccaattctattgctctaccttccccaaagtggaatcttggccaagagaccatgaatagacaagtcatagtcctcaataa

SEQ ID NO: 23557 - DNA, 642 bp, Homo sapiens
atgtgcaatgattcctggagatccctttagtgccaggggattggcacaaatctgatgaggtcctctagctctcagaactgcttccagtagctgtggtcaattgatctctgggttgtacttgtgtgtttcctgggcattcagtcaagtcttgttaaagctaagccagttccccacattctatgcagaattagtcagaattcctgactctttttcaaagtcaggaaatcagaggcactcatacatagagagaaggaagccctgcgaagatgtcatctcatgagtgttagacagaggaacacaggggagcagtggggacaagacaaaggacagggataagacccaaaatggaacaaaccaattggtgaagggaacccatcaaggaagaacccgagtaactgtgccgagtgagaaactgacatgtccggcctgcccatgttggctgccatgccagcgcaggtgggttcctaagtggcctaggtcccccaggcaaacaccttgtgaaaagccgcaggttcctccgtacttcaatctctaktgtgtatgccagtttctcctgtgggccctgtactggttgagaaaatagaaaactgccaacgataacaactctattcataattgtctagggtttgtctcagacctgtg

SEQ ID NO: 23558 - DNA, 553 bp, Homo sapiens
acatgggaactccctccaccaataaaagctaataaagtactgcaggcttgtttgagaatggatcagagactagaggcttcatgtaactgggtaggtctggagaatgcagggcctgacattatgagaatgaaaggggcagttatagaaaatgggcagttctagaagtgtggataggctgggcgcagtggctcatgcctgtaattccagcactttgggaggctgaggcaggagraatatttgaggtcaggacgccatctctactaaagatacaaaattagctgggcgtggtggtgggagcctgtaaccccagctactcaggaggctgaggcaggagaatcacttgagcccgggaggcagaggctgcagtgagcagagatcgtgccattgcactccagcatgggcaacaaagagagactctgtctcaaaaaaaaaacaaagaagtgtggataaagcagatatgccctgcctgagttttctgatccaaaggagaatattccaggaagaataacttctttgaatattccagggtgccagtgtgctagtaagaatttac

SEQ ID NO: 23559 - DNA, 553 bp, Homo sapiens
acatgggaactccctccaccaataaaagctaataaagtactgcaggcttgtttgagaatggatcagagactagaggcttcatgtaactgggtaggtctggagaatgcagggcctgacattatgagaatgaaaggggcagttatagaaaatgggcagttctagaagtgtggataggctgggcgcagtggctcatgcctgtaattccagcactttgggaggctgaggcaggaggaatatttgaggtcaggacgccatctctactaaagatacaaaattagctgggcrtggtggtgggagcctgtaaccccagctactcaggaggctgaggcaggagaatcacttgagcccgggaggcagaggctgcagtgagcagagatcgtgccattgcactccagcatgggcaacaaagagagactctgtctcaaaaaaaaaacaaagaagtgtggataaagcagatatgccctgcctgagttttctgatccaaaggagaatattccaggaagaataacttctttgaatattccagggtgccagtgtgctagtaagaatttac

SEQ ID NO: 23560 - DNA, 578 bp, Homo sapiens
tcacaattaaatttaagctagctttcagaagaccactttaaacttaaaaggtaaggtttatgagctaaaagcactcggtgtttctagattctttaaattcaatcatgtaatcaatacactgaataagtatcacttgagagatgcaatttcaaaagcaatttcattttgcccttcacatttttcttaatatttattcagtgtagcagttcttctcccacccttggattaacacttggataattctatgttttttcctaatcgttttaatttaataaaagacctayagtcactttgagccaaaatagcctctatttgattattagaatgtccatcttcattcggtggtacggcagcttccttcatcagctagcatctgctgcaggctaacatttaccactcagcaaagaggtatatatgaaaacctctctccttttcccaaaaccttctcctcctctttctaagctgttttagtcacctctgggttggaaaggactggaggtagatgatacaggagaggtgaagggagcaggaatgtcgtaccggactggttcaggtggtcagctagctttaccaaccca

SEQ ID NO: 23561 - DNA, 578 bp, Homo sapiens
tcacaattaaatttaagctagctttcagaagaccactttaaacttaaaaggtaaggtttatgagctaaaagcactcggtgtttctagattctttaaattcaatcatgtaatcaatacactgaataagtatcacttgagagatgcaatttcaaaagcaatttcattttgcccttcacatttttcttaatatttattcagtgtagcagttcttctcccacccttggattaacacttggataattctatgttttttcctaatcgttttaatttaataaaagacctacagtcactttgagccaaaatagcctctatttgattattagaatgtccatcttcattcggtggtacggcagcttccttcatcagctagcatctgctgcaggctaacatttaccactcagcaaagaggtatatatgaaaacctctctccttttcccaaaaccttctcctcctctttctaagctgttttagtcacctctgggttggaaaggactggaggtagatgatacaggagaggtgaagggagcaggaatgtcrtaccggactggttcaggtggtcagctagctttaccaaccca

SEQ ID NO: 23562 - DNA, 736 bp, Homo sapiens
ccacttctagtgcctcagacactccgcggtctgcacactgctagatgtggtgcatgctgttccttgcctggcatgccctcagcatatgtctgctcatttttcaaggattgtttaggaactatctgtctgtgaagcttacctttatgtccctgggcatacatgctgycattgtacttaagccttactttcatcagaacagaaggatcctttctgtttgcttctgtctgttacattgtagacttcttggaggcaaagttatgtttttccacttacgtgtttgtatcacatacaagtgtctaacatacagtaggaactcaataaatgttcattaaatcagtggataactgaatgaataaatgaatgaaattactaaaacaattgaaggctttgaaactatgtgatgccaaatatacttgcataaactttttttcatttcagcttttcatcttgattctgcatagacacatcattaattaaattctgggtgcatgacagactttatagagcatgcttatattttttcctaagatgaagataaaaatatttgcatgtaaatgagacaatacccaacctcagagaagcactatccctcactcctccagataaactccattacctgttgggaaataaatgaaaatgaatccattgcagtaatgggttttcaggccaattttacaagcaagagctcatttctagttgaaagtaaatatgtttcctgagcttatgaaatcagcca

SEQ ID NO: 23563 - DNA, 495 bp, Homo sapiens
gaatacttgttcagtctagaaaacatgtacataaaatgattaaataaggaacattagcaaatgttatgagatcaagctggcaaatggtttgaaggtcacacagccccatctgcttcctgagatgatctgctgcagattcagttcacagcagaccactctgctgtggtgcccatccctctcgaaatcccactgtcttgcccacgcctcaccaccccacctgatcacttccaccccagctactttgcccaagcatcctgcctctcacttatatcaatgaattttatgcaaaagcacccatttatactcagccattacagttttacagtgatattgtggaaaacatgaccacactacccaatatctccaatttgaagaggcagagatgaaaaactttatagagcccagtatcaggaaaagtttctcttccctsaggaagtaattgctacagcttttttctaccttataaacaacaacacatcatgtgtaactcaagct

SEQ ID NO: 23564 - DNA, 547 bp, Homo sapiens
ttcagggactctgcactgcctaccaggctaagcacataartgcttcagcttggcattcaaaacctcctggatagagcccataggaactcctactccatcagtccatacccctgtgccttcatccattacctcctcactctgcccagagcacacacagatcccgtgctctggctctttctgatcagaacacacttctcattgttctattcattaaggtactcattctttaaaagactacaagaatgccacctcttcccagaagccgtccataattcatcttcattagaactcttttctctgggctttactaaaacacgcaagccagccctgcattctaattagtagctattacctagctctcttccacaagattatatagaagagtagttaagaagatgcatttggagatagaaagacctgggtccaaactttggcttggcacttagctgtgtgacacagaacactttccttaaccatgagccttaaaatgagataacaacagtacctacttccagggatactcatgaaggttaaatgacataatcca

SEQ ID NO: 23565 - DNA, 943 bp, Homo sapiens
acatcaagcgccctgatgaccgggcccacctccaccagtgagcaggcaagagaccgagccgccctcctctcaccgcccccactccctgccgtgctacacccagatcctgtgcaggctgccgggccccttctgcttcccttggagcctggagatacttttgtaacaagccagatgattattttggtattgcttgacaaggcaaattgattgtcttgacccaggcgtatgacccctgtcgttgaacaagctgtgtctaagatctctacttttcatgagaatctgagactctttggagccaggctttctcggttctcagaggaaaagtatgaatgagtgtgaagtgtatgtgagaacttttgtttgcaatatttatttttgtgggtgtcgacttcctatgtgggctttttgggtgacactcccttaagggttcagtttgacaattctgagagttgtcctgcagttggaggccaccagaggtatctgagctccctgcttcctatttcataatcctccagccccagcaggtccactcctggttcctgtgtgtttggcccgggcacaatccccactgctttgctagacgtgctttctgccatgtggctttgggcctagagcttgttgataattgcagcttgtggcagtggaaatatggctgaatgagygtctaaatcgttgagaccagtgcaactttgggtgcaaggctttgtttagggatcaagccttttgccaccttgggctggtctttggcctggtgctcactgggaccccatatgtctgcgtaggagcagaactttccatggcagtaagtgtccagctctgtttctggttctttccccaactccagccccgtccagttgttctcctgattgacccgactccactccaggaaggccatctgaccctgtgacaggcatagctcataaactacccctccctgggatcc

SEQ ID NO: 23566 - DNA, 1152 bp, Homo sapiens
ttgggtgttgagacatctgacttccagagaggccacaagcctctccagggttctttcctgactggatcctaacaagccaagtttgtgctctgatcctcaggggcttcccaggccaggggagcagcgagaagccactgggacttcagagctgccgagggtcaggacagaagcaccaaggcggggcaaacacctggcaggtctgacctgggctcctggtgcggaggaaacctggctggggaatgcagtgagaacggctgcgtgtcctgtggggagacagcaagtgcaatcctcactaagggaacaacgcctggcacacccagaagtagctgtaaaatttcactccagacacttatctgggtttgttcaacatccgttgatcacttttgaaagttactactggctgggcatggtggctcatgccagtaatcttagcactttgggaagccaaggtgggcggatcacttgagcccctgagttcgcgactggtctgggtgacatggcaaaaccccatctcaaaaaaacaaaaaaagaatattactgtgtaaaacatggactgcaaagatatacacccaacctatggtgacagctgcctctgggaagtgggtgagagggatgggcccatagagggtgctcatctgaaatgtgttacttcttgaaacacaattggaagcaaataggacagactgccaacatccctgaactctggctggggagatgaggacatgtgctctgcgcccctccacatcttccctccattgtggaagcctacatgctccctaagcccagatacccaagtgtgaacggtccaggcatatggcggaatgaaatgcagaacgcagccatcatatgctgaagtacaaatttaataaagcctttgatcacatctcaatccataagttagctacaaaaacaaaaaatcctacaactttttagagccatcaagagccatcaaggtgtcagtgaacaccagttacaaaaggagattcagtgtttcagatagtgcaatatttccagctgctgaaaagaatttaaatgaaattacaaactacccctcctygtcaaaaatccacatgaagttgatattggtgcttataaatcactctctcccagtccctcactggttccaaccttcaggtgataaaaattaggatg

SEQ ID NO: 23567 - DNA, 1001 bp, Homo sapiens
aaagtgcctacaacagtgcctgacgccacgtagatgtctaacaaatatttatggaatgagaagttaacagaaaaaaaaaagtggaagcgggaggcagaagagtgatgtaatgtgagaaaacctcacaccactgttgctagaattgcagatggargaaggggccccgagccaaggatacaggcagcctgtaaaagctgaagaggacaagaaaatggattctccttcaaagtctccagaaaagaattccttggtttcagcccactaagacctgtgccggactcctgatccccagaactggaagataataaatctgtgttgtttttacccactcagtttgtggtcctttgttacaacagctggaggaaaataatgcaccctctgaagcatctccagtaaagccctacatcactgaagcacagctgggctagacaagcttcatcactgtggatcgtgaaggggctgagagtcactaggtctgtcctctaccccttttcttgcacagctggtggcagacactcagtactccgggacttggtgacacagcccagactggtggtatcagcttccctgggattccagggcccctacttcccctcctcctggcaggaggggaatcccaggtagcctcctcagcaatgccgaagttattttcagcttagcagctgaacatttcagcaaagagcagcttggaagtgtctcctggacccccagaggagaccttgttcctctccttgtgctgtaccctgccagatgtagccttgcacctgcctactccaactggtgcggtacccagagcatctctggtccaacaaactagctcaggacaggacagagggtcaagggagaccccaagtccatcccagtctggtctcccctatgccagaggtggaggttggactattctgcaggagaacagatgggcaggaatctcagggggtcctgaaacagatgaggtctcaacaagagccctagaacagtggttctcagcccagctagcacct

SEQ ID NO: 23568 - DNA, 808 bp, Homo sapiens
agacgttgatcagcgcccggtttgatctaaccaaaaggaagagagagagaccaacattagacattttaacttacaaaaaaataaaaaataaaaaagaggaaaggagacaattttctactccaagaggtattatgcacaagcaatttatgacaacttacatcacacctgatggcaagctaaaggacaagtttaagtcatcactcagtctgtctctctctacacacacacacacacacacacacacacacacacacacacacacacacayacatacacacacaatctgtactccggaatgtgaaagagctcccttcagttcttatggagtgatctggcccataatgtatctgaacctcagtctccacatctgaaaatgaagataataaccggaagccccaaggacgcgatcacaggaggtcacacacagcaatgcccagcgtttctggagcacccagcagtcacgctgcctcctcactgagctgactttagaccctgaccctgagcccattttaagatcagactccacaaacgagctcaggagaccaacactcatggcaacaagggtgacagctgtttaggatgggaggagggagggaccagagaaaatgacaagttagaaaaccaggctgatgggtacaaatacctctctttcagcttttccaaaaacactgtgtatatgggtccaatacaccaaggtttaaattcaaatgcaaaataatttactgagcacctaccacgcacagctccatgcttttacctatggtcaaatcatttatttctcacctcgcgtgggccaggtgaggcatgt

SEQ ID NO: 23569 - DNA, 808 bp, Homo sapiens
agacgttgatcagcgcccggtttgatctaaccaaaaggaagagagagagaccaacattagacattttaacttacaaaaaaataaaaaataaaaaagaggaaaggagacaattttctactccaagaggtattatgcacaagcaatttatgacaacttacatcacacctgatggcaagctaaaggacaagtttaagtcatcactcagtctgtctctctctacacacacacacacacacacacacacacacacacacacacacacacacacacatacacacacaatctgtactccggaatgtgaaagagctcccttcagttcttatggagtgatctggcccataatgtatctgaacctcagtctccacatctgaaaatgaagataataacyggaagccccaaggacgcgatcacaggaggtcacacacagcaatgcccagcgtttctggagcacccagcagtcacgctgcctcctcactgagctgactttagaccctgaccctgagcccattttaagatcagactccacaaacgagctcaggagaccaacactcatggcaacaagggtgacagctgtttaggatgggaggagggagggaccagagaaaatgacaagttagaaaaccaggctgatgggtacaaatacctctctttcagcttttccaaaaacactgtgtatatgggtccaatacaccaaggtttaaattcaaatgcaaaataatttactgagcacctaccacgcacagctccatgcttttacctatggtcaaatcatttatttctcacctcgcgtgggccaggtgaggcatgt

SEQ ID NO: 23570 - DNA, 1296 bp, Homo sapiens
gaaaatattcaccactgtgttctttgctcatccacataacggcatggggttgacagcaaaaggagcccgtggaggttacagagaggcggactcctgtcagaagtcccagccctggctttctgagtacctatgtacctcactgtgtacctggggccagttatttccgccttctgggtggtcctcagttattggtctgcaggcaagctccatcagcattatctaaggacctttcacaaatgcagggccaggagaagtggctcatgcctataatcctagcactttgggagactgaggcacgaggtttgcttgagtccagaagttcaagaccagcctgtgcaacacagccagaccttgtcgctgcataaattaacagaaaaaaaaattagctaggtgtggtggcatgygcctgtagccccagctgctcaggaggctgaggcaggaggatcccttaagcccaggagtttgaggctgcagtgtgctatgatcacgccactgtactcctacctgggtgacagtgcaagatcctatctgtaaaaaatttaaaattaaaataaaataaatgcaggctgggcaccatggctcatacctgtaatcctagcactttgtgagactgaggcaggtggatcccttgagcccaggagtttgagaccagcctgggcaacatagcaaagccctgtctctacaaaaaaatacaaaaattagccaggcatggttgtgcgtaactgtggccccaggtactcaggaggttgagttgggagaatcacctgagcacagggaggtcaaggctgcaagtgagccgtgattgtgccaccgaactccagcctgggcgacagagtgagatcccatctctaaataaataaagaagtaaatgaatgcagattgtggggtttcactgtagagattctaattcaccgggtctggggtgtggtctgatcctgtgaatatgcttaacccccagtgattcagatcacacccagagtgggaaaccatcaggcaaatgacagctgcggtggacctgtctttggtgctgaccagtgcagagctatgtggcctaagcacagactaagggaggatccccaagacgccttcattttaccacttgccttgagaatctggaaaagatgcagctatgtcttgccctgctcgggtgctggcattactggcacccccgtcagtcacctggaacttagcagtgaagcctaatccaccacaaacaaaaaacagtgatgttcaattatttccaaaatcagtgcattgggggcatctgcaaaagtctccaaaacaatgtgaaatgca

SEQ ID NO: 23571 - DNA, 672 bp, Homo sapiens
ggaacccgctccacattctgcatattcctagtggctctgccacagaacccacctctacccacaccctcacccccatgccatggcccaggcccggyatcacactaccccatgcaccaggtccggtccaccaaagcccttccctaaaaccaatgcacagtcaacacatggggagaaagtcttctgcccctggcagttgcatagtggggagccctgctccccggctgcaagacccagcctctcacccctacacttcattctgtgagctgccattgaattctagcagaatgagcgcctctcctctcgtcaactttttttccctcccacataaactagccaagctcctgtcactgtcaagtgaaggcatggacctagacagccctgtactcggacatcacagttaaggcagggtctgcccctgggcctacaggaggtgacgcgcggcacgtgtgtggcgttgctgctcttatacatagcgtgctgttccctggctctgcttcctgccatcccccttcttaggatgccctgcccagccttctctgcctgatcctcctgccaccagcccaggccaccttttctccagaagatgtgtcttcctgagcactccccataccagcctgggctaagtgcccaaaccctggacttctacagtcctggtgtgtgccccttactcat

SEQ ID NO: 23572 - DNA, 1003 bp, Homo sapiens
aaaattttctttttaccagtttaatttaactattgtcatttttaaaaaacttaatttgcggcaacaatgtttcaataaaattttggattaaatagtcccatgggtcccaatctgggggaccaggaggtacaaatagaagatgcgggtgagagagaaacattgtgaaccagagtaatggaggctgacacagatgcagagcagttgggtctttctggaatagcacgtgtctctgcctttggctgcgatatttcagctctgttattggcaggctttaataacaagcagggtaaccatcataacacttaaaactgatagacaaatgtggttcatgagtgtggaatgagaggcattcttggtggtaagtaatgattacggggccgggcatggtggctcatgtctgtaatctcagcactgtgggaggctgaggtgggtagatcacctgaggtcaagagtttgagaccagcctggccaacatagtgaaacccatctctactaaacatacagaaaacaattagctgggtatggtggtgggtgcctgtaatcccagctactcaggaggctgaggcaggagaatcgcttggaggcaggmgaatcgcttgaacccaggaggcggaggttgcaatgagccgagatcgtgccactgcactccagcctgggcaacagagtgagactctatctcaaaataaacagattaataaagtaaataaaaattagctggtcatggtggcacatgtctgtggactcagcttcttgggagaatgaggcaggaggattgcttgagcccaggagttcgaggctgcattgagcagtgatcatgacactgtaccccagcctgggcaacagagcaagacctgcctcttaaacatttaaggtaatgattagtactcattagatggtaaagcagccgtcattatgcgagatgcctctctgaagttatcctgggctttacagcaacccagaaggtacaggcattactggtccattgtacagatgagaaagtcac

SEQ ID NO: 23573 - DNA, 544 bp, Homo sapiens
taatttcataatggataaaaaataaagctgaaaaaaatccaagcctctttcctgttccattttgttccttcttttacaacaatagctttctgacatgtttcaagtttttgcactggtcagaaataatttagattctaatgtccttacatggagagaaccttaaatatctccggaaataaggtccactgaaacaccttccttgcaatttcraattaaatgtacctgtcactcccaaagcctccaggaatgctagtatgattatttttaactttttactgttgtatctcaattacctcaacttctaagtcagccgatctattaaattctcagggtagagcccactggggataaattttaaaattaaaaagatttttaagaatctactcttagaagttccatcataattttaaatttcactgaaaacaatttgaattttaacactcctctggagaaatttcaatcaagcctccagaaatagaaaaagagtaacatggcattgtaaaagggacacagaccaaaaaaagtcacaggttctttccataat

SEQ ID NO: 23574 - DNA, 544 bp, Homo sapiens
taatttcataatggataaaaaataaagctgaaaaaaatccaagcctctttcctgttccattttgttccttcttttacaacaatagctttctgacatgtttcaagtttttgcactggtcagaaataatttagattctaatgtccttacatggagagaaccttaaatatctccggaaataaggtccactgaaacaccttccttgcaatttcgaattaaatgtacctgtcactcccaaagcctccaggaatgctagtatgattatttttaactttttactgttgtatctcaattacctcaacttctaagtcagccgatctattaaattctcagggtagagcccactggggataaattttaaaattaaaaagatttttaagaatctactcttagaagytccatcataattttaaatttcactgaaaacaatttgaattttaacactcctctggagaaatttcaatcaagcctccagaaatagaaaaagagtaacatggcattgtaaaagggacacagaccaaaaaaagtcacaggttctttccataat

SEQ ID NO: 23575 - DNA, 636 bp, Homo sapiens
agcctcagaggccttgggagctcatccctctcacccagaatccctctaaccccttgggtgcggtttgctcagccccagcttatctcctcctccrcgctgtgtaaatgctccagcactcaataaagtgggctttgcaagctacctccttccctgcctcctggcaccgggtgggtcaagccacctccccataggagagtccctcagaagcaagggcatgttatgtctgtgtggggagtggacatcgtccatcatggctcccagcagccacctcctgctctgggtctactctccagcacctctagtctccaaagcaaagtcactctaaccgtcttgcaaagatctttaaagtgtatccagcactgctattttttagctcagaaataccttagaggtttcctacttaaaaggtttttttaaaatatatatatatatttaaaaataagggttttaaaaaagcacatatttgtatttaaacaattcattctctaaaagagaaacatgaacttaaataattttattaataggaatctactacctgtaaaagttttatttcaaaaagggttaaaaagtagggaaactctttaaactactgaccaagactgccaccttcataattcagatgagttagtgcagaga

SEQ ID NO: 23576 - DNA, 636 bp, Homo sapiens
agcctcagaggccttgggagctcatccctctcacccagaatccctctaaccccttgggtgcggtttgctcagccccagcttatctcctcctccgcgctgtgtaaatgctccagcactcaataaagtgggctttgcaagctacctccttccctgcctcctggcaccgggtgggtcaagccacctccccataggagagtccctcagaagcaagggcatgttatgtctgtgtggggagtggacatcgtccatcatggctcccagcagccacctcctgctctgggtctactctccagcacctctagtctccaaagcaaagtcactctaaccgtcttgcaaagatctttaaagtgtatccagcactgctattttttagctcagaaataccttagaggtttcctacttaaaaggtttttttaaaawatatatatatatttaaaaataagggttttaaaaaagcacatatttgtatttaaacaattcattctctaaaagagaaacatgaacttaaataattttattaataggaatctactacctgtaaaagttttatttcaaaaagggttaaaaagtagggaaactctttaaactactgaccaagactgccaccttcataattcagatgagttagtgcagaga

SEQ ID NO: 23577 - DNA, 626 bp, Homo sapiens
cctcaaaaaagaaggaagccaggcaagagagcagaggcccagggcgggggagtgaaagggccaatttaatgagaaactacaaactgagactgggccacgattcacagtgacaggaggccatgcagtggcagtgcgagaccaggaaggacagtggcaggatacagtggtccaggtgagcaagttcacaaaccattcaggaaataaagacagggcgaggctggtgtccaccaaggcagttctaccacttgtggctgctccttcctcgtccctagcccagtgtgcctgcaggagcaggtgtgagcaggcwcagcaacagcctgtcagctggggtgaggggcccggcacttacagggaagaaaatccatggagaaggctctgcacatccaagcgcacccacaagggggaccctctgccatctcttgcccagttgggatacaccagccaccaggcagaggtcatacccacacgcagtgaggacacagggcagacgggaaggggctaggctcaggggctccttccggccccagcaatacagggttcacagaggcatggcctgaaagggggtctgcacactgactcaaagggacaagttccttcttagctaccagggtctgatcattcaccca

SEQ ID NO: 23578 - DNA, 701 bp, Homo sapiens
aggcacccaggctggagtacagtggcatgatcatagctcactgtgacaactcctaggctcaagcagtcctcctgcctcagcctcccaagtagctgggattacaggcataagccaccatacctgtctacagtttggatttttttttttttttagatggagtctcgctctgtcaccaggctggagtgcagtggctcgatctcggctcactgcaacctccgtctcccaggttcaagcaattctcctgcctcagcctcctgaggagctaggactataggtacctgctaccacgcctggctaatttttgtatttttagtagagactgagtttcactatgttggtcaggctggtgtcgatctcctcacctcgtgatccgcccgcctctgcctcccaaagtgctgggattacaggcgtgagccaccgcgccyggcctggattttatttcaagtggaatttaaagcccttgaagagttttaagcagtagagttacagtcaatcttcattatttacggattttgtgtttgcaaatttgcctactcactaacatttatttctaatcccaaaatcaatacttgtggtgctttctcattcattcatggacataacgatcctgcacattctccactgaggtcaaataaggcaacactgggctgtcatggtggcactcgccttctatcccagccactcgggaggctgaggtggga

SEQ ID NO: 23579 - DNA, 540 bp, Homo sapiens
aagtgttgggattacagacgtgagccaccgcgatggggtctctccatgttacccaggctggtctcaaactcccatgctcaagcaatactccagcctcggcctcccaaagtgctgggattatatgcgtgactcactgagccctattaatatgactcttcttactaaaattttattccaatagtttgtaggcaaattataaaactgctaaacgggctactgaaatttttaytaggtatgtctttatcaaaactgtaataattcaaaaatttaaatatttttattatttatttattgagaccgggttttactcttgtcgcccaggctggagtgcaatggcgcaatctcggctcactgcaatccccgcctcccgggttcaagcgattctcccacctcagcctcctgagtagctgggatcacaggcagcgtcaccacgaccggctaatttcgtatttttagtagagacggcgtttcaccgtgttggccacgctagtcttgaacttctgaccttaggtgatccgcctgcctgggcttcctaaagtg

SEQ ID NO: 23580 - DNA, 660 bp, Homo sapiens
cagagaagcacctccttagggagggaccttctgttcacagggggacatctacccaccccaatgtccacagagtctcaaaagggacatgatgttccttaaaatgagctccgaaccagaatccaagaaaatggatgctcacacagtgtggctgagaactgacaaaaccagaaggaggacaatttgacccaagaactatagatgtccgctgtccttaaagaaggcaattacacctttcagaatgtaggcaaaggaagtctgcatgtgcacagagataggtcgataagaaaatattcacaatgaacatgtaattttctttaaaaagccaaggtttacaagtggaatgcctaatggctttcaattttaaagtttacacaacgtgcctaccttctacartactgataacaatacaaggtcacttgaaaaaggccatgcctaaataggaagctctccagttccaaagtagaaagacaaaaagccctctctctcctctatttgtggacaagaaactcattccctcccctaaataatttgtaccatctcccaagatttaaaaaaaacaagagagaaaatacagatgatgacatacagatttaaatacagaaataaagatttaaaaggaaaaagaagagcccatatatcttacttttatgaatgctgcag

SEQ ID NO: 23581 - DNA, 568 bp, Homo sapiens
tctcatcaactttgaacgatatttttttttttttttttttgagacagagtctcgctctgttgcccaggctggagtgcagtggtgcgatcttggctcactgcaagctccgcctcccaggttcatgccattctcctgcctcagcctcccgagtagctgggactacaggtgcccgccaccacacttggctaatttttttttgcatttttagtagagacggggtttcaccatgttagccagggtctcaatctcctgacctcatgatctgcccgcctcggccccccagaatgctgggattacaggcgtgagccaccgygcccagccaactttgaacaatatttaagaatttgtagcatgtctaaatgtaggtacatcatcaacccacaagtaattatactcaggtgaatttttcagactgatttaaaatttttttattattattatgttttttagacggagtatcactctgtcgctcaggctggagtgcagtggcaagatctgggctcactgcaacctctgcctcccgggttcaagtgattctcctgcctcagcctcccaagtagctgggatt

SEQ ID NO: 23582 - DNA, 568 bp, Homo sapiens
tctcatcaactttgaacgatatttttttttttttttttttgagacagagtctcgctctgttgcccaggctggagtgcagtggtgcgatcttggctcactgcaagctccgcctcccaggttcatgccattctcctgcctcagcctcccgagtagctgggactacaggtgcccgccaccacacttggctaatttttttttgcatttttagtagagacggggtttcaccatgttagccagggtctcaatctcctgacctcatgatctgcccgcctcggccccccagaatgctgggattacaggcgtgagccaccgtgcccagccaactttgaacaatatttaagaatttgtagcatgtctaaatgtaggtacatcatcaacccacaagtaattatactcaggtgaatttttcagactgatttaaaatttttttattattattatkttttttagacggagtatcactctgtcgctcaggctggagtgcagtggcaagatctgggctcactgcaacctctgcctcccgggttcaagtgattctcctgcctcagcctcccaagtagctgggatt

SEQ ID NO: 23583 - DNA, 1267 bp, Homo sapiens
atacatttacatgtcttttggaagatactgtgaacactgataattttaaagaggcctcatttagtttcattaatgaaaatgatatgcataagtactgcacactttcctctttacatgctaaaacttgaataatgacaaaaatatgctgtacactaagccagacataatttaaagcctccttttgttttcatgactcaggaccatcattaaacacacccataattgtccagtatcattccaagtagcttggggtctaaatctggactctgctatgggctcactcttcctgcttaattctgacttcctcccctttcctctttcagttttcattccgcttaacacagtcattaatagaaagtaaactcactgagagccaaaggatttctccaaaagaatcaagttcgtactttcaatgctaggctttcaaagctatatgatgagataagagtgccttccacatttccttagctgtgctttggagggggtatcaccaggacaaagcatctaacttctgtatggtacctcatatttttcaaagaagctcttacctattctctgtttcagtcatccacaataatcctgtgaatcaaactaggcagaatttaacttctaattaaaaaaatgtttatgggaaataatcgatttccctaagatcacatagaaaatcaattaaacaagcctgggcagtctacaaaaaaaaatttaaaaattagccaggccgggtgcagtggctcatgcctgtaatcccagcactttgggaggccgaggcgggcggatcacaaggtcaggagatcgagaccatcctggctaacacggtgaaaccccgtctctactaaaaaatacaaaaaattagccgggcatggtggcgggcgcctgtagtcccagctactygggaggctgaggcaggagaatgatgtgaacctgggaggcagagcttgcagtgagccgagatcgcgccactgcactccagcctgggtgacagagcgagactctgtctcaaaaaaaaaaaaaaaaaaaaattagccaagcacggtggctagcgcctgtagttccagctactgtgggggaaaggagcgggtgggggtggaggggtgctgaagtgcaagtatcgcttgagcccaggaaattgatgctccagtgagccatgactgcaccactgcgcttcagcctgggcaacagagcaagaccctgtctcaaagcaaattcaatgaacctgaaaaaaagaaaaagaaagaaagaaagaaataatggccaggcatggtggctc

SEQ ID NO: 23584 - DNA, 1184 bp, Homo sapiens
attctgaaaaatacaacacagttaattaattctaataccactccataaattttaagcagcaaccctggtagtgccaatatactagcaattccctcagcatatttgctcttaccacttagcacagttgctcacaaactgcactgttaggagtacagcgtcactagtaattaaaaggacagtcatagtaacattacactttggtgtgctaataattgctgaagtgtgagactagtggataataaactcattattataaagtacctcttaacctgctaagaactttacaatgatgactgatgtttttaagaatctatttttgaaaaatgatacttgcaaagcttttttttttttctttttttttctgagatggagtctcagtcacccaggctggagtacagtagtgcagtagtgtgatctcggctcactgcaacctccgcctctgggttcaagcaattcttctgcctcagcctcccgagtagctgggattacaggtgcccactaccacacctggctaatttttgtatttttaatagagatggggtttcgccatgttggccaagctggtcttgaactcctgggctcaagcgatctacctacttcagcattccagaatgctgggattacaggcataagccactgcacccggcaacaggtatttcttagtgtgtctaattcctggtccatattcataattttacagttgcctcaaaattatctgtttacagagagcttgtttacactgctgaagtccacatgttatgtttcctgtggggtcttctctttctctcttaatcttgaacagttcctccccggcaccacgtggttattctcacctcctggatcagttgtccaatatagtgtcyaaaaccttctggatttgtctgattgctaccttgtggtggtaaatttgtttttttatccttgtatttcctacaaactgacagttagatctacagactagattcgattcagatcagtcctattttacgttttttagagatgaggtcttgctccattgccgaggctggtcttgaactcctgggctcgagcgaccctcccgccttagcctcacaaagttctgaacttacaggtgtgagccacttgcaactggcctaaagtgtttttcttatgcttttaaaagcagattttttgttgttgtcgttgttgttacagataatatttct

SEQ ID NO: 23585 - DNA, 1184 bp, Homo sapiens
attctgaaaaatacaacacagttaattaattctaataccactccataaattttaagcagcaaccctggtagtgccaatatactagcaattccctcagcatatttgctcttaccacttagcacagttgctcacaaactgcactgttaggagtacagcgtcactagtaattaaaaggacagtcatagtaacattacactttggtgtgctaataattgctgaagtgtgagactagtggataataaactcattattataaagtacctcttaacctgctaagaactttacaatgatgactgatgtttttaagaatctatttttgaaaaatgatacttgcaaagcttttttttttttctttttttttctgagatggagtctcagtcacccaggctggagtacagtagtgcagtagtgtgatctcggctcactgcaacctccgcctctgggttcaagcaattcttctgcctcagcctcccgagtagctgggattacaggtgcccactaccacacctggctaatttttgtatttttaatagagatggggtttcgccatgttggccaagctggtcttgaactcctgggctcaagcgatctacctacttcagcattccagaatgctgggattacaggcataagccactgcacccggcaacaggtatttcttagtgtgtctaattcctggtccatattcataattttacagttgcctcaaaattatctgtttacagagagcttgtttacactgctgaagtccacatgttatgtttcctgtggggtcttctctttctctcttaatcttgaacagttcctccccggcaccacgtggttattctcacctcctggatcagttgtccaatatagtgtccaaaaccttctggatttgtctgattgctaccttgtggtggtaaatttgtttttttatccttgtatttcctacaaactgacagttagatctacagactagattcgattcagatcagtcctattttacgttttttagagatgaggtcttgctccattgccgaggctggtcttgaactcctgggctygagcgaccctcccgccttagcctcacaaagttctgaacttacaggtgtgagccacttgcaactggcctaaagtgtttttcttatgcttttaaaagcagattttttgttgttgtcgttgttgttacagataatatttct

SEQ ID NO: 23586 - DNA, 1184 bp, Homo sapiens
attctgaaaaatacaacacagttaattaattctaataccactccataaattttaagcagcaaccctggtagtgccaatatactagcaattccctcagcatatttgctcttaccacttagcacagttgctcacaaactgcactgttaggagtacagcgtcactagtaattaaaaggacagtcatagtaacattacactttggtgtgctaataattgctgaagtgtgagactagtggataataaactcattattataaagtacctcttaacctgctaagaactttacaatgatgactgatgtttttaagaatctatttttgaaaaatgatacttgcaaagcttttttttttttctttttttttctgagatggagtctcagtcacccaggctggagtacagtagtgcagtagtgtgatctcggctcactgcaacctccgcctctgggttcaagcaattcttctgcctcagcctcccgagtagctgggattacaggtgcccactaccacacctggctaatttttgtatttttaatagagatggggtttcgccatgttggccaagctggtcttgaactcctgggctcaagcgatctacctacttcagcattccagaatgctgggattacaggcataagccactgcacccggcaacaggtatttcttagtgtgtctaattcctggtccatattcataattttacagttgcctcaaaattatctgtttacagagagcttgtttacactgctgaagtccacatgttatgtttcctgtggggtcttctctttctctcttaatcttgaacagttcctccccggcaccacgtggttattctcacctcctggatcagttgtccaatatagtgtccaaaaccttctggatttgtctgattgctaccttgtggtggtaaatttgtttttttatccttgtatttcctacaaactgacagttagatctacagactagattcgattcagatcagtcctattttacgttttttagagatgaggtcttgctccattgccgaggctggtcttgaactcctgggctcgagcgaccctcccgccttagcctcacaaagttctgaacttacaggtgtgagccacttgcaactggcctaaagtgtttttcttatgcttttaaaagcagattttttgttgtygtcgttgttgttacagataatatttct

SEQ ID NO: 23587 - DNA, 1184 bp, Homo sapiens
attctgaaaaatacaacacagttaattaattctaataccactccataaattttaagcagcaaccctggtagtgccaatatactagcaattccctcagcatatttgctcttaccacttagcacagttgctcacaaactgcactgttaggagtacagcgtcactagtaattaaaaggacagtcatagtaacattacactttggtgtgctaataattgctgaagtgtgagactagtggataataaactcattattataaagtacctcttaacctgctaagaactttacaatgatgactgatgtttttaagaatctatttttgaaaaatgatacttgcaaagcttttttttttttctttttttttctgagatggagtctcagtcacccaggctggagtacagtagtgcagtagtgtgatctcggctcactgcaacctccgcctctgggttcaagcaattcttctgcctcagcctcccgagtagctgggattacaggtgcccactaccacacctggctaatttttgtatttttaatagagatggggtttcgccatgttggccaagctggtcttgaactcctgggctcaagcgatctacctacttcagcattccagaatgctgggattacaggcataagccactgcacccggcaacaggtatttcttagtgtgtctaattcctggtccatattcataattttacagttgcctcaaaattatctgtttacagagagcttgtttacactgctgaagtccacatgttatgtttcctgtggggtcttctctttctctcttaatcttgaacagttcctccccggcaccacgtggttattctcacctcctggatcagttgtccaatatagtgtccaaaaccttctggatttgtctgattgctaccttgtggtggtaaatttgtttttttatccttgtatttcctacaaactgacagttagatctacagactagattcgattcagatcagtcctattttacgttttttagagatgaggtcttgctccattgccgaggctggtcttgaactcctgggctcgagcgaccctcccgccttagcctcacaaagttctgaacttacaggtgtgagccacttgcaactggcctaaagtgtttttcttatgcttttaaaagcagattttttgttgttgtygttgttgttacagataatatttct

SEQ ID NO: 23588 - DNA, 1259 bp, Homo sapiens
cattcaaagttggtacttgttttggagactggtgttagtcatactaaatgtgttttgttgtttccagaacattgggtgctttctgcttgaagttaccaccaaagatccttcccttgtggtagcaggagaagctttggatgccctctttgatgtttttgcagatggtaaagaagccgaaagagcctcgattcaaattaaattattatctgctctgaaagaattccagccggtctttaaaatgaaggtttgtagccatttaacttataaatacataagtctgaacattctgtggggacaagggtgtgtgtagttaccgctgtgcaactcagaagcatgtgcatgacgaatccccatatgtagcacagcatccccagtactttgtaaaatgttcgttgactgagtcatagctcaacagtgtgactaytgaatcattgaaactgaagctaaaatggtatctgacaagttcttctttttttaagtttagtaattttgacaatgcttcatatatgtcagtattatactctgtattttgcaaagcactttcatacacattttgcatttatttaatttacttttttttgttttttgagacagaatctcactctgtcgcccatgctggagtgcagtggtgcgatcttggctcactgcgacctccccttccccagttcaagtgattcttgtgcctcagcctcccaagtagctgggattacaggtgtccaccacatcacccaaataatttttgtatttttagtagaaacggggattcgccttgtcatccaggctggtctcgaactcccaacctcaggtgatctgcccaccttggcctcccaaagtgctgggattacaggtgtgagccactgtgcccagccatattgttcttaaaggttacagtcctttaaatttctggataaagagcttgcaagataagaaaaaaatatcccctatttccctgcagcttcaaggaaagcagatatattaatagttagagtcatcaaactctgcagaagcaggtgcttaaaaaaggttaaacagtgaactgggaaaataacccctgacttctgaaaggtctttgttctgattgattttcctactcagtatgtattgctgtggtaataacatttgtttttcttttatcaaaggtataaagctctaatgagatttcttcctagccagaggctagcctgtagttatttatgtgaaactcttttttttgctaaatgaagccacaatttgtgttaaaggctattcagtgtatattt

SEQ ID NO: 23589 - DNA, 564 bp, Homo sapiens
aatactatacatccataaaaaggaatgaaatcatgccatttgcaggaacatggatggaactggaagccattatcctcagcaaactaacacaggaacagaaaagcaaacaccgcatgttctcacttataagtgggaactgaacaatgagaacacacrgacacagggaggggaaaaacacacactgggtcctgttgaggggatacggggagagacagcatcaggataaatacctgatgcatgcggggctcaatacctaggtgatgggttgataggtacagcaaactaccatggcacatgtttgcctatgtaacaaacctgcacatcctgcacatgtatcccagaactcaaaatttaatttaatttaatttaattttttttaaaaagtgggaggcaaagaagtaaagcagttgcccagaaaaggcaagctgctagaaccacaagaagagaggggtgcagattaccacttgcttctccaagcacaagttacttgaaggaccttttctatcctatgtggctcaggactctatgctagattcgactctcagtggatgctcagttactgct

SEQ ID NO: 23590 - DNA, 564 bp, Homo sapiens
aatactatacatccataaaaaggaatgaaatcatgccatttgcaggaacatggatggaactggaagccattatcctcagcaaactaacacaggaacagaaaagcaaacaccgcatgttctcacttataagtgggaactgaacaatgagaacacacagacacagggaggggaaaaacacacactgggtcctgttgaggggatrcggggagagacagcatcaggataaatacctgatgcatgcggggctcaatacctaggtgatgggttgataggtacagcaaactaccatggcacatgtttgcctatgtaacaaacctgcacatcctgcacatgtatcccagaactcaaaatttaatttaatttaatttaattttttttaaaaagtgggaggcaaagaagtaaagcagttgcccagaaaaggcaagctgctagaaccacaagaagagaggggtgcagattaccacttgcttctccaagcacaagttacttgaaggaccttttctatcctatgtggctcaggactctatgctagattcgactctcagtggatgctcagttactgct

SEQ ID NO: 23591 - DNA, 564 bp, Homo sapiens
aatactatacatccataaaaaggaatgaaatcatgccatttgcaggaacatggatggaactggaagccattatcctcagcaaactaacacaggaacagaaaagcaaacaccgcatgttctcacttataagtgggaactgaacaatgagaacacacagacacagggaggggaaaaacacacactgggtcctgttgaggggatasggggagagacagcatcaggataaatacctgatgcatgcggggctcaatacctaggtgatgggttgataggtacagcaaactaccatggcacatgtttgcctatgtaacaaacctgcacatcctgcacatgtatcccagaactcaaaatttaatttaatttaatttaattttttttaaaaagtgggaggcaaagaagtaaagcagttgcccagaaaaggcaagctgctagaaccacaagaagagaggggtgcagattaccacttgcttctccaagcacaagttacttgaaggaccttttctatcctatgtggctcaggactctatgctagattcgactctcagtggatgctcagttactgct

SEQ ID NO: 23592 - DNA, 564 bp, Homo sapiens
aatactatacatccataaaaaggaatgaaatcatgccatttgcaggaacatggatggaactggaagccattatcctcagcaaactaacacaggaacagaaaagcaaacaccgcatgttctcacttataagtgggaactgaacaatgagaacacacagacacagggaggggaaaaacacacactgggtcctgttgaggggatacggggagagacagcatcaggataaatacctgatgcatgcggggctyaatacctaggtgatgggttgataggtacagcaaactaccatggcacatgtttgcctatgtaacaaacctgcacatcctgcacatgtatcccagaactcaaaatttaatttaatttaatttaattttttttaaaaagtgggaggcaaagaagtaaagcagttgcccagaaaaggcaagctgctagaaccacaagaagagaggggtgcagattaccacttgcttctccaagcacaagttacttgaaggaccttttctatcctatgtggctcaggactctatgctagattcgactctcagtggatgctcagttactgct

SEQ ID NO: 23593 - DNA, 813 bp, Homo sapiens
cttgctgtgtgtctttaggtaagccgctttacctctctgtaccccagtcagcttatctacaaaatggagaggaataacatcycatcctctggtttgttgtgagaaatgagcagtacattgcagttagtattgtgacaggtaatagtaagcactgaatcagcaagacccattgctgtcgacatcatcattatgtcattgttgttacctgcaaactctagtgggtggaatcaagcagatttaattttgaaagtatgcagatttcactaggatagtaaaaactgtggcctgttgtaccattagatatttattatttgcctccagtcctgatatggtaactttgaagaatgtctgcccataggagaagctaagaggttttttaattagttaattctaatattaagtaagtaacatattgccttgaaaggaaaacattcaagcctcctttctttctctttatcctcttcttcagttgcccaaggagaaggaatttccgtggtctggtcagttttgtgaacacttattgggctgaagggtgaaggcaccatgttaggaggtctgtgcacataagagagtaaagagacagagtgagtccctgatggagaagactcagcagcctatcttacctcctgcctcttctcccacatggcaccagccctggcacagcactaagccagcctggtaccagatgctggaaattggtgcttccattctcacaattgcactctctgattacagccttctagctctggaaggggtggaatggctcagtctttcctcttcaggtcttgaccacataggcagagcagaactggc

SEQ ID NO: 23594 - DNA, 813 bp, Homo sapiens
cttgctgtgtgtctttaggtaagccgctttacctctctgtaccccagtcagcttatctacaaaatggagaggaataacatctcatcctctggtttgttgtgagaaatgagcagtacattgcagttagtattgtgacaggtaatagtaagcactgaatcagcaagacccattgctgtcgacatcatcattatgtcattgttgttacctgcaaactctagtgggtggaatcaagcagatttaattttgaaagtatgcagatttcactaggatagtaaaaactgtggcctgttgtaccattagatatttattatttgcctccagtcctgatatggtaactttgaagaatgtctgcccataggagaagctaagaggttttttaattagttaattctaatattaagtaagtaayatattgccttgaaaggaaaacattcaagcctcctttctttctctttatcctcttcttcagttgcccaaggagaaggaatttccgtggtctggtcagttttgtgaacacttattgggctgaagggtgaaggcaccatgttaggaggtctgtgcacataagagagtaaagagacagagtgagtccctgatggagaagactcagcagcctatcttacctcctgcctcttctcccacatggcaccagccctggcacagcactaagccagcctggtaccagatgctggaaattggtgcttccattctcacaattgcactctctgattacagccttctagctctggaaggggtggaatggctcagtctttcctcttcaggtcttgaccacataggcagagcagaactggc

SEQ ID NO: 23595 - DNA, 786 bp, Homo sapiens
catgattaaccttcatcaatcttgcccctcaaagatttcacgatctggtagatttaaaagtttcagtttacatgccagtttatgtgagtatgagtctacatatgtgtttttattttaattattcttggtggaaacatttctaagattattatagaggtcacctcttttaaacagagcaggcagcttagcacagtctaccctttgcctggagttccaaggctgtgattgagactcccaaatctgcatgaccctgtgaggcagagcaaccctctacagtccttattgtgatttttgtcatattcatattgttcctgtcccatcaccatcctctgccacccaccagcagcaagattcttcctgctcttaagagtccaccatattcaataagcgtttgtaatacagcaacagcttgaaagtaattcttccccacccttctggctctccagacatgtccaggacaccttcctccattcatgagctcttgaaaatrggcactattattatgcccattttacagatgaggaaattgagtctcagataggttaagttacttgccctgaagtcacagtagcagagctggaacttatatccaaactgactgactcccaagatcaaattcctattcactccactatactattaggagtttgtcacttgtagatgggggatgatcagagagctgcttgactctatccaaatctggacagttacaggttttaaaacagtcacaactggataacctacaggtattttctgaacacctagtgctgtcagagatatgaaata

SEQ ID NO: 23596 - DNA, 805 bp, Homo sapiens
tctggccttcgtctttctcctgtgctggatgcttcctgcccttgaacatcagactccaaattcttcagcttttggacacttgactctatatcagtggtttgccaggggctctcgggcttttggccacagactgaaggctgcactgtcggcttccctacttttgaggttttgggacgcagactggcttccttgctcctcagcttgcagatggcctactgtgggacctcaccttgtgatcatgtgagtcaatactccttaataaactccccttcatatatacatctatcctgttagttctgaccctcratggaaccttgattaatacaccacaattattccaaaatatttaaggtttatttaaaaaataatctagattgccttatgccttatgggaagccccataccttccccgaattttctgtgactaccagtgtaatgtctggctccaaaatcctggtcctgttgggccctggagcttctgtaaatcttgcttccagtggctgctatcttgtctctttgatttctcctgaaacctctcacacgaagtcattgtgtgtaaatacattctactgaaggcttggggtcaacagagggaaagaattacatctttagtttaattagatcccatttgtcaattttggcttctgttgccattgcttttggtgttttagacatgaagtccttgcccatgcctatgtcctgaatggtaatgcctaagttttcttctagggtttttatggttttaggtctaacgtttaagtctttaatccatcttgaattgatttttgtataaggtgtaaggaag

SEQ ID NO: 23597 - DNA, 573 bp, Homo sapiens
tcatagttttatgaagacatgggttagaaattcttatagagacttaatccttcttgcattaaaaacttttaaaatatgtgaatcatggaattattttactttttttttttttttttttttttgagatgaaatctcgcgctgttgcctgggctggaatgcagtggcacgatctcggctcactgcaacctcggcctcccaggttcaagtgaatctcttgcctcagcctcctgagtagctgggattacaggcacccaccaccacgcccggstaattttttgtatttttagtagagactgggtttcactatgttggccaggctggtcttgaactcctgacctcgtgatccgcctgtcttggcctcccaaagtgctgggattacaggcatgagccaccgcgcccagcctatattttactttttaatatcatatcctatattagaaataccaatgtaaacatgttacttcctgtgaaatgtaaaaaatacttgggaaatgatttgataggaaataaatgagatctgggagctgaaaaattatttaacaaattcagattttttcaagatataattgggtt

SEQ ID NO: 23598 - DNA, 1181 bp, Homo sapiens
tttgtccccaacaggctctctcctcctgcccaaccctcccctcaccataatcattgtgctttgcactcaggatggtagagggattagggaggggtgggggagcactggctggggagtccagaaacccccaaacatcacattccctctccaagcctcagttcccccgtctgtaaaaggggaagataatttctgccatgcctcctccatattggagaccacagtgggcagcttagaggttattccgagtatgggtttggtcctagctctgtcatctgtggggcctccacgcaagccatttgccttctctgaacctatttccgcatctgcaaagtggaaatcaaagagggcttggctcggaggagacaaggcatgtacagcacttgactcagaggctgttctaagagaagcagcggcctctgagcaccaaggagtctgtgccagtgcagggcattctgctttttctactgcacttcccaaccatcaaagcccttccttaggccatctcaggtcttagcccagagaagttcagcaagctatctaagggtcacacagcaaaggagtcatcagccaggttcaccgactcctgtcctaggctgtttttcctccagaacacgaggcttcagcggagctttaggcatctggtgggcgggggctggatggggctctgcatccaagggtggtctcgtgaggggtgctcctggtgtacttggcaagggcagggacttgactgcaccccagtgtccgaacagtttcggcccattgtaggggctcaataggtggacaggtgctgtgccctgggagccccggagaggctcccagatttggaaatggctgggtggggtccagtccaggatgaaaggccctgccactgctgcccctgaggacagagagggcttagggtgacagatgyacccgtgtggggaggcaggagggtggacaagaccacgggtgtcagatccgtccagcagtgggcaccctggtctgtggtcactgagggctaaggtctctgtggtgatttctgctgccgcaagtcctcttctcaggatctgggtggatgaggggagtggcctggatgactcagagactcaaggatgagtccagcagtcaccagcagccagtgtccagcagggtgtctcaagccttggcacacagttacagtcacaaggggagagtgccacagg

SEQ ID NO: 23599 - DNA, 1181 bp, Homo sapiens
tttgtccccaacaggctctctcctcctgcccaaccctcccctcaccataatcattgtgctttgcactcaggatggtagagggattagggaggggtgggggagcactggctggggagtccagaaacccccaaacatcacattccctctccaagcctcagttcccccgtctgtaaaaggggaagataatttctgccatgcctcctccatattggagaccacagtgggcagcttagaggttattccgagtatgggtttggtcctagctctgtcatctgtggggcctccacgcaagccatttgccttctctgaacctatttccgcatctgcaaagtggaaatcaaagagggcttggctcggaggagacaaggcatgtacagcacttgactcagaggctgttctaagagaagcagcggcctctgagcaccaaggagtctgtgccagtgcagggcattctgctttttctactgcacttcccaaccatcaaagcccttccttaggccatctcaggtcttagcccagagaagttcagcaagctatctaagggtcacacagcaaaggagtcatcagccaggttcaccgactcctgtcctaggctgtttttcctccagaacacgaggcttcagcggagctttaggcatctggtgggcgggggctggatggggctctgcatccaagggtggtctcgtgaggggtgctcctggtgtacttggcaagggcagggacttgactgcaccccagtgtccgaacagtttcggcccattgtaggggctcaataggtggacaggtgctgtgccctgggagccccggagaggctcccagatttggaaatggctgggtggggtccagtccaggatgaaaggccctgccactgctgcccctgaggacagagagggcttagggtgacagatgcacccgtgtggggaggcaggagggtggacaagaccacgggtgtcagatccgtccagcagtgggcaccctggtctgtggtcactgagggctaaggtctctgtggtgatttctgctgcygcaagtcctcttctcaggatctgggtggatgaggggagtggcctggatgactcagagactcaaggatgagtccagcagtcaccagcagccagtgtccagcagggtgtctcaagccttggcacacagttacagtcacaaggggagagtgccacagg

SEQ ID NO: 23600 - DNA, 916 bp, Homo sapiens
ccccctcgtgtccagccctggggatgagtcccagtcagacacaattactgaggtctttaatcatgtgctgcaaagagcctggcccactcccctactctccgggccgctacgcaaccccaaacccaatctccatccctgtctgctgtaggtgtgcttttctggtttatttgagtggacagtggccatctgactctcagcttctgggcccagagggaggagacccagcccagcatggctgtccacagggcagcagataaagccctggcttacagtcacgtttttccttcacttgacttggctgattgagagcagggcaggtaatgaagctgctgcccctctggatcagccaacagctcctgggttgggctgaaatgtctaaacccacccctgtcctcaggccttggggccaccaaaatgccctctcctgcctgtggacttctgccaactgccagctcggacagtggtttgtcatctttaaaatgagattaacaataatcatggctgccactgacatagcactgttcaagggctttcaatgcagtaaaagccctgccgcaacatcaaagatggagtacaaagtatttgattccacgcagaataaagtcacatgtgaggttaaccaggaattctggggaaccaattctaactgggttcagactcataccatcaggttttacttttggcccttgtaacaactgtctgaaatagttaccattacccatttcacagaccaaagtagaccgacgcccagggagctgcatacacttccccaaagacacacagcccttgaggtgtggggatgggatttgaayccaggagatagagctccggagtttccactttaaccaccaccccaggctgcctcccagagctggggtgaagatccagtgagctcatgctaaaaagtgcttagtgt

SEQ ID NO: 23601 - DNA, 916 bp, Homo sapiens
ccccctcgtgtccagccctggggatgagtcccagtcagacacaattactgaggtctttaatcatgtgctgcaaagagcctggcccactcccctactctccgggccgctacgcaaccccaaacccaatctccatccctgtctgctgtaggtgtgcttttctggtttatttgagtggacagtggccatctgactctcagcttctgggcccagagggaggagacccagcccagcatggctgtccacagggcagcagataaagccctggcttacagtcacgtttttccttcacttgacttggctgattgagagcagggcaggtaatgaagctgctgcccctctggatcagccaacagctcctgggttgggctgaaatgtctaaacccacccctgtcctcaggccttggggccaccaaaatgccctctcctgcctgtggacttctgccaactgccagctcggacagtggtttgtcatctttaaaatgagattaacaataatcatggctgccactgacatagcactgttcaagggctttcaatgcagtaaaagccctgccgcaacatcaaagatggagtacaaagtatttgattccacgcagaataaagtcacatgtgaggttaaccaggaattctggggaaccaattctaactgggttcagactcataccatcaggttttacttttggcccttgtaacaactgtctgaaatagttaccattacccatttcacagaccaaagtagaccgacgcccagggagctgcatacacttccccaaagacacacagcccttgaggtgtggggatgggatttgaatccaggagatagagctccggagtttccactttaaccaccaccccaggctgcctcmcagagctggggtgaagatccagtgagctcatgctaaaaagtgcttagtgt

SEQ ID NO: 23602 - DNA, 1050 bp, Homo sapiens
tgtttcccttgaattccaagcacatatgtcgaaaaggaatcgcaaatgaaggatgagctctgtggactctggcagcgtctgtgtatgtgagaggctcagmaaacgatgtctttgggtatgtggggtcgttttacatacatgtaaatttgaacgtactgcctggatgcttatacctactaactctcaccttttgtgaacctgaaagattgaaataaagaaaagaaaaccagagaatggattaacacttgatttgatttattccttagtaaaatctatgtgaagatccaaaaaatgagcttgatcttaaaatcagcatccatatccttccatctgatagatcccaaagtttccaaccttccacctcttggcttaatttttctgatgtctgttctaagtttggtccagctattggcccttctcccctgcctcttattcctctgcctcgactaagttaaattcttggttgcatggttgtctctcccgggcacctgcttagacattagtccaagattagaagtgctggatttcacggaaactaattcctagaactgatccgtgggaaaaaaaagatattgctccctagagcgcttttcaatggagatctctctgtctttggaataggatggttctccctgtcttttcaggtaactttaaaccccaaaagagaagaaaaaatatggaagccagccccaggctgggcctgtatatggcaagttctttctgagaacaaagtgagttagaataaagaacaaatactctcccttttaaggggtaaacagatcccaccccagccttcttgcagactccaggagcttagtcctagagcttgggttgggagggaacccaatctctccttgacacagtggcaaactgtggacaatagggcacagattgtcgagtcagctaggcctggcctcaatggctgaagtccatccctgctatacagtaactatgtgaccttgaggaaggacctgaatcactctgagtttccagggttgcgatttttcatgatggggacaaggcagtgacatttgcaattttatcagggtt

SEQ ID NO: 23603 - DNA, 1050 bp, Homo sapiens
tgtttcccttgaattccaagcacatatgtcgaaaaggaatcgcaaatgaaggatgagctctgtggactctggcagcgtctgtgtatgtgagaggctcagaaaacgatgtctttgggtatgtggggtcgttttacatacatgtaaatttgaacrtactgcctggatgcttatacctactaactctcaccttttgtgaacctgaaagattgaaataaagaaaagaaaaccagagaatggattaacacttgatttgatttattccttagtaaaatctatgtgaagatccaaaaaatgagcttgatcttaaaatcagcatccatatccttccatctgatagatcccaaagtttccaaccttccacctcttggcttaatttttctgatgtctgttctaagtttggtccagctattggcccttctcccctgcctcttattcctctgcctcgactaagttaaattcttggttgcatggttgtctctcccgggcacctgcttagacattagtccaagattagaagtgctggatttcacggaaactaattcctagaactgatccgtgggaaaaaaaagatattgctccctagagcgcttttcaatggagatctctctgtctttggaataggatggttctccctgtcttttcaggtaactttaaaccccaaaagagaagaaaaaatatggaagccagccccaggctgggcctgtatatggcaagttctttctgagaacaaagtgagttagaataaagaacaaatactctcccttttaaggggtaaacagatcccaccccagccttcttgcagactccaggagcttagtcctagagcttgggttgggagggaacccaatctctccttgacacagtggcaaactgtggacaatagggcacagattgtcgagtcagctaggcctggcctcaatggctgaagtccatccctgctatacagtaactatgtgaccttgaggaaggacctgaatcactctgagtttccagggttgcgatttttcatgatggggacaaggcagtgacatttgcaattttatcagggtt

SEQ ID NO: 23604 - DNA, 1050 bp, Homo sapiens
tgtttcccttgaattccaagcacatatgtcgaaaaggaatcgcaaatgaaggatgagctctgtggactctggcagcgtctgtgtatgtgagaggctcagaaaacgatgtctttgggtatgtggggtcgttttacatacatgtaaatttgaacgtactgcctggatgcttatacctactaactctcaccttttgtgaacctgaaagattgaaataaagaaaagaaaaccagagaatggattaacacttgatttgatttattccttagtaaaatctatgtgaagatccaaaaaatgagcttgatcttaaaatcagcatccatatccttccatctgatagatcccaaagtttccaaccttccacctcttggcttaatttttctgatgtctgttctaagtttggtccagctattggcccttctcccctgcctcttattcctctgcctcgactaagttaaattcttggttgcatggttgtctctcccgggcacctgcttagacattagtccaagattagaagtgctggatttcacrgaaactaattcctagaactgatccgtgggaaaaaaaagatattgctccctagagcgcttttcaatggagatctctctgtctttggaataggatggttctccctgtcttttcaggtaactttaaaccccaaaagagaagaaaaaatatggaagccagccccaggctgggcctgtatatggcaagttctttctgagaacaaagtgagttagaataaagaacaaatactctcccttttaaggggtaaacagatcccaccccagccttcttgcagactccaggagcttagtcctagagcttgggttgggagggaacccaatctctccttgacacagtggcaaactgtggacaatagggcacagattgtcgagtcagctaggcctggcctcaatggctgaagtccatccctgctatacagtaactatgtgaccttgaggaaggacctgaatcactctgagtttccagggttgcgatttttcatgatggggacaaggcagtgacatttgcaattttatcagggtt

SEQ ID NO: 23605 - DNA, 1050 bp, Homo sapiens
tgtttcccttgaattccaagcacatatgtcgaaaaggaatcgcaaatgaaggatgagctctgtggactctggcagcgtctgtgtatgtgagaggctcagaaaacgatgtctttgggtatgtggggtcgttttacatacatgtaaatttgaacgtactgcctggatgcttatacctactaactctcaccttttgtgaacctgaaagattgaaataaagaaaagaaaaccagagaatggattaacacttgatttgatttattccttagtaaaatctatgtgaagatccaaaaaatgagcttgatcttaaaatcagcatccatatccttccatctgatagatcccaaagtttccaaccttccacctcttggcttaatttttctgatgtctgttctaagtttggtccagctattggcccttctcccctgcctcttattcctctgcctcgactaagttaaattcttggttgcatggttgtctctcccgggcacctgcttagacattagtccaagattagaagtgctggatttcacggaaactaattcctagaactgatccgtgggaaaaaaaagatattgctccctagagcgcttttcaatggagatctctctgtctttggaataggatggttctccctgtcttttcaggtaactttaaaccccaaaagagaagaaaaaatatggaagccagccccaggctgggcctgtatatggcaagttctttctgagaacaaagtgagttagaataaagaacaaatactctcccttttaaggggtaaacagatcccaccccagccttcttgcagactccaggagcttagtcctagagcttgggktgggagggaacccaatctctccttgacacagtggcaaactgtggacaatagggcacagattgtcgagtcagctaggcctggcctcaatggctgaagtccatccctgctatacagtaactatgtgaccttgaggaaggacctgaatcactctgagtttccagggttgcgatttttcatgatggggacaaggcagtgacatttgcaattttatcagggtt

SEQ ID NO: 23606 - DNA, 1001 bp, Homo sapiens
aggtaactgtgtgacaaggacttgatccaagagtgtgttgggcaatagggtgaagtgggctccaggttaaacattggctatagggatttacaaaagagttcactgagagtgggcctgacttcctctgctactgctgtttcctgttgtttccagtaactgcacttgagctctgcatacggttaactttcaattatcctgaggctgatkaactggtttgcagattaaccaaggtgaaggctcacctgggcctgggagtcgctcatcaactcagctgctccataattagctggtgatggctgattgcctgccccatggttgggaagcctgggcactgggcgactgcaggggagggggaccaagggatgacttcttccaggaccttctactctctccaaccagaggtgccctctagccctgtaaacttctgcattctccagcacagttcctgagaggttcagaagttacctgggtcctggtgctctgctcctgctacctttcagctcctgcccccaacaccctgttcaaattgggaacaagttgaccacagggcacagtgaatttgaaagtccggagattaagtcatatgttgaaagagggcccagtgagcaggggccactaatcccctttcttcctcaacctaggaacctcctcccttcccaagatatagatatatatagattgagaccctgagcaatggatctcttttgaggccagtggagaccaagaccactgaagcaaggagtcagggactgcccacaacagcaaagctccccagagtccaggccaccccatggtgattgtttgggttccctgtgattgcctcccatggctgccctcgttcatagagagttgactgcatttgcctgggtccctgtggggtgagagtatggaagtatgtgtattagtcacaccttacaccagaccagaagatatacagtttaacctaggagtcaagctcctgctatatttggaatggtctcagttttgagacgtggtacctt

SEQ ID NO: 23607 - DNA, 1221 bp, Homo sapiens
ggcatgaagtcatttcctccaagagatttgaagatgccccagaagaatcttaggctaaggtcactattcttaagctaaggtcactattcttattcctctgagaaaggtgaaaggtgggttgggtgcagtggctcacgcctgtaatcccagcactttaggaggtcgaggtgggtggatcacgaggtcaagagatcgagaccatcctggccaacacggtgaaaccctgcctctactaaaaatacaaaacttagctgggcatggtggcacgtgcctgtagtcccagctacttgggaggctgaggcaggagtcgcttgaacccaggaggctgaggttgcagtgagctgagatcgcaccactgcgctccagcctggtaacagagtgagactccacctcaacaacaacaacaacaaaaaggtgaaaggtgtttgatggatgaaaatagagctgaaccctaacttgtaaccacycaattttaactagaggttgtcaccaagtaagagatgcccatcgaccttgtgcacaaagctggcgctagtctatgaactgttggtgaagtcacactatgaaacaacgtctctaccacccattcccataccatcagccatcctgctctggcatatgagcaggggaattcttttccgtcctctctgaaggaacgaatagtctgaaatattgaattggaaaaatgctcaaggcatccattctactctcgtgggccccatgtagttatctgttgaaggcctcggatgtgccagagacaattcatttgttgtcattagttccccccacaaccctcagaagtgagtataccttcatgtcacagatgagattatgttcaaaacggtttagaagctgctcaaggtcacatacccactaggtgacagatttgaatccagaattgtactcctcaacacagagcccccttctcactatgccggagatgctgagtttcttggcctgggctgcagccccacacagccggttttgagctccccaggtgaatctactgggctccctgggctgagaaccactgctctacatcagccttcttacatgaatcaggggttttattccgccttgcatcacaggttcctttagggaagtaaaaaaaaaaaaaaaaaaaaaaaaagctacaagtcttctctacagcaaaataaatgtttatacataaaaagttgcatacaatttcagataattatggcatctctgaagcctctgcgt

SEQ ID NO: 23608 - DNA, 412 bp, Homo sapiens
ttaagttttagggtacatgtgcacaacgtgcaggttagttacatatgtatacatgtgccatgttggtgtgctgcacccagtaactcgtcatttaacattaggtatatctccaaatgctatccctcccccctccccccaccccgcaacaggccccggtgtgtgatgttccccttcctgtgtccatgtgttctcattgttcaattccccttttggagactgggagcaatagaatgtagctgcccctggtgagagaaaakggtgagaagaaaaaaggatgtgtgtttggatgaaaagtagcttctaatatcatggactacatcaacagttttgcagattcataagtgggagcatctctgcaaaggagcagagaaaccagaaaatgcaaaaaagccccaaatagcaagccctcaca

SEQ ID NO: 23609 - DNA, 412 bp, Homo sapiens
ttaagttttagggtacatgtgcacaacgtgcaggttagttacatatgtatacatgtgccatgttggtgtgctgcacccagtaactcgtcatttaacattaggtatatctccaaatgctatccctcccccctccccccaccccgcaacaggccccggtgtgtgatgttccccttcctgtgtccatgtgttctcattgttcaattccccttttggagactgggagcaatagaatgtagctgcccctggtgagagaaaatggtgagaagaaaaaaggatgtgtgtttggatgaaaagtagcttctaatatcatggactacatcaacagttttgcagattcataagtgggagcatctctgcaaaggagcagagaaaccagaaaatgcaaaaaagccccaaatagcaagccctyaca

SEQ ID NO: 23610 - DNA, 904 bp, Homo sapiens
atacataaataaagagtgtaattggattgtttatagctcaaaggataaatgcttgaggggatggataccccattctccatgatgtgattatttcacattgcaggcctatattaaaacatctcagataccctataaatatacacctactatgtatccaaaaaaagactttttttttatttttattttgagattgtctcggtctgtcgcctaggctggagtgcggtggcatgatcttggctcactgcaacctctgcctccctggttcaagccattctcatgcctcagcctcccaagtagctgggattacaggcatgcaccaccatgcccggctaatttttgcatttttagtacagacagtgtttcactatgttggccaggctggtctcgaactcctggccttaagtgatctgcctgctgtggcctcccaaagtgctgggaggtgtgagccaccatatctggccataaaattaattatttttttwaaaaaatacaaagggcagggttaaagaatgaaagtgactcatcagacagacaaaagtggaataaggaatctggggaagaaggactaacggtgggactgaaaactgccctctacttatattttcctcaataaatgagaattacaaattaaaaaaaaaaaaacactgctccactgtaccatatttatgtacacagaatatcccacatgggctgaaatttccattcttaaagccatgttttgcccttaacaggaatatatgtaagtcagggaaagacatgaagtctactgttatatcttgattgaaggctttgccagcacaaggattgtttgacaacctgggtgtttttatgcacccagcgaataaatgataataagatgagaagtgagtcaggtcacacttttcttttgtaagataaaaggaca

SEQ ID NO: 23611 - DNA, 651 bp, Homo sapiens
ggccaaatgcatgtgaatttttatgttcaattattccaggttccctgctcggggcccatgggcttccccatgtacaacccaccggtaggtccccgcccagtccatgctcctcaaaggccagcctcacacccatcccacgtcctcttggctggtaaacactctcccccttcttccttctccctccacatctcaactgctggaagggaagagctcctcagtctacttggagtccctcctgcacaagaggatccagggtggtccaggagggccaaacccacctctttgggtgcacccctgggcagtggattggggatccagggcttgtgggggtatgcacccaccagggcaggtccctcaggctcactctccctgcgcctcagtttcctctcctgaaaaatgggcttgtgactaaatgttgcagggagctgctgagaaaacgcctgctgaaagcttggcaggaggtcattgtgaccagggatggggctgggtgcttcggtcaggccagggctggaggcaggggctcacactggggtcagcagtgcaggggcgtggctggcgtggcaggcgcatggggatyggctcatcagttgcggcctcacgtcccttcgttatggcgcctgcagaagatgttctctgattagtctgctgaat

SEQ ID NO: 23612 - DNA, 1145 bp, Homo sapiens
ttctgccaccgagcgtcacctcgtcatgcaggcaggcacacacgaccaccaggcctggggatgatgcccctcaacatagctcactgcaccccgtctgatctggcttccccaacctccccagcccttcgaaaccacgtggggctggctcccacccacatcctgttcccctgacctctgtgctggcaaaccacctgtgtgcatgttccttcaggcccagcctcatgtcccctccaggaagtctaccccagttcccagggaagagtgagttcccatctctggaatccctcagccctgagcctgccccttcacatcccccgctgctgggtctgtttagggactcctctgtcccccgtcctctcagcaggcagggaacttctgagggacaggtcttcgtttgctttttctgttttctcaccaattacatagggctgagacccaggactcaggcttgggctgggggtttatagagtcaattgacaagttggacagaggtctggcagggccagccccacctgggggtgggcaaagcargtcaccagagccttctttcctgcccacaggacagccactcactggtgggagcaaccgggtgtggaggcccgcaccctgctcaagctctatggaatccgcttcgacatcctcgtcaccgggcaggtaggcacaggtaggggtcaggccggggatgggatggggcaggcagacagggctggaggaggcatgaggctgacagtcgtgggctgagaggttcagctcagatctctctcaggcagggaagttcgggctcatccccacggccgtcacactgggcaccggggcagcttggctgggcgtggtgagtgcgagcactgtgggcacctgcaggctgcagtgagtgctgctgaccagggtgtgtccaatgcatgctggagcctccggtgcctgcacattgagtctcggggtgcaggctggggaggtggcaggagagcaggctcgggggctggaacatgggttggccctgcctctcccaggtcacctttttctgtgacctgctactgctgtatgtggatagagaagcccatttctactggaggacaaagtatgaggaggtgagctgaggtcgctctgcttggaccctgggttctgccacacttaggaagatgttggct

SEQ ID NO: 23613 - DNA, 696 bp, Homo sapiens
ctctcccttcctttcttccctgacccagcagcctcaccagagcattctgtctgactatctgatggagacaccttctgagccgaaacagtgtggccatagtggctgtgtcctcagagatgaggagcccctccttccctttcacattgctctctggccttcccggacctggcttctcgcagctttgtgtgcgtgtttctcaggtgtccaggaatcccatgcgaagtgaaggctgctttggtctcctcaagtctgtccaggacaatccagcctctgccctggaactgctggatttctcagtaagagcattttataaacctcgtttctgatcctcccagcagccctgtgaggtatcataattttagaagaagaaagtgagggttacagaaatcaagagccctgcccagctacacagcgtggcagaagcagagttgcaacgggacttgaatgcaggcatggggccactcagctctgcccgctccagactgctggttccacgggatctcacctggggcacctgcctgggttcttcattggctgagagaggataagtggaggtctgggcatgatgctccctatccactgaggtttcgatctgcaggcrcagcacctgcaaggctgccctctgcccctcccctgactgtctgcaggtggactgtggtgctggaagcttcacttgagtggctgtgagagagatta

SEQ ID NO: 23614 - DNA, 616 bp, Homo sapiens
gaataatagtcccattagaatttttattacacaatggagaggtttctctctctctctttaaaaccgctatttcttgagtaacataagaacctgaatccaaatcctgacagtaccatttattagctgtttttgccttgagtcaattacttcatatttcagtgaggcagttttcctcctctgtaaaactgggtagaaatgtccacttcattcattcgctatgcagattacataagataacatatgcaaagtgtttcacctactccgaagtacacagtaaataataaataataatgataactaaaattaacaagttaagaaatatatgatgcaaccatgttgcaggctctaaaatgagagagacattaaatctgttatttgaaaatgagagtcaggacagataaaatgatacatattcaagcttacatagtaagaggcagttgacttaaagtataataaaaaaaaaaaaawatatatatatatatatatataaaaagattccgggtttcctgacacccaggttgtaactcttttcacctctatgaaattatttgtctttttaaagcaatagaagttattcaaccctacagccacaatataactataacacaaacatgga

SEQ ID NO: 23615 - DNA, 1087 bp, Homo sapiens
catacaaattcaaattacaatcacattgatatattattatctaaccaccaggtgggaagaaaattgaaaatacctcctccagtgtcccccacccaggccatgccgatcccctgcagaagtgtaaactggtacaaccactttggaaaacaatttggtgtcccttagtaaggctgaagaggggtgcctacacaaggccagcaattccactctagagaaacgcttgcatgtgtgtgtgtgacggggggagcagggcagcactattcctgggggcgctggtgactttcctgggcctctactgtccccaggccatgtccaagtccccttccccaagactcctgcaaacccctgcctccccacataacttgggacaacacaaccccactggcctattttgcacactgtctttctgggcctggcctatttagagacagcatggaccccagacctagacccaaaggcaagctacttactgactctgagaccttgtgtgcgaatctttaccctctcaagcctctgctgcctccactgtaaaatgggttcatgacagcacatgtctcatagggagtttggaaggcagcagtaagttgggatcagcaggggctgcgcagggtgtgagctgtcggtgcgaagggtactccacagatggaagttcctccctgtcctcaggacacacccctctctcctgactccatttcttccaactgttttggctcacctcagtcttgacctcccaggctcaggtgatcctcccacttcagcctcctgagtagctgggactacaggcgtgcaccaccatgtctggttactttttgtattttttgtaaatatggggttttaccatgatgctcaggctcgtctcaaactcttgggctcaaaagatctcccacctcgccctctcaaaatgctgggattacagatgtgaggcaccatgcccagctccggctgtgcctttstcctggtctaattcaactcatgtttgcagaagctcttctttacctccagcctgtaaagatctctctcttccctacgcttccagtctattcgctcagcaagaaatatttcccaattgctcaccagaaagaaggca

SEQ ID NO: 23616 - DNA, 1213 bp, Homo sapiens
cagggatagggaactagactctccactctggggatgcaaggagaggtgagaattacagccatttttgcaataatctcccacagtgatggttaagaacatgagctggactctaattcccactcgctaaccgcttgctgggagagcttgggcaatgtcttctcttctctgagtctgtttcctcatctacaacacggtcaaagcaattccagctccccgagagttttgtggcgattcggagcaatcaggcatttgaagtgcctagcgtggtgcctgggcctggtgagtaccagaacatgtgggttccctcccttttccccaggaaaccgagctgtggatggcgatccgatgttcacactttgcaggaaagggctgggggcccggttgggggtctgctgcacccccactccctccctacctttcatcttgccccctctggagccctcctgctggggcctcacagcacccggggtcttaaggatagttaagtagcaaactatgtgttcataataaaatttgccggcttctcacagacatccaatttgcttacyatccaaagagaaggattgggtgcctgcttctgaaattgttttaatctctgccacagaatgcttctggcagggtttttcaactggaaaataggaaatgagttagaaacaatggaggaacgtgaataatctcacttaagacgtttgatcttgagatgagatgaagttgaaatcgatttcccggttcacagccagacagcggcgggtgggaggggagagagctgggggagatgggacatccaggcctgtctgggctccagctctgctggaacaaggacccccccgctcctgcaaaactctgacaaactgcacagtgggtgagaggttgccccagccccatcacctcaaaggcaggcatgaccgaagctctttggtttttccaagtctatgttaatggttgacaaaccagcccacacatctgtttaacagatattcactgtgtgcctgctacgtgccatggcctgtcctcagggaactcacaggaggtgactgtgaacaggatggagagtgaggagctaatgtttgtggaggactgtctatgtccaggcatgggttaagaaggctgcatccatgatgctacacagaaccgggagtcagggattcttgtgccctcttttcagatgaggaaatggcctcagagctatgtgtgtctgacttttcggaggaca

SEQ ID NO: 23617 - DNA, 534 bp, Homo sapiens
aagggaggatctagcctcagactccagctcacactggggcatacaaaggccttgtgggagagctagtttgagcacagcttgtggctatgctagaagctcctctggttccagccaacatgacatggtgtcaggctttgggggacagtggatgagcctaggagtgagaagggagagcttccatctgggtgcttgcttggcctaagcctggcacttgaagcagcaagggccagcatggttaccaagctgtgcaggtccagtcttcaacagtggcaccgtgtggccgagagaagcactagcacctggcattgtcaggttggtctccctttcctgagatggagatattccatagggttgttagataattgggggtggcratgggggatgaggggtgaggagagaaaattcttcaagaggaagatactgaatactaatagggcctgtggaaactcaaattagtaatatgaagaacaaaaaagaggtttgaccgaatttgcattttattaaaactaagaaattaacattggtatgatactg

SEQ ID NO: 23618 - DNA, 2022 bp, Homo sapiens
tgccccccaggaaaaggacaccctcagaaggaggctcaggaccacccagatgcctacatagaccccactggaggccaaatgtggctgctgaacagtgcctggcaaacaagctccggtgtaaaatgggagcgggagacacccctgcctcaagaacggcaggtgccacccccactgggagccgtctgggggccagagcctgggccaggatcacaggaggggaactcccctgggctgggagctgggggcttttctgtggtgtctccccagatcctcctacaaaccctgtgcagatgaaggaccgtgccccagagtcagagctgggaggagcagaaagagcagaaggccagcccccattcacgttcccccaaagtggtttttttgtttgtttgtttttagacagggtatcactctgtcgcccaggctgagtgtagtggtgtgatcacagctcactgcagcctctatctcccaggctcaggcaatccacctgcctcagcctcccaagtagctgagaccacaggcatgcaccaccatacccggctaattttttttaaatttttttatagagatggggggggtctcactacgttgcccaggttggtctcaaactcctggactcaagcgatcctcctgccttggcttcccaaagtgctggaactacaagcttgagccaccgcacctggccaaaatgggatcttttacagcagcacattggtctgatgactgttgagactttgattaaaaaggctgagaggaagctgaggggaacctatggctgacaccacagggacggggagaaggagtcagagggagaggtctgccatgtgtttgtcccccaacccaggcccgcatgcttcctgaagggggacactcttgtgcctctgtgaggcccgttttacagatgagaaaactgaggacaggggaaagtgtcccccaggatcacacgtgactgggaggatgcagcagcttggagccccgccgtcctccatctccacaccccttctgtggatcccgagggtgcagccagccacgctgtgaaggtctccaggggtccacagaaggcaggggaggggaggggagagggctggagagcgggagaaagttaagagccatcacatggctgttcagaactggatctggtggtgggagctgaggggtacgggaggggagagggtgcaggtccctagccgggacctctcagaccaacttttgacttaggtctctgacgcccatggagtcctggatgctcagcagggaaactgaggcaagttgccggttgtaaggacagacagcacaggtctctggggcttccagagtccccggtgattctgcctccaacaccaccctccccacttccctagttccagcccgagccttgagggggcaccaggacaaaggagcggtgaaggctgggggcggaaggactggagttccccttcggaactcatggcgaggccggggcgggggcttgactcctctgaacgtcagtctcctcctctgtggaaaaggggaatcaggttgtactaaggattggaaaaaacatgaactgtagagtgctgaccccaaggaagcgcctaagggatgtttgctgagggaggaaacaggtccctggacggacggacagacagacgagcgtggctgagtggatgaaggaatgactgcgccccgccctgaccagccagcctggcagagaggacccctgctggtgactcaaatccaagacacgcagtccccagagtgtgtggtcccccccacccccgtcccaggggacgcctccacctaggcagtggggccattgtctaagaatggccacgtgtgtccccgggcctggatctggaccatggtgggccactggccaccatccccgcccttccgagagggcaactgccccctaatgtccctcgccatcttttacgacccaagcagtatgcacagcyctacttcatgaaaacaaaacgagctgcatcaacagcagagagcagactttccaggccaccagttctggggaccaattcaagggagaaa

SEQ ID NO: 23619 - DNA, 1116 bp, Homo sapiens
attgctcaccatgccatctttgctgctcacttttgctaagtatgtttgggcaggttcacagcccaatgcccagcacctgtgtcaggtactaaacaggtgcatcacggaggtgtttggaagatgaactgaatgaacttttcgactcaagcacacagtgtataggaaaaaagaaaaaacagctgggactggtggctcaacgtctgtaatcccagcactttgggagatcaaggtggtaggatcacttcagctcaggagttcgagaccagcctgagcaacatagcaagactctgtctctacaaaaaattttgaaaattagccggacacggttgtgtgtgcctgtagtcccagcagctacttggaaggctgaggcgggagaattgcttgagcacaggaggttgaggctgcagtgagccatgattgcgccactgcacttcagcttggatgacagagcaactcaaaaaaaaaaaaaaaaaaaaggaaagaaaagaaagaaagaaagaaagaagaaagaaagagagaaagaaacgctttataaacagataccagtttaaaaaaagtttcaagaaagtgagacaaaagaacacccccttgaaatcttagaggcgaactaggcatctgtgtgcctgccctcagctgggaaagctctggaatagtggtcttggggctgccagggcatgggtttttcatctgggtcaaatatgctccattccttcttaccctccagcctctcccctccagagacctgctttgagtgaaggattgttgctttttacatttcctacagctcagtgtttggagctgatcatttgtggaagggagggaaacctgtgtgactgtcgcctgtggagtyttcgcagatttttcagtctcgactttcataaatactgaagatgaatttattttccatattatttcccatgaattaagccgggaaagccccttactacctgatgtttaccagactgagtcaaagagatttgctatgtggcttttgtgaatcttccccaagaacccctcagagcgtcgtttccactgaaatcactaagggtgtgtataattattataaaggcttgacaaggacaaggttttcatgggcacattcatacccagtaaggc

SEQ ID NO: 23620 - DNA, 563 bp, Homo sapiens
tatttggctcattaaataagtgtctgccaatstctgctctaatattttgacttaaataagaggtttccatcaaggtaatatttcagcttacttttctttaccttattttaccactgcataataatacacagggaagagagaatagaacctttaaccattttaacttcattgtgcttggcatattggttcagcatactcttctcttctagttgttgcttataatttgttttgtttcatggagcaaatgcttcacgaatgagtttgtgattaaaacataaatatatagagtatgctagcatagtcaatgggttgtcatcttattttaaggatttcagtaaaggcaaataagaggtatgctcccaaagcagggatcaaaacattaaagacaagttaaaaagttaaagatatgcctctatgtgagcaaaaaccatgctgtgagagtattcagtacagtcagaaccttggccagggagcctggtgattgtggcccattgcaagtccaattaacttaaggtagttacaagaaacagataaaaatacaggagctgaaacctttatttgtg

SEQ ID NO: 23621 - DNA, 563 bp, Homo sapiens
tatttggctcattaaataagtgtctgccaatgtctgctctaatattttgacttaaataagaggtttcyatcaaggtaatatttcagcttacttttctttaccttattttaccactgcataataatacacagggaagagagaatagaacctttaaccattttaacttcattgtgcttggcatattggttcagcatactcttctcttctagttgttgcttataatttgttttgtttcatggagcaaatgcttcacgaatgagtttgtgattaaaacataaatatatagagtatgctagcatagtcaatgggttgtcatcttattttaaggatttcagtaaaggcaaataagaggtatgctcccaaagcagggatcaaaacattaaagacaagttaaaaagttaaagatatgcctctatgtgagcaaaaaccatgctgtgagagtattcagtacagtcagaaccttggccagggagcctggtgattgtggcccattgcaagtccaattaacttaaggtagttacaagaaacagataaaaatacaggagctgaaacctttatttgtg

SEQ ID NO: 23622 - DNA, 563 bp, Homo sapiens
tatttggctcattaaataagtgtctgccaatgtctgctctaatattttgacttaaataagaggtttccatcaaggtaatatttmagcttacttttctttaccttattttaccactgcataataatacacagggaagagagaatagaacctttaaccattttaacttcattgtgcttggcatattggttcagcatactcttctcttctagttgttgcttataatttgttttgtttcatggagcaaatgcttcacgaatgagtttgtgattaaaacataaatatatagagtatgctagcatagtcaatgggttgtcatcttattttaaggatttcagtaaaggcaaataagaggtatgctcccaaagcagggatcaaaacattaaagacaagttaaaaagttaaagatatgcctctatgtgagcaaaaaccatgctgtgagagtattcagtacagtcagaaccttggccagggagcctggtgattgtggcccattgcaagtccaattaacttaaggtagttacaagaaacagataaaaatacaggagctgaaacctttatttgtg

SEQ ID NO: 23623 - DNA, 563 bp, Homo sapiens
tatttggctcattaaataagtgtctgccaatgtctgctctaatattttgacttaaataagaggtttccatcaaggtaatatttcagcttacttttctttaccttattttaccactgcataataatacacagggaagagagaatagaacctttaaccattttaacttcattgtgcttggcatattggttcagcatactcttctcttctagttgttgcttataatttgttttgtttcatggagcaaatgcttcacgaatgagtttgtgattaaaacataaatatatagagtatgctagcatagtcaatgggttgtcatcttattttaaggatttcagtaaaggcaaataagaggtatgctcccaaagcagggatcaaaacattaaagacaagttaaaaagttaaagatatgcctctrtgtgagcaaaaaccatgctgtgagagtattcagtacagtcagaaccttggccagggagcctggtgattgtggcccattgcaagtccaattaacttaaggtagttacaagaaacagataaaaatacaggagctgaaacctttatttgtg

SEQ ID NO: 23624 - DNA, 1213 bp, Homo sapiens
cacgccggggaggagaatctgctgtttcactctgtattttttcggagcctgggattttagcgtatataggaaccgcacattgctttgccaggttctcctaggcacccgtaaacacactgcatagaaaactctagagatgctttcaagagaacagcgtccctttatttagagcggctgcacaagaggtcttctttgtggaagggaatgcctcctccaccttggatctctgcttgaggcttccaccatctcaaagagctgacagagagagggaggaaaagggagagggaaggggatgcggagggtgggggaggggggaggggaaacttctctatctttaattttccttccaagctgtttaaagttatcttttcttttttctccctgtccattagagccaggctgacgttttcaaaaggaactttattcagtggttaagggagaaaaagaaagctaatcgaataaaatctaaatatgtaataagagctaaatataaaataaatatgaaatagctaaaaagtaaacattaatccatttatcctccattagtacagcaagttgatattttgaagcaggtactgtgctgggcactggggctggggggtgaacaagcacttacagtatggaggaagacaaacaagaagcaatgaaccatacaaaatgggcggtattatgatgaccaaaggtactaagccctgagtgaggagagaagagggaggccacctaacctaaacaatgaggggtatccgtacagatggaagaaaatctcatccatgaagaagcctgaagaatgagttaggatgggaagaggttgagggtggaaaaaaggcgaatatttcaggctgaagttttataaatcaaaccttgtcactctgcttaaagtcccataatgactgcccacctatgagcctgcaggtcagagcggggccctgggtggcatcaggggttcttctccctgctcaccttccaggtttgcatagggactggagcgcaggtcagcccgccttctctccctgcctccatcctgcctagccctcggctaactttgaggcttygtatgccagtccaaagccacctcaaatggtggaactggtgccaggcactgggacacctacgttccttaccctggccttcaactctgatgtgttgatgagtctgacttggggttgtttttctttctactccgggattttcatggctggtagccatatcttag

SEQ ID NO: 23625 - DNA, 1213 bp, Homo sapiens
cacgccggggaggagaatctgctgtttcactctgtattttttcggagcctgggattttagcgtatataggaaccgcacattgctttgccaggttctcctaggcacccgtaaacacactgcatagaaaactctagagatgctttcaagagaacagcgtccctttatttagagcggctgcacaagaggtcttctttgtggaagggaatgcctcctccaccttggatctctgcttgaggcttccaccatctcaaagagctgacagagagagggaggaaaagggagagggaaggggatgcggagggtgggggaggggggaggggaaacttctctatctttaattttccttccaagctgtttaaagttatcttttcttttttctccctgtccattagagccaggctgacgttttcaaaaggaactttattcagtggttaagggagaaaaagaaagctaatcgaataaaatctaaatatgtaataagagctaaatataaaataaatatgaaatagctaaaaagtaaacattaatccatttatcctccattagtacagcaagttgatattttgaagcaggtactgtgctgggcactggggctggggggtgaacaagcacttacagtatggaggaagacaaacaagaagcaatgaaccatacaaaatgggcggtattatgatgaccaaaggtactaagccctgagtgaggagagaagagggaggccacctaacctaaacaatgaggggtatccgtacagatggaagaaaatctcatccatgaagaagcctgaagaatgagttaggatgggaagaggttgagggtggaaaaaaggcgaatatttcaggctgaagttttataaatcaaaccttgtcactctgcttaaagtcccataatgactgcccacctatgagcctgcaggtcagagcggggccctgggtggcatcaggggttcttctccctgctcaccttccaggtttgcatagggactggagcgcaggtcagcccgccttctctccctgcctccatcctgcctagccctcggctaactttgaggctttgtatgccagtccaaagccacctcaaatggtggaactggtgccaggcactgggacacctacgttccttaccctggccttcaactctgrtgtgttgatgagtctgacttggggttgtttttctttctactccgggattttcatggctggtagccatatcttag

SEQ ID NO: 23626 - DNA, 801 bp, Homo sapiens
tttgcyccatctaagtagtttcccagtggcctgggagcacatcagatcccccagcacagctggaacccaacccaagggtccaggggatgaagctgctggctggtccctgtatcctggggttgtggtacagagctcgagagtgttgagctgagatctgtggctggtactggagctggggaggagtcctcatactcagagcactgaaaggggtgataagacatatcggttcatgggttggtgtgggagcagggtgttcctccctccacagggccagtttggaaagaatgtggcctatcgccctgccatagcctctgcctgagggagtctcgtggcccagaacacctaataaaggaaataaagacagaacaccagtgatcagagaggtctcccccaaggcctagaaatggacccggtgagggagtcagctctccctcctccaccacagaggacagctgcaaatatgaggaaatacaataaagccctgcagataagcacttatcttctggctataattctttagtgccatctactgaatcacagcctaaactacaactgcaaaaatattctgtcactttgaaaccaaggacaagaatccagccgcaaataaagatagtatacagagtcttggccctctgaaagcacccagaaatgaagccaattgactatattcaacttacacaacagttaaaggaacataagtcctttcagatgagaaagaatcaacacaagaattctgacaattcaaaaagctagaatgtccacttatctccaaacaaacccactggctcccaagcaatgatt

SEQ ID NO: 23627 - DNA, 556 bp, Homo sapiens
tttccttttytaaggccactgcgagatgcttttccagctccaggctcaaagagagagtgtttcatccctatttcaatggacaccagaatcaatattttctttaggtacttgctaaaaagtagttacattaagtccccacccagtggtactggccttagtcttttcttactataaaagaacatggctattcctgtttcttcctatactagggatctcttcaaacacaggacagttaacaaattgtcagtaactattggtaaacacatccttccagggaaaggcttcacatttatttgcctacatacacatattagggaacttttcttatttagatataatagtgaaaatgtttgtaaaaggcaaacgtaaaaaaagaaaaaacataaaataaaaatctgttcattttaatgaaatgcattatgtcccctaatctgccaggatggatcttgtctatgtaaacaaatttcatagtgactttcaccttcttcaagatacttactaggaagtatcttaaaggcaatgaatataactcttctacataaaattctgtacatag

SEQ ID NO: 23628 - DNA, 649 bp, Homo sapiens
agatagtcaaagtctagtaagcaagcaacagtgtgaggaaaaatccaaactcaattctgtaatcttaacccccttgctacactgactttgaacggatcatcagatatacgtagcaaagtgcttggcagaatgcagatgcccgtaattgttcattccttttcctttctaagactttcatcaagaggagtctaggaaactaaacagtcaactccagaattttgccataacattccttaatgactaatactgtatgaaatatatgatattcatgtactttgttacatattataggtgacgtgttttcaatgttactaccttttttgtttgtttctgggcaagatgtgaggtgattcctgtagatctsaatttgaagcaatctaacatttgtaagaacaatctagtatttttctagaaggtgggaagtaggattaattcctcctgaatcaccttagggaatctactaattttaggctacagaaatatgttaaggatttcaactcctgcccctagctaccactcagaacaaatgaggtaactgcgaaatcaaggtgcttgtttatgattatgtctgattgggagaatttgtggcaacccaaatatggaaacataaataatatctcatgccataaactggtaaacattttgcatc

SEQ ID NO: 23629 - DNA, 620 bp, Homo sapiens
gtacttttatccattgctcttgggttaatttttaaaaatcagttagataaaggaatcataaaaattatacataaaagccttatatatattattttaaagcaaacaaatgcattgtcattcaacaatgtgctgacctaaagacaaaggtttttctctgagtgttccagacaactrttggtataagttgactttcttatatgtatcataattcctcttccaacatttacaattttggtatcttggaagagaagcaataacttttaagactcttgcaaagtaataagagttcacattctttctagaatttcagaatttttgatggaaaatttttctaatactctgacccatatgtcttagaagtaattttaaagtttgtttgaaaatttaatactttcattacatgcatcacatttgtagttcccaaatacttctagttgtttttaaaatatgtacttaaccttttttaaggtacattttacaaattctgaggcaatcgtagctattcgaagtgtgtatttatattctttcatacttgttatgtagaaactctcttggtgcttgcgaatgacctaggtgacattcgtttagctatttgtcttggcatgcatatatctcaaagc

SEQ ID NO: 23630 - DNA, 620 bp, Homo sapiens
gtacttttatccattgctcttgggttaatttttaaaaatcagttagataaaggaatcataaaaattatacataaaagccttatatatattattttaaagcaaacaaatgcattgtcattcaacaatgtgctgacctaaagacaaaggtttttctctgagtgttccagacaactgttggtataagttgactttcttatatgtatcataattcctcttccaacatttacaattttggtatcttggaagagaagcaataacttttaagactcttgcaaagtaataagagttcacattctttctagaatttcagaatttttgatggaaaatttttctaatactctgacccatatgtcttagaagtaattttaaagtttgtttgaaaatttaatactttcattacatgcatcacatttgtagttcccaaatacttctagttgtttttaaaatatgtacttaaccttttttaaggtacattttacaaattctgaggcaatcgtagctattcgaagtgtgtatttatattcwttcatacttgttatgtagaaactctcttggtgcttgcgaatgacctaggtgacattcgtttagctatttgtcttggcatgcatatatctcaaagc

SEQ ID NO: 23631 - DNA, 620 bp, Homo sapiens
gtacttttatccattgctcttgggttaatttttaaaaatcagttagataaaggaatcataaaaattatacataaaagccttatatatattattttaaagcaaacaaatgcattgtcattcaacaatgtgctgacctaaagacaaaggtttttctctgagtgttccagacaactgttggtataagttgactttcttatatgtatcataattcctcttccaacatttacaattttggtatcttggaagagaagcaataacttttaagactcttgcaaagtaataagagttcacattctttctagaatttcagaatttttgatggaaaatttttctaatactctgacccatatgtcttagaagtaattttaaagtttgtttgaaaatttaatactttcattacatgcatcacatttgtagttcccaaatacttctagttgtttttaaaatatgtacttaaccttttttaaggtacattttacaaattctgaggcaatcgtagctattcgaagtgtgtatttatattctttcatacttgttatgtagaaactctcttggtgcttgcgaatgacctaggtgacattygtttagctatttgtcttggcatgcatatatctcaaagc

SEQ ID NO: 23632 - DNA, 612 bp, Homo sapiens
aatgatcaaccctccaggttttcccagaaccaagggagttcccaagatgcaggaatttttttttttgagacaagagtcttgctrtgttgcccaggctggagtgcagtggctcaatctcagcctactgcaacctccaccttcaggttcaagcaattcttgtgcctcagcctcctgagtagctgggactacaggcatgcactaccatgcctggctaatttttgtatttttagtagagacagagttttgccatgttggccaagctggtctcgaactcctggcctcaaatgatctgcttgcttcattcagcctctgaaagtgctgggattacaggtgtgagccaccacacctggcctaagatgcaggactttaaatgttaacactgggaaatcctcaggcaaactagatatgttgatcctcctacctgacagtttctctttatgggacttgactagccattctccccagcttgaaagataacatgttaggtggttttatgctggataaactgagacaccttttgaaagcaaaggaaatgtcttcaaggtaccatgtgtattttgtttatgtgactaaaatacagaaccaattatttgttgatggttcttttcaatg

SEQ ID NO: 23633 - DNA, 1038 bp, Homo sapiens
atgctttaagtagaagcccttacargtaatatctggaatctttttaagtttgaaaatctaatggctatttgtatcagatttatatgtcctggctcttaataacctcctagcctacctgataaacctgtgaaattgcactttcttccagtagataactatgctgttctcaggtgaaatacttcgcttatcccttgccagtccagcctggggaaggcagctggacctgagctgggaattttatttgagggagtggaaataggaggggttggccaaggctgagttagaggggacagctctttagtggcctgagctggctctttggtgcagccgaagattgttagaattttagaggtggagagactttagagatacatcccagtcctctattttacagatgaatgaaagtgagtctcaatgatgttaagtgactttttaaaggctacagaaggctgggtgtggtggctcacgcctgtaatcccagcactttgggaggccgaggcgggtggatcacctgaggtcgggagttcaagaccagcctggccaacatgatgaaaccctgtctctactaaaaatacaaaaaattagctgggtgtggtggtgcgtgcctgcgatcccagctactcaggaggctgaggcaggagaatcgtttgaacctgggaggtggaggttgcagtgagctgagatcgcaccactggactccagcctgggcaacaaaagcaaaactctgactcaaaaaaaaaaaagggctgtagaattcagtagagtcaaagtgggaactggactgaagtcagaaagaattgaaaagtgtgcttttttccctctttctctgtcctgtccaggagctatgaagacatgtttctcctttccgtttctttacaggttatgcattaaattggaaggttttctttttgtatacgtaattatgagatggagatagtagagagaaagtagtcccattttggaagcttttttttggttaaaatcttggctcaggaacagtaaatgaacatttaagatcatctacctgcctggccaaca

SEQ ID NO: 23634 - DNA, 1038 bp, Homo sapiens
atgctttaagtagaagcccttacaggtaatatctggaatctttttaagtttgaaaatctaatggctatttgtatcagatttatatgtcctggctcttaataacctcctagcctacctgataaacctgtgaaattgcactttcttccagtagataactatgctgttctcaggtgaaatacttcgcttatcccttgccagtccagcctggggaaggcagctggacctgagctgggaattttatttgagggagtggaaataggaggggttggccaaggctgagttagaggggacagctctttagtggcctgagctggctctttggtgcagccgaagattgttagaattttagaggtggagagactttagagatacatcccagtcctctattttacagatgaatgaaagtgagtctcaatgatgttaagtgactttttaaaggctacagaaggctgggtgtggtggctcacgcctgtaatcccagcactttgggaggccgaggcgggtggatcacctgaggtcgggagttcaagaccagcctggccaacatgatgaaaccctgtctctactaaaaatacaaaaaattagctgggtgtggtggtgcgtgcctgcgatcccagctactcaggaggctgaggcaggagaatcgtttgaacctgggaggtggaggttgcagtgagctgagatcgcaccactggactccagcctgggcaacaaaagcaaaactctgactcaaaaaaaaaaaagggctgtagaattcagtagagtcaaagtkggaactggactgaagtcagaaagaattgaaaagtgtgcttttttccctctttctctgtcctgtccaggagctatgaagacatgtttctcctttccgtttctttacaggttatgcattaaattggaaggttttctttttgtatacgtaattatgagatggagatagtagagagaaagtagtcccattttggaagcttttttttggttaaaatcttggctcaggaacagtaaatgaacatttaagatcatctacctgcctggccaaca

SEQ ID NO: 23635 - DNA, 1038 bp, Homo sapiens
atgctttaagtagaagcccttacaggtaatatctggaatctttttaagtttgaaaatctaatggctatttgtatcagatttatatgtcctggctcttaataacctcctagcctacctgataaacctgtgaaattgcactttcttccagtagataactatgctgttctcaggtgaaatacttcgcttatcccttgccagtccagcctggggaaggcagctggacctgagctgggaattttatttgagggagtggaaataggaggggttggccaaggctgagttagaggggacagctctttagtggcctgagctggctctttggtgcagccgaagattgttagaattttagaggtggagagactttagagatacatcccagtcctctattttacagatgaatgaaagtgagtctcaatgatgttaagtgactttttaaaggctacagaaggctgggtgtggtggctcacgcctgtaatcccagcactttgggaggccgaggcgggtggatcacctgaggtcgggagttcaagaccagcctggccaacatgatgaaaccctgtctctactaaaaatacaaaaaattagctgggtgtggtggtgcgtgcctgcgatcccagctactcaggaggctgaggcaggagaatcgtttgaacctgggaggtggaggttgcagtgagctgagatcgcaccactggactccagcctgggcaacaaaagcaaaactctgactcaaaaaaaaaaaagggctgtagaattcagtagagtcaaagtgggaactggactgaagtcagaaagaaktgaaaagtgtgcttttttccctctttctctgtcctgtccaggagctatgaagacatgtttctcctttccgtttctttacaggttatgcattaaattggaaggttttctttttgtatacgtaattatgagatggagatagtagagagaaagtagtcccattttggaagcttttttttggttaaaatcttggctcaggaacagtaaatgaacatttaagatcatctacctgcctggccaaca

SEQ ID NO: 23636 - DNA, 1038 bp, Homo sapiens
atgctttaagtagaagcccttacaggtaatatctggaatctttttaagtttgaaaatctaatggctatttgtatcagatttatatgtcctggctcttaataacctcctagcctacctgataaacctgtgaaattgcactttcttccagtagataactatgctgttctcaggtgaaatacttcgcttatcccttgccagtccagcctggggaaggcagctggacctgagctgggaattttatttgagggagtggaaataggaggggttggccaaggctgagttagaggggacagctctttagtggcctgagctggctctttggtgcagccgaagattgttagaattttagaggtggagagactttagagatacatcccagtcctctattttacagatgaatgaaagtgagtctcaatgatgttaagtgactttttaaaggctacagaaggctgggtgtggtggctcacgcctgtaatcccagcactttgggaggccgaggcgggtggatcacctgaggtcgggagttcaagaccagcctggccaacatgatgaaaccctgtctctactaaaaatacaaaaaattagctgggtgtggtggtgcgtgcctgcgatcccagctactcaggaggctgaggcaggagaatcgtttgaacctgggaggtggaggttgcagtgagctgagatcgcaccactggactccagcctgggcaacaaaagcaaaactctgactcaaaaaaaaaaaagggctgtagaattcagtagagtcaaagtgggaactggactgaagtcagaaagaattgaaaagtgtgcttttttccctctttctctgtcctgtccaggagctatgaagacatgtttctcctttccgtttctttacaggttatgcattaaattggaaggttttctttttgtatacgtaattatgagatggagatagtagagagaaagtagtcccattttggaagcttttttttggttaaaatcttggctcaggracagtaaatgaacatttaagatcatctacctgcctggccaaca

SEQ ID NO: 23637 - DNA, 647 bp, Homo sapiens
tgtgaatacagtgttgtttttcctccttgaaactgatggcttggaaggcaaaggatttgcttgtagacagtacactttctcctttatatcaggaataatacrtctttcttctgaaagtgttggttttgtttactgttttgggagaattctatgaaagtagatgatgttctctatgctttcctaagccttgtcttgtttaatcctcacaataccctcacataatggggtaaaatttatatttcacagacaaagaaatagcagctcagagaatttgaacagactttccaaaggcattctaagaactgcaagagctaggattcacacccaagccttctgcctcctgagccctcgctcttcccaaggcattaggcaccctttcattatttccttaatcatttacccattagtctgatcttcttgccaaaccaaacacctcattgttcagttttatgattaaataaaatttcttgaatagtaattggatatttggctcctggtctttaaattttatgtactagtttttgtttatttttgctttagcaggtttttacaaatttgtatcagcaggacatacaaattcttttgtaattggagctttggtttttatttctttaccaattattcagtttctttgatacatatccagg

SEQ ID NO: 23638 - DNA, 595 bp, Homo sapiens
aggcgcctataattccagctactcgggagcctgaggcaggagaataacttgaacctgggagacagaggttgcagtgagccgagattacggcacttccttccagcctgggtgaaagagcgaaactctgtcttgagaaaaaaaaaaaaaaaaaaagtgagactctgtcttaaaaaaaaaagtgagactctgtctttaaaaaaaaaaaaagtgtggttaggacttggcttctttactttctgtggcatcttccacatcccagagcctctctgcaggaactcagtgttttcttgcagttttagttactcctctgtctcacttatggcctgccctctcccaaagatgcagtgtgttccaaaattacctaatacacygcctgcccattcccccactccctaatcaaaattcctgtgccatgaggcagcaaccctgagccacaatgcagcaattcttggccactgttgggagaaggaatagaataatgactaaccatagggttgtggggaggataaatgagaatataaatgtgggtgtgtgggtgcgtatttggagaagggagaagtttaagactggttttcagtgacaatttcttattcca

SEQ ID NO: 23639 - DNA, 595 bp, Homo sapiens
aggcgcctataattccagctactcgggagcctgaggcaggagaataacttgaacctgggagacagaggttgcagtgagccgagattacggcacttccttccagcctgggtgaaagagcgaaactctgtcttgagaaaaaaaaaaaaaaaaaaagtgagactctgtcttaaaaaaaaaagtgagactctgtctttaaaaaaaaaaaaagtgtggttaggacttggcttctttactttctgtggcatcttccacatcccagagcctctctgcaggaactcagtgttttcttgcagttttagttactcctctgtctcacttatggcctgccctctcccaaagatgcagtgtgttccaaaattacctaatacactgcctgcccattcccccactccctaatcaaaattcctgtgccatgaggcagcaaccctgagccacaatgcagcaattcttggccaytgttgggagaaggaatagaataatgactaaccatagggttgtggggaggataaatgagaatataaatgtgggtgtgtgggtgcgtatttggagaagggagaagtttaagactggttttcagtgacaatttcttattcca

SEQ ID NO: 23640 - DNA, 749 bp, Homo sapiens
ccccatggcttgccatttattcctttaaagggggaaattctcagcttggagtgatttaatcttatgcaacaaatgctgtggctcctgggacttatgtagtcttggcaggcagcagaatgccccagaacttatctctgcaggcttacccataatactgatgtgtttgttttgtcaccgtctatttttcctgcccattttccaggaaggccctaagctgtagcacctgacacacactgccaatgtctagcttcatgcaccttccagctaccttcttcaactcagttacataaatatctttctgcctaggtctattttccaggccaatggttcccagccatggtggtatcacagcacactggggtgttgcaatgagctggggtgtaagmcatttgttactaacaacagagttccaaagtctactaatgacttactttgtaatacataaagagaattcaagttaatccccataatttgccacactcaattgcactgaacatactttcttaggatgggctgtgattcttagggtcggctctaagcatctttattttcaaggaagcaatttttagttttaagggaaaaaaactcatgttgttatcttttatgaattgtccatctcacaagacagtgtagtgtcaagggttaggaacagtggtctgagttcacaccccagctccaccgctaactagtgatataaccttgagcaagtttcctcagcctctctgagttctttctcctacaaattgagg

SEQ ID NO: 23641 - DNA, 749 bp, Homo sapiens
ccccatggcttgccatttattcctttaaagggggaaattctcagcttggagtgatttaatcttatgcaacaaatgctgtggctcctgggacttatgtagtcttggcaggcagcagaatgccccagaacttatctctgcaggcttacccataatactgatgtgtttgttttgtcaccgtctatttttcctgcccattttccaggaaggccctaagctgtagcacctgacacacactgccaatgtctagcttcatgcaccttccagctaccttcttcaactcagttacataaatatctttctgcctaggtctattttccaggccaatggttcccagccatggtggtatcacagcacactggggtgttgcaatgagctggggtgtaagacatttgttactaacaacagagttccaaagtctactaatgacttactttgtaatacataaagagaattcaagttaatccccataatttgccacactcaattgcactgaacatacyttcttaggatgggctgtgattcttagggtcggctctaagcatctttattttcaaggaagcaatttttagttttaagggaaaaaaactcatgttgttatcttttatgaattgtccatctcacaagacagtgtagtgtcaagggttaggaacagtggtctgagttcacaccccagctccaccgctaactagtgatataaccttgagcaagtttcctcagcctctctgagttctttctcctacaaattgagg

SEQ ID NO: 23642 - DNA, 553 bp, Homo sapiens
gtggcctgttctggggctccagagaagtttccctgaggcatcatacccagccacatgagggattccaaacatcagtgtcacctctgcctccagcttccaatgagctgcccatcccttagctttcctcctctccctccatcatgtcttcattccctgggctgcctttgttaaggtccttggtcccctggtctcactatactctttctcctttaatygtcttatttgttccatggtttctggattacaggcatttgtccaaaatagtcacagcagaaaagaaactcagaatacctaaggttggagtgagacaaattaatttttttgaacgtttgcgtttaacacactgaacagtggaagtttagcatcccatcatttcattatttacccactttggctggagtgggcttcagagatagccaagcattctctggctgtcctggattgctatggagggccaaatcttgtattacatggttgtctgccttatgtaaagtaactaacatcagattctccatgcaagtctaattctcatgaagaaaataatattgcagat

SEQ ID NO: 23643 - DNA, 818 bp, Homo sapiens
ggcactgggaaatggtgaagggcactggggaatggtgaagggcactgggaaatggtgaggggcactgggaaatggtgagggacactgggaaatggtgaggggcactggggaatggtgaagggcactggggaatggtgagaggcactgggaaatggtgaagggcactggggaatggtgagaggcaaggctggagaagaaggggcaggaagacggtgtgtgacatagatcctgaaggcctagttagccatgtcgacacagttggaagtgttgaatggttttcaaaacaaggagtgacaygattcgatttgcatattggaaacagctctctggaagattgatgggcaacaagagaagatgcaaagaggacagttagagctgctgctgaagaccacgggaaaaacgactgtggatcatggcattgagggtggaaagcaatgaattgatttgaggaccattaatgagacagaatcagcaggatgactgcctggataaaggaatagggggaatggtagtgccacttgctggagtaaggagactggaggaaaagcagacttggggtttcaggtgactaaaagacaccccatcacaaggaggagcccctcttctggacacagccaacctctcttccaggggatggtgctccctctactaactagctgcttggtcatctctccattcttctggctgcctttctacagtcttaagcatgcccaaatcacatggctgttatcttcattagaactctccactaaaccagcatctccccaaggcaaccactagatctctctccttccttcatgcatagacatccttggcag

SEQ ID NO: 23644 - DNA, 818 bp, Homo sapiens
ggcactgggaaatggtgaagggcactggggaatggtgaagggcactgggaaatggtgaggggcactgggaaatggtgagggacactgggaaatggtgaggggcactggggaatggtgaagggcactggggaatggtgagaggcactgggaaatggtgaagggcactggggaatggtgagaggcaaggctggagaagaaggggcaggaagacggtgtgtgacatagatcctgaaggcctagttagccatgtcgacacagttggaagtgttgaatggttttcaaaacaaggagtgacatgattcgatttgcatattggaaacagctctctggaagattgatgggcaacaagagaagatgcaaagaggacagttagagctgctgctgaagaccaygggaaaaacgactgtggatcatggcattgagggtggaaagcaatgaattgatttgaggaccattaatgagacagaatcagcaggatgactgcctggataaaggaatagggggaatggtagtgccacttgctggagtaaggagactggaggaaaagcagacttggggtttcaggtgactaaaagacaccccatcacaaggaggagcccctcttctggacacagccaacctctcttccaggggatggtgctccctctactaactagctgcttggtcatctctccattcttctggctgcctttctacagtcttaagcatgcccaaatcacatggctgttatcttcattagaactctccactaaaccagcatctccccaaggcaaccactagatctctctccttccttcatgcatagacatccttggcag

SEQ ID NO: 23645 - DNA, 818 bp, Homo sapiens
ggcactgggaaatggtgaagggcactggggaatggtgaagggcactgggaaatggtgaggggcactgggaaatggtgagggacactgggaaatggtgaggggcactggggaatggtgaagggcactggggaatggtgagaggcactgggaaatggtgaagggcactggggaatggtgagaggcaaggctggagaagaaggggcaggaagacggtgtgtgacatagatcctgaaggcctagttagccatgtcgacacagttggaagtgttgaatggttttcaaaacaaggagtgacatgattcgatttgcatattggaaacagctctctggaagattgatgggcaacaagagaagatgcaaagaggacagttagagctgctgctgaagaccacgggaaaaacgactgtggatcatggcattgagggtggaaagcaatgaattgatttgaggaccattaatgagacagaatcagcaggatgactgcctggataaaggaatagggggaatggtagtgccacttgctggagtaaggagactggaggaaaagcagacttggggtttcaggtgactaaaagacaccccatcrcaaggaggagcccctcttctggacacagccaacctctcttccaggggatggtgctccctctactaactagctgcttggtcatctctccattcttctggctgcctttctacagtcttaagcatgcccaaatcacatggctgttatcttcattagaactctccactaaaccagcatctccccaaggcaaccactagatctctctccttccttcatgcatagacatccttggcag

SEQ ID NO: 23646 - DNA, 497 bp, Homo sapiens
gaattctttattattcttaacacaagcctatcatcaggtgtttattttacacatattttcttccagtctgtggtttgcagtttctttttcataatagttacttatgaagagcaaaacttttatttgcataagtctaatttattaattttctttttttcctttttttttaagagataggttcacgctttgttgckcagactggtctcaaacgcctggcttcaaggtatccttctaccttagcctcccaatgtgctggtactacagtgtgagccactgtgcctggccttcttttatatttatgtgtaatatttgtgtagtttgtgtgtgtgtgtgtgtgtgtgtgtgtgtgtgtgtgtagtatttaagaaatacttgtgaaatacaaggtcataaacattttactctgttttattttaaaaatttgttcatagatgcatgctttgtcatgtcataacaggactattggggttttttatttcttttggtgtcacttttgg

SEQ ID NO: 23647 - DNA, 1911 bp, Homo sapiens
ggatacaaaatcctagccttaggtgggcggacagatggtctctgagttttactttgtggcagagaagcggtgaagtctgacaagcatcccatcctaattcagaaagcatggtggcaggaaactgtaaaatttccgatcagacagcactggcgagattcacaatctagatggtggagtctgaccctaggacgtcacctggcttgtcggagactccacagtctgtcacagaaccygggagtggctcagtccaagttcgtgctacttaccttggggcatagtttatgctgggaaagcctagacgcttacaccggggtcatgggtattggattgttttgggggacttcaatatattatattattatatcatattatgtatgttattatacataatgtactctgtgtattttatgtgtacacacagacacacatgatcatttctacttccataaatatgcatcttttagaactcacctaatctcctggaagtcttcaacatcatctccaactacccatcctaattgaagcagcttgctgttttttgttgtcgttgttgttgtttgtttttgtttttttttgagactgactctacctctgtcacccagactggagtgcagtggctcagtctcagctcactgcaaccttcgcctcctgggttcaagcggttcttgtgcctcagcctcccaagtagctgggaccacagttgtgtgccagcatgcccagcgaatttctttttctttttttttgtagagatggggtttcaccatgttggccaggctggtctcaaactcctcacgtcaagtgatccacccgcctcggcctccccacagtgctgggattactggtgtgagccagtatgcccaacctccccacctgctgtacttctgacatggtctgttatttaaaaggaagattataagtgaagaagcagacttaggagactcatcctaatgtgtgtgcttatgggaaagccagccttttaaaacaggaatcccatcaataagcagacccccaggacagcgcgtgagtgttgatgttggtgaaagcagatgtcttctattttgcagggacagcctgacaggcatgtttacgttaagtgtctggatcctccctgcaggcacatataaatttcacccttttctactcagaggtgtattttctttacaaagatgtaatcaacccccttcccttagcttcagccttgcacggggcaacccagccttgcataggtgatttaagagccggtgatggtaggaaataagcactagaaagtgttttgccaaagtggaaattgaactgcggtcctcatgtcagatagatcttatctctgttgccatgctgcgtttgctgatgttgatatataatctgtgtactttttttttttttgtctccttccccaacatagagacctcattaagaaactgctcgtggttgacagaacaaggcgattaggaaacatgaaggtcagtatttgatcccgtgggtattcagtggtacccgatgtgcgtgtctgccgtctaacacccacattggcatgtgcaggtataaaccaaggcttagcggtcgtatttaatcactgcccaaatttcaaatctggtgttttatttatttttttaaattttacttgaaactgccaggaaagatctatcaaatctcggtttctgggcccacaacgtcaaactgggtctacaccgtatctcccctcccctcaagcaaggttaatagagcaataacaatgcataagttattactcattattttgtttacttatttattttattttttaaacagttttacggagagtgaattcacacgccatgccatttacccatctaaaatgtgcaattcggtggcttttagtatacacacgattatgtacagccacccctgtggttaatcttagaacatcttcat

SEQ ID NO: 23648 - DNA, 571 bp, Homo sapiens
aactagagtatcctttggtaagtagacagtcccagatttgctatgtcttgaagttttattcttctcatctcactatctagttttcagttggcctttttcttctttcagtatgcctgccttcaatctagcagcctctttctttgccattcttttgtgagcttcaaagccagctaataaaacatgttggaagcgtatgcaaatttcagttcagagtctaagagtgatattcttgaagatctctcccataagtaagttgcaagaaactttgtgacatctcctctggcagctgaaaggcctttaagacgtaattcctgatttttttgctttgccagagaggtaacttctggataaatgaccttttcastaaccctccatgtactctacctgtccttaaaaaggctattagaagtgggaccatggatgtaaaagcactttaaaaaagcataaactgtgaaatagtattgtttagcccatgtatctataaagaaacacacacagatggccaaattgaatcaaccccaatgttttatttaatttaaagttttaaaaggcagtggttaagcacattatg

SEQ ID NO: 23649 - DNA, 1452 bp, Homo sapiens
agctcccacctacctgaggcttcttccaactagactccaaaccacaggcaaataatctatcagcctaagaacacaatcaggctcctatctacacaacttcctgctgtccaactaagtaaccaagttgtaagtaagtgcctcacaaaaggaaggacaaaaggcaggacaaaaggtcgtagcaacttgagtctggagattttttttttaatcctttttagttcaacataaaatgagaaagaaaaaaatatttctgacattttcaaagaacagaaataggaaagtatgttcatatacattcaacgtatactgcacatattggttactacaatacaaagcaatgagttttttttaaagtgtagtttgcaagatggcacggttagtaggctcactggctttcatctgttgttgctggagggtgcagtctgctctcccatacatacagtaccatgtaaacacatcaggctgagcgcgtggtggtggtagggcaggttgggggcataagagttggaacaagcgcagataagtcaacagctttttagggctttcttggtaagcccccttctggtgagtagttggtgaccccaccaagtggaggggagactggggaccatggaaacatgggacagctcccacgaagggctcttgcactgcagaattccactcaagggatcttgggtccaggagccgagctgccagtatcagtggagaaggacaaggtgcatggggatcccgccagcaacatcaggatggccatgccgggcacccgctttcctctgtgcaaattcaggatgaaagactaggaggggactcgggacctcttgctctcctttcccagaaaaaaaaagggtggaagagtcagtgtattcaaggtctctctcttgttttgaagatcagaaggagataacccagaccctctctcagccccagccagcagagaagactttggtttctaacaatgaagagaaataaagataacacaaataatagctactgcgtatgcactgcttcaactggggaaaggagaccactgcatctgtcactggcacaagtaagagctgttcacaattacaatgcctaaaggaaatactttgaacaaaaggtgcaagtcacaattcaaatagaacagaatctggttaaacatttctcatttaaacaaaaattccttttctctttatttattaataatgataataacaataatatcaacatttaccaaaaacaatttctacatgatcaagaattaaaatataggggctgagggtacccagtggggaagaggaggttaggagagaggcagggcccaaggcaacctcctacacttcttccctgtgacaaagaggctgaaagaggagagcatatatatatatattttatatatatattatatatataatatatatatawaatatatatacacatatattatattatatatatacacatatataatat

SEQ ID NO: 23650 - DNA, 1452 bp, Homo sapiens
agctcccacctacctgaggcttcttccaactagactccaaaccacaggcaaataatctatcagcctaagaacacaatcaggctcctatctacacaacttcctgctgtccaactaagtaaccaagttgtaagtaagtgcctcacaaaaggaaggacaaaaggcaggacaaaaggtcgtagcaacttgagtctggagattttttttttaatcctttttagttcaacataaaatgagaaagaaaaaaatatttctgacattttcaaagaacagaaataggaaagtatgttcatatacattcaacgtatactgcacatattggttactacaatacaaagcaatgagttttttttaaagtgtagtttgcaagatggcacggttagtaggctcactggctttcatctgttgttgctggagggtgcagtctgctctcccatacatacagtaccatgtaaacacatcaggctgagcgcgtggtggtggtagggcaggttgggggcataagagttggaacaagcgcagataagtcaacagctttttagggctttcttggtaagcccccttctggtgagtagttggtgaccccaccaagtggaggggagactggggaccatggaaacatgggacagctcccacgaagggctcttgcactgcagaattccactcaagggatcttgggtccaggagccgagctgccagtatcagtggagaaggacaaggtgcatggggatcccgccagcaacatcaggatggccatgccgggcacccgctttcctctgtgcaaattcaggatgaaagactaggaggggactcgggacctcttgctctcctttcccagaaaaaaaaagggtggaagagtcagtgtattcaaggtctctctcttgttttgaagatcagaaggagataacccagaccctctctcagccccagccagcagagaagactttggtttctaacaatgaagagaaataaagataacacaaataatagctactgcgtatgcactgcttcaactggggaaaggagaccactgcatctgtcactggcacaagtaagagctgttcacaattacaatgcctaaaggaaatactttgaacaaaaggtgcaagtcacaattcaaatagaacagaatctggttaaacatttctcatttaaacaaaaattccttttctctttatttattaataatgataataacaataatatcaacatttaccaaaaacaatttctacatgatcaagaattaaaatataggggctgagggtacccagtggggaagaggaggttaggagagaggcagggcccaaggcaacctcctacacttcttccctgtgacaaagaggctgaaagaggagagcatatatatatatattttatatatatattatatatataatatatatatatwatatatatacacatatattatattatatatatacacatatataatat

SEQ ID NO: 23651 - DNA, 1452 bp, Homo sapiens
agctcccacctacctgaggcttcttccaactagactccaaaccacaggcaaataatctatcagcctaagaacacaatcaggctcctatctacacaacttcctgctgtccaactaagtaaccaagttgtaagtaagtgcctcacaaaaggaaggacaaaaggcaggacaaaaggtcgtagcaacttgagtctggagattttttttttaatcctttttagttcaacataaaatgagaaagaaaaaaatatttctgacattttcaaagaacagaaataggaaagtatgttcatatacattcaacgtatactgcacatattggttactacaatacaaagcaatgagttttttttaaagtgtagtttgcaagatggcacggttagtaggctcactggctttcatctgttgttgctggagggtgcagtctgctctcccatacatacagtaccatgtaaacacatcaggctgagcgcgtggtggtggtagggcaggttgggggcataagagttggaacaagcgcagataagtcaacagctttttagggctttcttggtaagcccccttctggtgagtagttggtgaccccaccaagtggaggggagactggggaccatggaaacatgggacagctcccacgaagggctcttgcactgcagaattccactcaagggatcttgggtccaggagccgagctgccagtatcagtggagaaggacaaggtgcatggggatcccgccagcaacatcaggatggccatgccgggcacccgctttcctctgtgcaaattcaggatgaaagactaggaggggactcgggacctcttgctctcctttcccagaaaaaaaaagggtggaagagtcagtgtattcaaggtctctctcttgttttgaagatcagaaggagataacccagaccctctctcagccccagccagcagagaagactttggtttctaacaatgaagagaaataaagataacacaaataatagctactgcgtatgcactgcttcaactggggaaaggagaccactgcatctgtcactggcacaagtaagagctgttcacaattacaatgcctaaaggaaatactttgaacaaaaggtgcaagtcacaattcaaatagaacagaatctggttaaacatttctcatttaaacaaaaattccttttctctttatttattaataatgataataacaataatatcaacatttaccaaaaacaatttctacatgatcaagaattaaaatataggggctgagggtacccagtggggaagaggaggttaggagagaggcagggcccaaggcaacctcctacacttcttccctgtgacaaagaggctgaaagaggagagcatatatatatatattttatatatatattatatatataatatatatatataatatatatayacatatattatattatatatatacacatatataatat

SEQ ID NO: 23652 - DNA, 1452 bp, Homo sapiens
agctcccacctacctgaggcttcttccaactagactccaaaccacaggcaaataatctatcagcctaagaacacaatcaggctcctatctacacaacttcctgctgtccaactaagtaaccaagttgtaagtaagtgcctcacaaaaggaaggacaaaaggcaggacaaaaggtcgtagcaacttgagtctggagattttttttttaatcctttttagttcaacataaaatgagaaagaaaaaaatatttctgacattttcaaagaacagaaataggaaagtatgttcatatacattcaacgtatactgcacatattggttactacaatacaaagcaatgagttttttttaaagtgtagtttgcaagatggcacggttagtaggctcactggctttcatctgttgttgctggagggtgcagtctgctctcccatacatacagtaccatgtaaacacatcaggctgagcgcgtggtggtggtagggcaggttgggggcataagagttggaacaagcgcagataagtcaacagctttttagggctttcttggtaagcccccttctggtgagtagttggtgaccccaccaagtggaggggagactggggaccatggaaacatgggacagctcccacgaagggctcttgcactgcagaattccactcaagggatcttgggtccaggagccgagctgccagtatcagtggagaaggacaaggtgcatggggatcccgccagcaacatcaggatggccatgccgggcacccgctttcctctgtgcaaattcaggatgaaagactaggaggggactcgggacctcttgctctcctttcccagaaaaaaaaagggtggaagagtcagtgtattcaaggtctctctcttgttttgaagatcagaaggagataacccagaccctctctcagccccagccagcagagaagactttggtttctaacaatgaagagaaataaagataacacaaataatagctactgcgtatgcactgcttcaactggggaaaggagaccactgcatctgtcactggcacaagtaagagctgttcacaattacaatgcctaaaggaaatactttgaacaaaaggtgcaagtcacaattcaaatagaacagaatctggttaaacatttctcatttaaacaaaaattccttttctctttatttattaataatgataataacaataatatcaacatttaccaaaaacaatttctacatgatcaagaattaaaatataggggctgagggtacccagtggggaagaggaggttaggagagaggcagggcccaaggcaacctcctacacttcttccctgtgacaaagaggctgaaagaggagagcatatatatatatattttatatatatattatatatataatatatatatataatatatatacayatatattatattatatatatacacatatataatat

SEQ ID NO: 23653 - DNA, 1207 bp, Homo sapiens
aaactgggctccaccaccttctagctaggttacattgggcagctcacctgtagcactctgtttcagtgtccacagagggtgactgtgaatattacattagaccatgcattccttagaaaccaaaaagtaactgctatattaggcatcacaagagtcattagtaaaggtgaaagaatcaacagtgtacagtgtacagcaatttttggaaatataattttgtttatatgtagaatggggtttcttcgcaaagtatcattttttaaactgcttgaaagtatcttcagaacaattaatagataccatttgttttcattgcagtagagaaccactgatctagaggtctggtgaaagcagcaagtaataggatgaaaataaaaagcaagaggaccagataagcagtcagaattacagtgtatgaaatattttctccatatttattttattaaaatatcagttatgtcttccataatctgactccagcactttttaaagtgtccattagacaggaaggggttgtagaaattttccatgggtgacatcagggatgtcaggacttcatctgtatattgatgcctgcatatatattttttattttttaaactttttattatggtaattcagaaacacacaaaagcagggagaacaggataatgaaccctcatggacccatcacccaccaccaacaggtttgaactcttggccaatcttgcttcatctttgttcccacccactcctcagaccttaaattaatttgaagcaaatcctagatattctgacattccatctaaataatatttcagtatctattactaaaagacaagaactcttcacttaattagtttttactcccaacttttattagattcagggggtaggtgtgcaggtttgttacatgggtaaattgcatgtcatgggggtttggtatacraattattttgttacccaacaaaataatctacccaacaggtagattttccagatttccattctcaccccactcctactcttcaccctcaagtagccccagtgtctatttttcttgtctttatgtctatgtatactcttgtaaaatataaccaaaataccattattatacttccataaaaattaatttctttatattatcaaatgtccaatgtgtgtctgtaaattatatatatatatatatatatatatatatatatataatttttacagcttatatttt

SEQ ID NO: 23654 - DNA, 701 bp, Homo sapiens
attttcccccttttctgatgtggagataggcagactggggcaaacgttttgcactgcaaggactgtcacacattgacttttgctcctttcagggccatctaacctgacatctatcagagtgaatctaataattttaaattttctcatttgtgctttatggctttcacattgacagtctagggacaatgctgagtcttggatgggaaagtcaaggacaagaatggttagcaggcatctttcagtcaatgcagatgagtgtcgaagagatttaaagaggcaaaatgtgtgccaaaagtagcaaaaacagctgggaaacttttagatagtcttacaaaatgacctatgccaacaatgatgactgcagctatcaaaatcaatatttataattgtaagtagtcatagaataccatgtttattttttatgaatttgaaatctaataagtttaacttatttttcatgtatatttacttatttgaaacttccaaaattatttttaataattttgtaagagtcaatcaaaagtattaatacaataggagtaaatccaggygggtatgttacacattgtcttacttagatttattttctacaaaccatatttgaatttgcagaagcactacattgatgaatttattaaataattaagtactcccaatatctggacagtgttctaaagttaatttatgtaaagacagatgca

SEQ ID NO: 23655 - DNA, 701 bp, Homo sapiens
attttcccccttttctgatgtggagataggcagactggggcaaacgttttgcactgcaaggactgtcacacattgacttttgctcctttcagggccatctaacctgacatctatcagagtgaatctaataattttaaattttctcatttgtgctttatggctttcacattgacagtctagggacaatgctgagtcttggatgggaaagtcaaggacaagaatggttagcaggcatctttcagtcaatgcagatgagtgtcgaagagatttaaagaggcaaaatgtgtgccaaaagtagcaaaaacagctgggaaacttttagatagtcttacaaaatgacctatgccaacaatgatgactgcagctatcaaaatcaatatttataattgtaagtagtcatagaataccatgtttattttttatgaatttgaaatctaataagtttaacttatttttcatgtatatttacttatttgaaacttccaaaattatttttaataattttgtaagagtcaatcaaaagtattaatacaataggagtaaatccaggcgggtatgttacacattgtcttacttagatttattttctacaaaccatatttgaatttgcagaagcactacattgatgaatttattaaataattaagtacycccaatatctggacagtgttctaaagttaatttatgtaaagacagatgca

SEQ ID NO: 23656 - DNA, 1181 bp, Homo sapiens
tgtgcttaaagaactcacagtaagggatgggaagaggaggtagaacctgaacagatcatcacaacatggtagaaaggctttgagcaagatggtcacagaaaataggaaggataatgttaagaacgacagtgatggtaacaatgtccaacattcttgtagtgctgtatgaggcagaataaaccaggttatgctgcagtaacaagcccacaattttcgtggcttaaaacagccaagttttatttcttgctcatgctacttgttcattgcaggttggcactggaggaagggtgggaggaaacgctgcccattatagttactcaaagaccagggcaagtgaagcagccaccatctcaaaagctgatggtcactktgccacaaagaaagagaaatcagggggtatcttatacctgcagttaaataatctggtctaggaaatgacttccataatttctgcaaataattcattggccagggctagtaccattcccctagcttcaaggagagtaaaaagtgcaattctaccacatttgtgcaagtcaggaagccagaaatatttaataaactgcattaatagctatcatatatatttgctacttcaggtaccacccaaatatgttacataaattagtttatttcattcagataacaatcataggaggcagggactattatccccatcatgcagttaagcaaatggaggtccaatgtactcaacattatgtaatgtacccaagaccacagagcaagtgttacagctggaatttgagcccaggacttaagctccagacccatgtcactctatcagatggactcaggagaagaagacctcttggcctcagggcaggaaggtaatctggagaggtaaattggagccagaggtcagaaagcctcaccatggccaggacacacactccgccatcttaaaggatgttctcacaaaagatgcgtccagcattctgccaaaagtgcattccctgaatataatcacaaggaaactatcagacagatccaggtggaggaacatccaacaaagcaacttccctgaaccactagcaattccaaagttgtgaatgacaaaggggagagcaggacatgggtgggggctcaggcactgttccaggtgaaaggggtgtgaatgccactcttggctctcagctgcatgttatatctgggctgggggt

SEQ ID NO: 23657 - DNA, 560 bp, Homo sapiens
caaaaagtattgagaaaggctaggatctccctctccaaacgggagaaacagctctggcctccttggaggtcctgagcaagacaggctggtccctgaacccagcttacttttccaccagccttaagaaccaggacaccagagtggcaggtcctgaaatgacgcgggggactggaggtggtggtcttctggggacagaaaagggctgtggartcatatagccctggcttccaaaacagagtccgcacatacatgccatggaccttcgcatagattgatttaatttcttggttacattaatggagaaatgtgcccagatattaaagatatcaactcaaagagtcattggcaggcttagaaattatctatgaaaagcacctatcacagaaatgggtatatagtaagggctgggatgacattatcaacaattattattattttactcagttatcttctggggtgaccattcccctctcctcaactgcaccccctttgatctttctacccttgcatctgtagtgggtttgagggacaggacctcctgctcccaccctgcctactgc

SEQ ID NO: 23658 - DNA, 560 bp, Homo sapiens
caaaaagtattgagaaaggctaggatctccctctccaaacgggagaaacagctctggcctccttggaggtcctgagcaagacaggctggtccctgaacccagcttacttttccaccagccttaagaaccaggacaccagagtggcaggtcctgaaatgacgcgggggactggaggtggtggtcttctggggacagaaaagggctgtggagtcatatagccctggcttccaaaacagagtccgcacatacatgccatggaccttcgcatagattgatttaayttcttggttacattaatggagaaatgtgcccagatattaaagatatcaactcaaagagtcattggcaggcttagaaattatctatgaaaagcacctatcacagaaatgggtatatagtaagggctgggatgacattatcaacaattattattattttactcagttatcttctggggtgaccattcccctctcctcaactgcaccccctttgatctttctacccttgcatctgtagtgggtttgagggacaggacctcctgctcccaccctgcctactgc

SEQ ID NO: 23659 - DNA, 491 bp, Homo sapiens
ccaaccctcggaatacaatgcaccagctgcacattaataaatatgtaatgtttgattagaaatatgtatagtatttttttccctccccaaatgccggctcgccctcaggcggaagacgggatctggcccacactgacgggtttctttcttgcttgctttgaaaatacaaactcaaatgttttcctgtcccagctgtttcccattgttgctgtttatcagcttgaaggatgaacagtggaataaaaaaacacgcttgcatttcaaatgtgccagtcagtcactccattgttcaaagaagaaagcttaattgtctgtgctggcaaacttctttttggtgaatgtccaggttttaagaaaagctattcagctgtgcaatttgtttaatacatgcagagaaaagcatataaaatcacacgtttttctgaaaaaaaaawtaaataaggggaaaagaggaattttggaaaagaacgagtcacacattgaagtttccc

SEQ ID NO: 23660 - DNA, 531 bp, Homo sapiens
aaataatgaaagaaaatttgtttttcaagtgattcccccatagctatccagcaagttaacattataaaatgagcataactcctagaatttgcttaggacacagtgtctcaagctcagttctactaaggttctgaaccagataattctgtgttgtgtagggctgccctgtgcactgtaggaagtttagaagcatcactggtctccatgcattagaggccagtagtactctcacctcagatgtggcaatcaaaaatctccagacactgccaaatgtccccaggagacaaaagcatcccaggctgagaactacgggcttagacctaaaaaatgcactagttacacagtaaaaatagtagcatattttaaacaataacaagtatatctagaaagaattaagaaagccaaaagttggtcctttgaaaaaatgaaagtcagaaaccactggtaagaytggtgaagaatataagaaagcacaaatgattaacattttggatgaaaataggaacacaagggcagatgctgctgaggttg

SEQ ID NO: 23661 - DNA, 777 bp, Homo sapiens
gaagccatgatggctagagagggttcgtaggggatgagctggggttagcccacattcaggggcagaggaggctgagaaggaagagccaccaaggctgcgggatcctaggttcccagccgacccagaacttcgcctcgatcctaaaggcatgtaacagccattcgcactttagagaaaaggagcacgcttcttcacaagcaggcttggattcagtatctgaatctagaaccggaaggtggtggggggcggagtttgggaggaagcctgaagaccctagcgggatgggatagactggccctacaccatgcatttcaggatagtacatgcctggcatgctcctgcccaggcttccgaggatgccccagccattccccagctagacagaataccaccccttgyacagagcacctaggcctcgaggcccctcctcctgaacaaggcttggttctccttcaggccaaagatgggacctggcgaacaggaccataaaatctcaaactttggggaattggtccagtgtattttccacaataaaactggaaaccagagacaggaatacaaaggcctggcttttcctggcccctgcccccactgtctccacccacccagccctgacccagggggcaccaaggtgcccatctgcagggagacccaggtctgctggccatcacccacccacttgtgtctgcttctgaaccatgttcactggatggagagcctctgcaggtgtccctcctgtggggagctttgccaggtggcctgctggaattgccccgg

SEQ ID NO: 23662 - DNA, 766 bp, Homo sapiens
tgttctcccccaaatccaggcagaaaagcttctctgcctgccacacccttcagaccccacaccagcccgaccctcctgctgccccgcctggacacctctcctctggtttctgtccccatcctcagatctctcttgtgtccacactagctccctcgggaagctcactgaacactgacaacaccttggaccctccagcagggctctccccatcaatgctagacttgcaaatccaactgcccaatagatgatgtcaccagaaggagacctcatgggcctcatgcccaaccagcccaaacctgaactcttgacctccttgcaccctgagtcttccctgcctcagataaccctgcctgtcctttcaggctgggaagctgagacctggagaagcatctctgactcttctttcttgtctacaccagatccattgagaaaaaagacgctgagctctagcttctaaacgayatctaaaatgggatcacttcctccttccctatcccagccttgtgagagccaccctccatctccctggctttttgtaactggccccagcttccaccccctgccccccagggtgcgaagtgtttgccacctggcagccaatcctggtcagatcccaccctttctctgtacaaagcccccagggggtcccatggccctcagaagaaaagcccaagtcttctgagcagtggcagcccacggtggcctgcccaccctcactctctggcagctcctccgccagcccctcctggactctgcccagcctcct

SEQ ID NO: 23663 - DNA, 766 bp, Homo sapiens
tgttctcccccaaatccaggcagaaaagcttctctgcctgccacacccttcagaccccacaccagcccgaccctcctgctgccccgcctggacacctctcctctggtttctgtccccatcctcagatctctcttgtgtccacactagctccctcgggaagctcactgaacactgacaacaccttggaccctccagcagggctctccccatcaatgctagacttgcaaatccaactgcccaatagatgatgtcaccagaaggagacctcatgggcctcatgcccaaccagcccaaacctgaactcttgacctccttgcaccctgagtcttccctgcctcagataaccctgcctgtcctttcaggctgggaagctgagacctggagaagcatctctgactcttctttcttgtctacaccagatccattgagaaaaaagacgctgagctctagcttctaaacgatatctaaaatgggatcacttcctccttccctatcccagccttgtgagagccaccctccatctccctggctttttgtaactggccccagcttccaccccctgccccccagggtgcraagtgtttgccacctggcagccaatcctggtcagatcccaccctttctctgtacaaagcccccagggggtcccatggccctcagaagaaaagcccaagtcttctgagcagtggcagcccacggtggcctgcccaccctcactctctggcagctcctccgccagcccctcctggactctgcccagcctcct

SEQ ID NO: 23664 - DNA, 669 bp, Homo sapiens
taaattacccagtctcaagtattatttatagccatgtgagaacagactaatgcagtaagaaaaaatgcatcatggggaggagggaagagacacaaaatgagagagagaaagcatatagacactcctcccatcccccacgaccaaagaaatagaaaaaaaaagataacacaaawgctgagacattaatttcttcaggtcctgacaatttttcccttcctgctttcatttctcatgatacgtgcctttctcccctcgggttctctaaaataaaactagtgtgtgagactctgttccttgaaaccaaaagagccataattggaacattcacataaccttaaaagacatgtaatatatgtaaatttggtctgaggtgattcagcagaactgtcatcacaaatgtcaatcactatggccatggagcatacaaactgagaacgaacctattgagctgaagctatcccttccctggttgtcagtgactgacaagcagccacatctgtgctactgctgtgccagtcatccaaggcacagatgccacctcttccacgtcacatcctggccatctctccagatacttccatcaccctcaggttctttgtctagttcccaatttggctctgtgactacccagccacctgcctttatttgacatagagatgaccgtggctc

SEQ ID NO: 23665 - DNA, 559 bp, Homo sapiens
ccccttatccattctataacctatttctatgaacttagttttctcaaactttgtgaaatttgcttctgctagccaactctgaggctcacttctgactcccagctaagtcacaacacttttcccataattyccaacttggggcacaactcagaactgaaactataagagaaaaataagacacacagcaatgttgacctctaccatactctgtgaaattagcaaatagcttgttttttaggtaggatatcagtagcccaaattattagaatggaatgtgtttttatatgtactcttaaagttattctttcaaattttggaaatgttgcttcttattatcagaaatattccctaaacagtttgtgcaagcattctcctgatggtgcctgtgagtgccaatgacatttttaaaagcttcttttcacttttgtatttgatgaatgtagaacttaagcactgatctgaagatgagaaaggccttttcatatcaaagtttctaaagaatgcccccaaatgatcaagatgcttgtcagggtattgaggcaaagtgacttgcggggtg

SEQ ID NO: 23666 - DNA, 559 bp, Homo sapiens
ccccttatccattctataacctatttctatgaacttagttttctcaaactttgtgaaatttgcttctgctagccaactctgaggctcacttctgactcccagctaagtcacaacacttttcccataatttccaacttggggcacaactcagaactgaaactataagagaaaaataagacacacagcaatgttgacctctaccatactctgtgaaattagcaaatagcttgttttttaggtaggatatcagtagcccaaattattagaatggaatgtgtttttatatgtactcttaaagttattctttcaaattttggaaatgttgcttcttattatcagaaatattccytaaacagtttgtgcaagcattctcctgatggtgcctgtgagtgccaatgacatttttaaaagcttcttttcacttttgtatttgatgaatgtagaacttaagcactgatctgaagatgagaaaggccttttcatatcaaagtttctaaagaatgcccccaaatgatcaagatgcttgtcagggtattgaggcaaagtgacttgcggggtg

SEQ ID NO: 23667 - DNA, 546 bp, Homo sapiens
acatcaatgttaccaacccagaagctctctaaatttcactgttcaagagtatttatcaaagctttgttttgtaggtgtgtttgatcaaatcattggccattggtgattgagctcaatctccagcctttctcccctcccgggaggttggagggtggggttaaatgttcaaccctctgatcccatgtttggtctttctggggaccagtccccaacctaaatctatctaaggccaccctgagtcacctcattaacataaactctagtatggtcaaaaggagctcattatgaataacaaaagatacacctatcactcaagaaattstaataatttaggagctctgtgccaggaactggaggcaaataaagaccaactatattataccacaactcaacaccattaatttgatttataaagctatgaagttagacagtgagacaaactttcctgaaccatgtacgcaaagaccacccccaaaatttcccccaaagttacttcccgaagaagctttgtcaaaatttccattagaagttattttcggccagatg

SEQ ID NO: 23668 - DNA, 2304 bp, Homo sapiens
tatagaaacatagtgcctcacttatctgtagtcaagactcagccaacaagcaaaaacgggctgggtgtgttggctcacgcctgtaattccagcactttgggaggcagaggcaggtagatcagcaggtccggagatggagaccatcctggctaacatggtgaaactccatctctactaaaagtacaaaaattagctaggcgtggtggtgtgcgcctgtaatcccagctactcaggaagctgaggcaggagaatcgtttgaaccagggagtcggaggttgcagtgagccaagactgcgccaccgcactgcagcctggcaacagagcgagactccatctcaaataaaaataaaaataaaaagcaaaactgaaccttgaaaagctaaaatacttatggcatatggactatgcactgaagctcatgcagtttactcttagaaggacacctcatggttatttattttaaacacatttctaagcagggcagttatctgcattcccaagctatgaccagccattgggaacagcagaaaagaatttagaaacaatgagaaaatgagttaaagtcaggcctgctgaggtcagcaaggagtgcagctgacatcatggcagtactagaagtgattggaaatctatttttaggagattaaaaaaaaaagaatactcatacagggccatttaatgaaggaatccacagttctatctctaaccatcaaaagtaagtcgtagagcctaaggtgataaatttcagcctggaaaacttactccaatcacagatacactggcccaaagttgctacacaagtaaaacattataattatttattttcttaaagctttggcaaactttgactttacactcttatttctgagtgtaaagtggagatcgactaacatccctacatccctgcctccagaataatctatcattactacaacttaactgtatagccctacacattctgtatttgtattgcattcatttattcatgtacttatgcatttgtattcacgtgtctgattcatttgacccttgtgaaaagctgtgacctgatgaaatggaataactcaccatagcttttcacttccccaacctttgttctaaccaatttcaggtaaaatgaaatgatacatgcatcactaattcaatggtcacattttttttctatcatatcttctgaaaagttgcaacaagccagaagatataaacatttcactggtttcaactgagtctaaaggacaggattataatcagttgaaagagattcttggtttactttatggcagcaactagcttatgtgacaggatgccagacacatttgaacattagcttgaccaactagaaaacagttgaatgtttggcattgtgcagacgyaatattaaagtcactgaaatgtatataaacatatgtatacacatatatatacaaagttgataggcaatctccataggaaaaagatgaaaatgaccctccagatttaaattacatttatagcattgtgctatcattgtcagtggagttgaaaaccttacactgtactagaaaatacctttctaagccatctaggttttccaatagttttcctctgatatatattgcaattttcttaaacaaactatattttcaatattaagctttctatgtcattaagtcaaaatgtatccttatgataaatgtaatatgctttgcatatacaagtatggtacaataaatcaattttatcaaaaacttaagttgatgtcttatcaaagtgtgcataaggttaccaaattacagtattgaagtttgaagaacaaaaaccattattatttctttaaccatctgtcagttcacacaacagaaatacacacagagggcctgaattaaaatcagttctggtgttccataactgtaactgttaaaatttttctcccaggagacattcaatttctattgtccaaattcattcacaagtgatgtgctgacttttttaaacaaaatgaaagatttatgagagtaattattcatgctatagtgcacactacttaattcacagacaatcccgcttcagagaaacactgctggggtcttccacatacaggttatctgacccctcatagacaaggccactttgtgttatcaacatttttcgtttactcattaataacctcaacagagaataaggagcagtcttaaaactctgggtgaaaccacaaagtgggagatttgaaatgcaatattctcttgtgggaaatacccattagcattgccggcagtgcaggcgtcaccgacatccgccgtaaataggttagaaactcatgtgctt

SEQ ID NO: 23669 - DNA, 2304 bp, Homo sapiens
tatagaaacatagtgcctcacttatctgtagtcaagactcagccaacaagcaaaaacgggctgggtgtgttggctcacgcctgtaattccagcactttgggaggcagaggcaggtagatcagcaggtccggagatggagaccatcctggctaacatggtgaaactccatctctactaaaagtacaaaaattagctaggcgtggtggtgtgcgcctgtaatcccagctactcaggaagctgaggcaggagaatcgtttgaaccagggagtcggaggttgcagtgagccaagactgcgccaccgcactgcagcctggcaacagagcgagactccatctcaaataaaaataaaaataaaaagcaaaactgaaccttgaaaagctaaaatacttatggcatatggactatgcactgaagctcatgcagtttactcttagaaggacacctcatggttatttattttaaacacatttctaagcagggcagttatctgcattcccaagctatgaccagccattgggaacagcagaaaagaatttagaaacaatgagaaaatgagttaaagtcaggcctgctgaggtcagcaaggagtgcagctgacatcatggcagtactagaagtgattggaaatctatttttaggagattaaaaaaaaaagaatactcatacagggccatttaatgaaggaatccacagttctatctctaaccatcaaaagtaagtcgtagagcctaaggtgataaatttcagcctggaaaacttactccaatcacagatacactggcccaaagttgctacacaagtaaaacattataattatttattttcttaaagctttggcaaactttgactttacactcttatttctgagtgtaaagtggagatcgactaacatccctacatccctgcctccagaataatctatcattactacaacttaactgtatagccctacacattctgtatttgtattgcattcatttattcatgtacttatgcatttgtattcacgtgtctgattcatttgacccttgtgaaaagctgtgacctgatgaaatggaataactcaccatagcttttcacttccccaacctttgttctaaccaatttcaggtaaaatgaaatgatacatgcatcactaattcaatggtcacattttttttctatcatatcttctgaaaagttgcaacaagccagaagatataaacatttcactggtttcaactgagtctaaaggacaggattataatcagttgaaagagattcttggtttactttatggcagcaactagcttatgtgacaggatgccagacacatttgaacattagcttgaccaactagaaaacagttgaatgtttggcattgtgcagacgcaatattaaagtcactgaaatgtatataaacatatgtatacacatatatatacaaagttgataggcaatctccataggaaaaagatgaaaatgaccctccagatttaaattacatttatagcattgtgctatcattgtcagtggagttgaaaaccttacaytgtactagaaaatacctttctaagccatctaggttttccaatagttttcctctgatatatattgcaattttcttaaacaaactatattttcaatattaagctttctatgtcattaagtcaaaatgtatccttatgataaatgtaatatgctttgcatatacaagtatggtacaataaatcaattttatcaaaaacttaagttgatgtcttatcaaagtgtgcataaggttaccaaattacagtattgaagtttgaagaacaaaaaccattattatttctttaaccatctgtcagttcacacaacagaaatacacacagagggcctgaattaaaatcagttctggtgttccataactgtaactgttaaaatttttctcccaggagacattcaatttctattgtccaaattcattcacaagtgatgtgctgacttttttaaacaaaatgaaagatttatgagagtaattattcatgctatagtgcacactacttaattcacagacaatcccgcttcagagaaacactgctggggtcttccacatacaggttatctgacccctcatagacaaggccactttgtgttatcaacatttttcgtttactcattaataacctcaacagagaataaggagcagtcttaaaactctgggtgaaaccacaaagtgggagatttgaaatgcaatattctcttgtgggaaatacccattagcattgccggcagtgcaggcgtcaccgacatccgccgtaaataggttagaaactcatgtgctt

SEQ ID NO: 23670 - DNA, 1027 bp, Homo sapiens
gatccagacactctggcatgggggaaagacactaaagacacacaggttctaatgacacttctataccgacagccacctacttgcatctctagccagtactaatgtcctgagctctaggccagcatatccaatggcaaggtctttgaaggtatggcctccccagcctcatctcccccatgttcacacatgctcacctaatcccacccatgccaagctgtctggaacctgtggcctctgttgctttccatgcatgctgctctgttggtccaatacgtcccttcctaatgtctttgagttactccagcttatcttcccaaactcagcacaagggtcaccatcttgtagaacctaggggaggtaagtgctactttcactacattatggcattttccaagaagaaaacattaaggggcagctccttaggagactctgcgcctaagggctacagtctcgtcttactcatgttagcattccctatgctgggcagagtgccttatacagagggtgcttaggaaatgttagaggaaggaataagtgaatttaccaatgaagatatgaagtctatcgagggtttcagaaaattatgaaatgtaatgtctgaagcaattatcacatagcaagtcaaagttagggtactgacctataactttaaacaagtcatgtggttttttaatgcttccatgtctccagtgtcaaatggaaagaaaaaagaatctctaaaggttttttttcagctctaaaattctatgtttaatgtgtccatgcaggatctctgtggaaaggggcttaacttaaagaagaagagaagaaaatgaaggacgttttgggttttctgttcccaaagagttttcaggagaaaaacaaccaacaatctgttctraatggcttaatcatgtctgcaagatgataggtcatgaaagatgattcttaaattttacctcctttcccacttcctaattattagaaaacagacataaaaggcataggtagaaacttcccatcaaggaagttggcaacttggtaccca

SEQ ID NO: 23671 - DNA, 487 bp, Homo sapiens
tatcctagatttgcattactataaaataatttgaaattctctaaaagattaatacctaaaaaaattagaaacaagtaaaattaaggtkatagttatgtaaattatggcataggcatagataaaatattgctaacccattacaatcatgttttggaagttttctttaaggttttattgatatatagtacacatatcaaaaattcacatctgggtgaatttttacaaattaaacacatatgtgttctcatgccttgaccaagaaaccaaacattaccctcatttcagtatatgaaaagtttaaaaacctaggtcctgtaatcatgctcctcagaccaacagcatcaaactcccatggaaatttgctcgattttctaacttacaaattctccgattctacccctgacctaccaaattagaagttctgtgggtaaggcccagcagtctgttttaacaaagcctgcaggtgattctgaggcacaataaagtt

SEQ ID NO: 23672 - DNA, 487 bp, Homo sapiens
tatcctagatttgcattactataaaataatttgaaattctctaaaagattaatacctaaaaaaattagaaacaagtaaaattaaggttatagttatgtaaattatggcataggcatagataaaatattgctaacccattacaatcatgttttggaagttttctttaaggttttattgatatatagtacacatatcaaaaattcacatctgggtgaatttttacaaattaaacacatatgtgttctcatgccttgaccaagaaaccaaacatyaccctcatttcagtatatgaaaagtttaaaaacctaggtcctgtaatcatgctcctcagaccaacagcatcaaactcccatggaaatttgctcgattttctaacttacaaattctccgattctacccctgacctaccaaattagaagttctgtgggtaaggcccagcagtctgttttaacaaagcctgcaggtgattctgaggcacaataaagtt

SEQ ID NO: 23673 - DNA, 555 bp, Homo sapiens
taaaaggaagtttttcaattctgtctctccccagaaaggctaaaatacatagttctttaacagaacaaaatgaatcttcaaygaggacgggttaaaggagcgatttcagagctgcaaaacatagaaccaaactctgatcataatacagtaataatagtagctgctatcagtgcccagcccatatctgtcagccttatcacttcaaaaagcaggacttccacatgccagtactggcccctctgtacctgaaaatttctcctgaaggctgccctgttctagggctcacagatcatcggtatcaaggaattaatattctccaagagcacccctccgctaatgactggcagggtgagtgcgtaaatacctcaaccctctccaccgctagtgggatagacatgaagcatgtgtctcagcaattcccacgcagagttttcctgtggaactaagcttcagtttcagatacacacatgtattttatgcgatgccttcctttcctatatcactttttccttgctggtgttccttgtacctcccaaataaatggcttgcatttga

SEQ ID NO: 23674 - DNA, 555 bp, Homo sapiens
taaaaggaagtttttcaattctgtctctccccagaaaggctaaaatacatagttctttaacagaacaaaatgaatcttcaatgaggacgggttaaaggagcgatttcagagctgcaaaacatagaaccaaactctgatcataatacagtaataatagtagctgctatcagtgcccagcccatatctgtcagccttatcacttcaaaaagcaggacttccacatgccagtactggcccctctgtacctgaaaatttctcctgaaggctgccctgttctagggctcacagatcatcggtatcaaggaattaatattctccaagagcacccctccgctaatgactggcagggtgagtgcgtaaatacctcaaccctctccaccgctagtgggatagacatgaagcatgtgtctcagcaattcccacgcagagttttcctgtggaactaagcttcagtttcagatacacacatgtrttttatgcgatgccttcctttcctatatcactttttccttgctggtgttccttgtacctcccaaataaatggcttgcatttga

SEQ ID NO: 23675 - DNA, 545 bp, Homo sapiens
atatttgatttaaaaataaaatctgctagtataatctacatatatgattttaaagtaaaattttaaattttatttagaataaataatttaataattaataattaaaattaataattttaaaaaatttatttttatttaaaaagggtattatgctgagtgaaaaagccactctcaaaaggccacacactgaataattccatgtgtayagcattctcaaaaatcacaaaaatatagagatggaacacagtggttgttagaggttacctgggaagcggggggaaagggataggaggtgtgattataaaggggtagcatcagagagatctttgtggttttggactggttctgtattgtgattgcagttacaggaatctcatatgtgatgaaatggcatctgactacacacacattgtactaatgtcaatttctgggctttaatgctgtactaacgttacataacaatgtcaatactaggggaaacagggtgaagggtacacaagacctctctctattgtctttgcaacttcctgtgagtctataattgt

SEQ ID NO: 23676 - DNA, 989 bp, Homo sapiens
tcaagggagtttacagcctgaattcatactacctgggtaatacaaaaatctcaagctaagaatttcgtgtaatgttgtttaagtaggtagtgccctctgcaacctggcaaatttaaatacgtatgttctctgtaggcacacacatttaacttaggccttaaaagaattctataggccaggcgcaatggctcacgcctgtaatcccagcacttttggaggtcgaggtgggcgaatcatgaagtcaggagatcgagaccatcctggcctacatggtgagaaaccctatctctactaaaaacacaaaaaattagctgggcgtggtggcacgtgcctgtaattctagctgctgcggcaggagaatcctttgaacaaggagtcggaggttgcagtgagccaagattgcgccactgcactccagcctagcgacagagcaagactcgtctcaaataaaataaaataaaaaaagaagacgtatataaatgtccaaggagtatatgcactcatttagaagtcataaaacacacaacagccaggcgaggtagttcatggctataatcccagcactttcagaggctaaggcaggtggatcacctgaggtcaggagtttgagacgagcccggccaacatggctaagccctgtctctattaaaaatacaaaaattagccaggtgtagtggcaggcacctgtaatcccagctactcgggaggctgaggtgggacaatcacttgaacccagaaggtggatgttgcagtgagctgagatcgtgccactgcacttcagtctgggcaacagagcaagactctakctcaaaaaaaaatgaataaataaatacataataaaaaataaaataaaagtcataaaacacacaggaaatcaaggcgtttgagtgcaaaaaaaatagaccacaaaatgagatccacgaaaaatttcagatatttgcatagaatataaaatacacatctgtaacatatttaaagaaataaaggaa

SEQ ID NO: 23677 - DNA, 989 bp, Homo sapiens
tcaagggagtttacagcctgaattcatactacctgggtaatacaaaaatctcaagctaagaatttcgtgtaatgttgtttaagtaggtagtgccctctgcaacctggcaaatttaaatacgtatgttctctgtaggcacacacatttaacttaggccttaaaagaattctataggccaggcgcaatggctcacgcctgtaatcccagcacttttggaggtcgaggtgggcgaatcatgaagtcaggagatcgagaccatcctggcctacatggtgagaaaccctatctctactaaaaacacaaaaaattagctgggcgtggtggcacgtgcctgtaattctagctgctgcggcaggagaatcctttgaacaaggagtcggaggttgcagtgagccaagattgcgccactgcactccagcctagcgacagagcaagactcgtctcaaataaaataaaataaaaaaagaagacgtatataaatgtccaaggagtatatgcactcatttagaagtcataaaacacacaacagccaggcgaggtagttcatggctataatcccagcactttcagaggctaaggcaggtggatcacctgaggtcaggagtttgagacgagcccggccaacatggctaagccctgtctctattaaaaatacaaaaattagccaggtgtagtggcaggcacctgtaatcccagctactcgggaggctgaggtgggacaatcacttgaacccagaaggtggatgttgcagtgagctgagatcgtgccactgcacttcagtctgggcaacagagcaagactctatctcaaaaaaaaatgaataaataaatamataataaaaaataaaataaaagtcataaaacacacaggaaatcaaggcgtttgagtgcaaaaaaaatagaccacaaaatgagatccacgaaaaatttcagatatttgcatagaatataaaatacacatctgtaacatatttaaagaaataaaggaa

SEQ ID NO: 23678 - DNA, 989 bp, Homo sapiens
tcaagggagtttacagcctgaattcatactacctgggtaatacaaaaatctcaagctaagaatttcgtgtaatgttgtttaagtaggtagtgccctctgcaacctggcaaatttaaatacgtatgttctctgtaggcacacacatttaacttaggccttaaaagaattctataggccaggcgcaatggctcacgcctgtaatcccagcacttttggaggtcgaggtgggcgaatcatgaagtcaggagatcgagaccatcctggcctacatggtgagaaaccctatctctactaaaaacacaaaaaattagctgggcgtggtggcacgtgcctgtaattctagctgctgcggcaggagaatcctttgaacaaggagtcggaggttgcagtgagccaagattgcgccactgcactccagcctagcgacagagcaagactcgtctcaaataaaataaaataaaaaaagaagacgtatataaatgtccaaggagtatatgcactcatttagaagtcataaaacacacaacagccaggcgaggtagttcatggctataatcccagcactttcagaggctaaggcaggtggatcacctgaggtcaggagtttgagacgagcccggccaacatggctaagccctgtctctattaaaaatacaaaaattagccaggtgtagtggcaggcacctgtaatcccagctactcgggaggctgaggtgggacaatcacttgaacccagaaggtggatgttgcagtgagctgagatcgtgccactgcacttcagtctgggcaacagagcaagactctatctcaaaaaaaaatgaataaataaatacataataaaaaataaaataaaagtcataaaacacacaggaaatcaaggcgtttgagtgcaaaaaaaawagaccacaaaatgagatccacgaaaaatttcagatatttgcatagaatataaaatacacatctgtaacatatttaaagaaataaaggaa

SEQ ID NO: 23679 - DNA, 989 bp, Homo sapiens
tcaagggagtttacagcctgaattcatactacctgggtaatacaaaaatctcaagctaagaatttcgtgtaatgttgtttaagtaggtagtgccctctgcaacctggcaaatttaaatacgtatgttctctgtaggcacacacatttaacttaggccttaaaagaattctataggccaggcgcaatggctcacgcctgtaatcccagcacttttggaggtcgaggtgggcgaatcatgaagtcaggagatcgagaccatcctggcctacatggtgagaaaccctatctctactaaaaacacaaaaaattagctgggcgtggtggcacgtgcctgtaattctagctgctgcggcaggagaatcctttgaacaaggagtcggaggttgcagtgagccaagattgcgccactgcactccagcctagcgacagagcaagactcgtctcaaataaaataaaataaaaaaagaagacgtatataaatgtccaaggagtatatgcactcatttagaagtcataaaacacacaacagccaggcgaggtagttcatggctataatcccagcactttcagaggctaaggcaggtggatcacctgaggtcaggagtttgagacgagcccggccaacatggctaagccctgtctctattaaaaatacaaaaattagccaggtgtagtggcaggcacctgtaatcccagctactcgggaggctgaggtgggacaatcacttgaacccagaaggtggatgttgcagtgagctgagatcgtgccactgcacttcagtctgggcaacagagcaagactctatctcaaaaaaaaatgaataaataaatacataataaaaaataaaataaaagtcataaaacacacaggaaatcaaggcgtttgagtgcaaaaaaaatagaccacaaaatgagatccacgaaaaatttcagatatttgcatagaatataaaatacacatctgtaacatayttaaagaaataaaggaa

SEQ ID NO: 23680 - DNA, 551 bp, Homo sapiens
tagcatgccagcaccggggagcagggcaatgggcatatccccaagttaaatctccaaagaccccattgtttttatctaaaatcagcagtttttcttggataaatgagtttgttcgttccctgcctttggttacttagttcaggaatggttgattttaatcgttttgccaatatgttaacctaattcctctctgtcattccagaagtcccacccccttatgtaaagtttcttgctcatttatctcaaatgttttcctataaaatttttatgcgctgacacaaaaacttttacatgattgtttattacagcattattcataatagccaaaaaaataaaaacaagccaactgtccatcaactgatgaatggacagattttggtgtatattcatacggtgcaatattattcagctatacaaaggaatgaagtactgatacatgctacaacacggatgaaccttgaaaacrtcatgctagggctggatgcagtggcttgcacctacatgtagtcccaactacatgggagctgaggcaggaggattgtttaggccca

SEQ ID NO: 23681 - DNA, 669 bp, Homo sapiens
aaagaacctctcccagtccctttgtccaatcctggcatctcatttttcaatgcttacatagacctctcctctggggtcacctggcacaacaacgctttactaactgccttcaattcttaggtcatactgaggcattaggcttgccaacctggttgaagtgtgagatcttagagaaaaagaatcttctttcctcctcctttatcttcttttctcctcctctgcttccttcccctgctcctccttcttcttctctgtttttcttacaagggttaaacaagkgtctattttgagcttagcacaaagtctgttcccactttctccaagtgtcccacctaagtgctgaagctcagtaaataagcccaattggaagtggatacatgattagttaattgttcagtggcaaagttcttacagttgattttctctgcaatcactctagaaaaagataagtaaaagccttggttggtgggaaagatggtctttttgaagataaaaaacatattcagaggaatgtttttgggttagttctttttttttttttttttttttgcacttagcatctgacaaagagagagtcattaatgccatagcgtgcatatgagactgtaatgagatgattctcacctgagtgatttctgaggcattcatctcattgaatctaaataccag

SEQ ID NO: 23682 - DNA, 658 bp, Homo sapiens
aaaatatactgaagttttgagatgatcacgcctaagaaaaaaaacaagtccctatcttcaaggcagggagggctcaaaacaccacagagagcattttcctcttaggaaagttattagtaattaacaagcttcataatgacatgttatgacatggttaggtaaattactccagaagcagtagaaggaaacraatgtcacattctacaagtcctggccaatgccaaggattcacttggaaggttaactaagatggagctcattatgctgtattaggtatcagagtattttgtcttcttgaagataaaaccttggtgactgatattaccataacttgagggcaggaagagagatctgatatacagaccatgaggcactttgaaaaccctagacatataatgctctttaccttgacatttcccatcctctaatgatccatctacccagtatttttaggtcaaaaaaatatatatgatacaatgctgcttcatgggtcaaaccacggtctctgctggtattttaatactgcatcattatcaacagaatacgtaaatcactcgcatcttaagcatttaggcaaatggggaattttgcttagaatttcagactgtgcccaaaagtaaagatgttcaatgcactgatttctgtgccaagcctagtg

SEQ ID NO: 23683 - DNA, 508 bp, Homo sapiens
ctcggctcactgcaacctctgccttccggcttcaagtgattctcctgcctcagcctcrcgagtagctgggactataggcacacgccaccatgacaagctaatttttgtatttttagtagagacggggtttcaccatgttggccaggatggtctcgatctcttgacctcgtaatccacccacctcagcctcccaaagtgctgggattacaggtgtgaggcactgcacccagcccattcatccaaatttaaacatgctgtccacttcctacagggactttggctgatacatgtgaccaaggcatatggagtcaggggagtcttaacctgcagagcaggagaggggactccttggccatttgcttccttatcgtaggggcagacagactccacaagctgccaccagaagagcacggcactgctagctcaagatgttccatccccaggaaataacctaagttataaaaggcaggtgcaaaagcatgacgtacccttctgtctccttttttct

SEQ ID NO: 23684 - DNA, 508 bp, Homo sapiens
ctcggctcactgcaacctctgccttccggcttcaagtgattctcctgcctcagcctcgcgagtagctgggactataggcacaygccaccatgacaagctaatttttgtatttttagtagagacggggtttcaccatgttggccaggatggtctcgatctcttgacctcgtaatccacccacctcagcctcccaaagtgctgggattacaggtgtgaggcactgcacccagcccattcatccaaatttaaacatgctgtccacttcctacagggactttggctgatacatgtgaccaaggcatatggagtcaggggagtcttaacctgcagagcaggagaggggactccttggccatttgcttccttatcgtaggggcagacagactccacaagctgccaccagaagagcacggcactgctagctcaagatgttccatccccaggaaataacctaagttataaaaggcaggtgcaaaagcatgacgtacccttctgtctccttttttct

SEQ ID NO: 23685 - DNA, 569 bp, Homo sapiens
ttttgtaatttttgtagagacaggtttcaccatgttgctcaggctggtctcaaactcttgagctcraatgatccgcccaccccagcttcccaacgtgctggagctacaggcatgagccaccatgcccagcccacttaatttatttcccatattttctatgtgtcttcttaatccattctctggattgtttttgtatttgggtgtttatatgacattttcatatacttcatttcccttcaactctcattatgttgacattatccagattttcatattttaagattattatggatacactattttattttcttctatcttagtaatgctttaaagacaatagcagtgataacaaaaagccaccaaagtattaaatcacttttacttcatattttcatactttttaagattattatggatatacaattttattttcttcttagtaatgctttaaagacaatagcagtgataaaaagctaccaaagtattaaatcacttttacttcatatatttattgcagcttctcctgaatttgtctcttcacttccttaagtgctttatctaaaactctt

SEQ ID NO: 23686 - DNA, 518 bp, Homo sapiens
agcaatagtcacatgccctctctattctggaagaaacagaactaccctgtgtactcgatgggattatagatacaaagagatttatggaatgaactctaaagaattggttttgaacttaagtccrtaaaaaaatggttatgaaaagaaaacttcaaaggtatggactgaggcgatagaagaggcaaagggcttgtacggcatccactcattcattagatggacaattatgccccaaacactatgttaggggctaggagctgccttctaggatctcattatctagtgggaaaaagacaggttaaccaacaatgactaattcagccttagtactaccatagaggtgagcctggagtgggctgtgagcacgggattgcttcctcaccctatttgtgatatgaaaataaacaaatcatttgcttccaactaaaggtagtggacagaactcacctgtttttatctctactccctgaggaagtcccatcaaaatgaaagtaaggaaattgaaaaaggcatgaacc

SEQ ID NO: 23687 - DNA, 537 bp, Homo sapiens
ttcacctaacgttcctaagcatggcttcttaagtagcttgtcttctttattgtattatattttaaagaagagttttataaaagtctcaaactgtactacaaactgaaaagcaatagaatgagttgaagatgaaatcctaacccctatttaggatcctgtttttgttttttttttaagaccactaacatttttgcaaagcgttaattgcttaacaattattattaactattatgactttcatgagttcggatgcttacacyatcagctcaaaatagctctcctttttgtttctgaaaatactaatttttaatatccatatgaaaattctctaatctgcttctttcattgaaactaatacagtataaacatttagttgagtgctagcattttgttctatggtttttaattatgattcaatcaaaactggagggttttgattatgattgtatatattagctttcatttttcttagaaacttttaacattattattctatgagaagggtaggttatctgaattcaatttgccaggtgatgg

SEQ ID NO: 23688 - DNA, 1099 bp, Homo sapiens
cagcccttaaaatccttgtgttgtttcttcctgcagacctggtccagaacactacttcaggacagggaatagtgacaggccagcagagccccagaggcgaggtggcaggtaagtctacaatccttgggcccttgctctgtgcccagggaaaagagagggatctccaagccctggcttctctaacctatcttcacctggtcactcacagcactgcacaatttccagttctcagaatcagatttcttccaaaggagggatgtgtgaagggagcacgaggggtgggggcaatcagcaatcaggaatcttccccatcaaggtgcggtggcccctggactgtggcccagcagcaacctgtggcagccagatctggggcaggaggtggagggcttccactcgtcatgagggtgtccagggggagtgtcaccagtcgccatgtgccagcggcaggcctggatgccactctctccttgtgaccctggccaggacggaacggaaggcccccaagatcaagtagatgacactgcaccccaccccccmcaacccactgaatcctatccatccagaggggtcactggccaaggggaacacaggaacagcttgtgataaagggccgcctaggccctcatgcccactctatctcctgcccctccccaactgaaggctgctctccagcatctctgttgtcctgctccttcctctttttttttttttttttttttttgagatggagtctcactctgtcacccaggttggagtgcaatggcgcaatctcggcccactgcaaactccgcctcccgaattcaaatgattctcctgccttagcctcccatgtagctgggattacaggggcctgccaccatgcccggctaatttttttgtttttttaatagagacagggtttcagcatattggccacactggtttcgaactcctgacctcaagtgacccgcccacctcggcctcccaaagtgttgggattacaggcgtgagccaccgcacctgacctccttcccccttttcttactactcactcccacgtcctgggtggcccattcatggctccacccaactctgggagctccccatccttcaggcagca

SEQ ID NO: 23689 - DNA, 1099 bp, Homo sapiens
cagcccttaaaatccttgtgttgtttcttcctgcagacctggtccagaacactacttcaggacagggaatagtgacaggccagcagagccccagaggcgaggtggcaggtaagtctacaatccttgggcccttgctctgtgcccagggaaaagagagggatctccaagccctggcttctctaacctatcttcacctggtcactcacagcactgcacaatttccagttctcagaatcagatttcttccaaaggagggatgtgtgaagggagcacgaggggtgggggcaatcagcaatcaggaatcttccccatcaaggtgcggtggcccctggactgtggcccagcagcaacctgtggcagccagatctggggcaggaggtggagggcttccactcgtcatgagggtgtccagggggagtgtcaccagtcgccatgtgccagcggcaggcctggatgccactctctccttgtgaccctggccaggacggaacggaaggcccccaagatcaagtagatgacactgcaccccaccccccacaacccactgaatcctatccatccagaggggtcactggccaaggggaacacaggaacagcttgtgataaagggccgcctaggccctcatgcccactctatctcctgcccctccccaactgaaggctgctctccagcatctctgttgtcctgctccttccyctttttttttttttttttttttttgagatggagtctcactctgtcacccaggttggagtgcaatggcgcaatctcggcccactgcaaactccgcctcccgaattcaaatgattctcctgccttagcctcccatgtagctgggattacaggggcctgccaccatgcccggctaatttttttgtttttttaatagagacagggtttcagcatattggccacactggtttcgaactcctgacctcaagtgacccgcccacctcggcctcccaaagtgttgggattacaggcgtgagccaccgcacctgacctccttcccccttttcttactactcactcccacgtcctgggtggcccattcatggctccacccaactctgggagctccccatccttcaggcagca

SEQ ID NO: 23690 - DNA, 556 bp, Homo sapiens
caagtatgacccccttttggaagagaaaaatagacatttggggaatcatcctctgtggaaaacaggtttcgctttattcaacatatgttccagaacttcttatctagcaaatgtctgtggcacttactgtggccaggcatggttcaagtgctttgcatacatcatctcatagaaactatgagatagsgatgattattatccacaacaaaggaggaaactgggacacaaaccttcaataatcttagataaccgagaaggctatggagatagcccaagtgggagaagacagtaggtagtttcttcagatcttcaatcctgtgaccataaaaggggtaaggaggggtagaagggtcgctgtcccactctaggcagaacaaaacatccaaactttatgcatccgacttcaggagttcagatgtcgtcacagacaccaacatattaacgttctcttgcaattattcatagctaaactcatcatgttcttgcttttggtagaaatataatcataagccttaaatttctttgatttcaccttagttaaaatttgatagaaacc

SEQ ID NO: 23691 - DNA, 759 bp, Homo sapiens
tttatattttaatgggagaaacagagtagactcatggctcacgcctataatcccaggactttgggaggccaaggcaagaggatcacttgaggccaggagctcaaaaccagcctgggcagcaagtgtcttcttttgcctctgcaaaagaaaattaaaaataacaaaaaaaggaagctaaactagagtattgtggtagaggggtgtgtgtgtgtgcatgtgggtgcatccgtgtgtgtggtaggttgatgggtgctgttttatttagccagggaaggtctctttgaggaggtggcattcgagaccttctgggtgggaaggaggcagccatgtggtgatctggggaagagtgctgcaagcagaaaggcaagtaaaaacaaaagccctgaggcagaaatgtgctccttatgcttaagaaacaccgtgaaggccaacgtggttggagcaatgtgagcaagaagaatagaggggccttgggaacataggtagctgagtcctcatggatcaaggtaagaagtgtgggttttattttgttgcagtgggaagcctttggagggttagaaggtggggagtgaagaaaacagttaagatactattgcaaaagtcctggcaggaggagattttaaaaaccmcagttgtggctatggagatggtgagatgtgatactggtttctgggtcagttttggaggtgggaatagataaggcttactgatgatctgacccaggactaactgggtagtcctatgttgggggtaggaggt

SEQ ID NO: 23692 - DNA, 638 bp, Homo sapiens
agctgcaaagaacctatttcctaatgaggtcatattcagtggttagaatttcagcatctatatagaggaaacaatttagctcctatctgtgcatacatgattgtaatagctatgtcttcctaaagcgttgtcccccttttcactagaatataaayttttaaaatcctattcatatttttaatagtctatattgtgtgttatgagtataatgatttcagtgttcttatgattgctctttgcatgatattttttgtcatctttttactttcaatccattagtatccttgcatctcagcgtatattgggatcacttgttttaatccagtctgacaatctctgcttctggaatggattttaatctgctcacatttaagattataattggtataattctatttatgtctgccattttaccgtttgttttatatatttctcaaatatttttctttatcgctttattttgcaatgaaagaatattttctaaaatagggaactttagattactaatgaattattttattatatatttttgagaatttttgttgttgtaagtttaccctatatgtatatggaaaattaattattcaaaccatcttccaatctacactagtaaacttttagtaatacatagaaacaac

SEQ ID NO: 23693 - DNA, 1804 bp, Homo sapiens
gcatgtgagtgtacacacagacacatatccatgtattctccatctgttctcagttactgaattattagacccaactgaccacttgactgtgtttaacctgataaacagactcttaacaagaacaatattttaaaaactggattgttcctcctacttctcagcatgcatcagccactctctttccccatcctatctcctgccaaatggtctctaaatatctgttccacttggagacactattggatgttgttgtaaatgactttaatgaatattcactctacctgctttcatattaattcagttttcctaggatggtctctatgggatcaagcaaaaggacttagtggaatatctctatctgactccataaagtaaagaatgtggtgagtttaacagagtgccccttcctttactaaatgtgaatgatgtttcagtataggaggccagagtgaaaagtcctaacgtatgtttgtttgggcagccaacaattggtcacattgtacatttcttgttacaaaggagcctcatggtagtataaatgagggtcgggaaaagacacttaactgctcagggctttaaaatggagccagagcaagaattgtagaagttgacaatatcaggaaggaaacctctgtaagcaggcacgcaggggaactccagaaatctcttctttgcccctacaactctggactttcagaaatacacaccccatcctcctgtattaatacaaaattcatgttcacaacaacatcaaaaatcaattttaaaatagtaaacctaaggtagacggaaagacattatagcctcagcatgcctgagatctgaggagcaaatcagaaagatgttgagtgtgaagagaaagggacatcgtgataaccaatcatttaaaatttttactccagagaaatggcaatatttcacagattgtttctcatcaccaatctcacaagtataagtattttttgaaaattttcctctcaatttttttccttgacagtgaagtccagaataggttggtttagatcttgctcttttcagcctcaatactccataatcaccttggcttttttgattatgactggatggcatgtactattattttaatattaaagatttagtaaataattttaaatgttatccttaaataactgtgggctttattcatttactgtacatattttgaaaacattcataagaacttaaggattttaattcaaatggtctctaaagtagaaaatgcactcacagattatgcgtatgtcttttaagaaacagaaacgtgccatttgtttttaaattgagtagactttgtatcctttagaatttgggcagagttttcttgctatattgtagagaacctatcaaccatatcttaattttcttcttcttgaggttttcaaaattaacattggcattggtccactaattccttgttttctatttttggatgagtgtgcataattacctccatcttaattttcaacataaatgtttagcagaatctttcatgtttcattgccatgtaagcagatgtggtttttattctttttccttttcattgaacagttacttcatttgaaatttttcacttgatttaacttttttttttggtggtagatacatctgttgccacctgtgtctggttggmattttaatgtgttgcctcgaagctgtaaccacaatagtggcacattttcctgctgttcctttattctttgtttcttgtgtatctgttttcaagaaattgcattggtatactatcatagctttttttgtctctcagattttctattgtaattattta

SEQ ID NO: 23694 - DNA, 580 bp, Homo sapiens
ccctgtgaactgccagccacgagggcggcgctctctcacagcagcattccgctagctgcaggcctctagggcttagaaaacgcatgcttttaacttttgcaagacttgattaatttctcatataaaaccatgtcattgtatgatgccgctgtgcattggatgcttgtgttttcagttatatattatttatttctgaatcaaatatgatatttagcgcctactctatataattaatgaaataaagctggattcattttgtgatgatttgcatgccttccttctttcttactcttcatgttttgagcatcataccatgtggtccctcagaggacagagacaaataactaccttcagcaaggacaaggggtgagttgaactgaattttaaacactacactttatgattgcagtcaacatttttaaatatggagcaattacatgccaaaacgacacaagaagcacgccttctagagataagctgttgcatttttttgggcaagtgcaacatgtagagatgaatggtttattttcccccaaactttacaaattgcrtaagcaaataaaataactgttatcctgga

SEQ ID NO: 23695 - DNA, 608 bp, Homo sapiens
ccccagctaaactgcagggagaaagcaaggcctgcttacccgcaggattgggacatgtctatcctgtaggcatgcctgtccaccagcctcttacatggcccctgcctggcttcctgggagaagcatgtatacattgtagtttctgctacccaacctggatgcttggctccacctgaatgcattctggcggcccagaaatccctcagatccctcaccacacttggaacctggccctaagcatcaggaagagggagtcataagcaagtcgtggcactccagtgctgtggcctgtggttcaggagtgccaagctgggatctgtgctgggcagttgaatkggggaggaacccacactcttcagaaactgagaggccagattcacacaggttcacaggctggcgtgggccctaggcacacctccttccacagggctgttatggtaaagatgcagggtatttttctagaagacatctccctgagggagccccacagcttgaaacacctaacaacaatgacaataatgataatgatagtaataggccgggcgtggtggctcacgcctgtaatcccagcactttgggaggaggaggcgggcggatcacgaggtcag

SEQ ID NO: 23696 - DNA, 647 bp, Homo sapiens
aagccctcttaggctcctaatatttctatagcaacaatttcaacgtttattttagaatgtggtcagaattaaccgacagaagaccaaacaggataaaataggtttaaagcaggaaatactttagctggaccactaacttaccctctatgaccttaggcaaactgtttgccgtctctgtgctttgattctctcatttcttaaaatggagattataatacgcacccttgtgtgtctcctccaccaggtaaaagtgaaacaataacttctcaatatacctttgcttatattcaaagctccaggtaaatrtaagatgttgctataattacctaagaaagctaggaagatttttctttgttgattccaaggtgagttgtagaaattccagaagatggattaatgtagtctgagggctcagacttctgcatctgtgtagatagtacctattttcatatactgtggcctggctctgtttctggcctggctctgtttccaaggtttaagttccattcttttaactgtgtatcaactattttcacttggttgttctacttttacttaaaccctttatatatgtctggatttagttgtaggaaacagaaactatgtgagatagggaaataggttgatataaagtcatcaggaggacc

SEQ ID NO: 23697 - DNA, 2108 bp, Homo sapiens
tggtaaaaacattcagacattcggatgaactctgacagtcatggaccaaatcacacatgctgcattacacatggtgaaatgatctgcaaacagatatcaagcatactaattaagtgctttgtaaaaataaatttctcaaaattttcatcaaggattttgaaaaagtcaggaatgattaagttggaaaatgcagtttcttttctctttcctttttttttttwaaaaaaccatgattttaaattatgatcaaatcttataaaactatgagaagagttgctggcccatctctagattaagaacaaactgaaataaattagatttcatgtccaaaaaaaagtaatccagctcaacaacctgtgtgccaagtttctctcatataatttgaaacagtcaagcaataaactctgaaaaaggaatttctaatggaagccttgaaaacacttgactccagctttgctactgggtgccataataaatccagaaacctaaaacctcagatacactggagaagtaaaaactttcagcggagctatgtaatgtatagtctaatatgaaagcttaagaagcaaaaactttgctccagtgaaagtttcatatactttattccccaggcattcaattcccctcccccaccctttgccaacatttcattccttgctaccatattatgaaagctaaaaaaaagcttcctgaatttttgagataaaaatgtcatagtatttaacgtcatttagaagagaaggctttaaaacacaaaagctaggctatgagattcggggaagtagttaggtcaaatatttacgacacagaatggagagactgttttgagtaatagttacaggctgaccaaatttggggcataaggttgaaaacaaccttagggttaaaaaaagcactctagattttcttttcaaacagtggcagacattctgtagctgtattgttgaaggaaatgtaggtcattcatagtttttattagggatacacagataacaatcagcagcaaggctatcccctatgactagggctacagaaggctgctagtaaactgaatagaataagcttcactaaaatagctgaggaaagtctatttgaaagataatgattttgctcaaaattgctacttgacttcataggtgaaaacagtgctctctgatttaagattgctcaaaggaaaaaaactgtctgtgtatatttatttgcctctgaatcattactttcctgtggtgttgggtcaaactataaatcagaactcagtattttcttactcttaccacccacaggaatggaggggacagttttgtcagctctctacatgcataaaatcacactcagtggaagggtactcccaaaggctggttgggaacaggaagaactcaaatcctggctcatcttcttatagggaccatttttacggtcaagtttaatggattccaacttgagatttacagtaaaagaaatgggaatctgatttttttttccttttttttttagatggagtctcactctgtcaccgacgatggagtgcagtgtcgtgatctcggctcactgcaccctctgcctcctggttcaagtgattctcctgcctcagcctccggagtagctgggactacaggcatgtgccaccacacctggcaggaatctgaaccttacagtcaatatttcagaaagcccaataagaaacatacatttactggcaatgaagttgcaaaactgaactaatggttttgtgttgttttcatttcttgatagaattgtgccaatccagtgtcataacgcaggttatttaacaattagcagaaggagggattggcatgatacaggtctctttgaggaatacaaacagctaatttagtaggccaaatctttctgaacacaaggtccctagagagaaaaacagctgttgtttaaaggcagggaatcatttacccatttcaatctaatcattttacagttcaggtggttaactgaggctcacagaagtaaagaatttggccagagaccttaagtaatggaaacaacactcaaatctcgctctaagagttaaattcttcccactcttcaaagttaaattcttcccactcttctaagttttttcctctaagatc

SEQ ID NO: 23698 - DNA, 2108 bp, Homo sapiens
tggtaaaaacattcagacattcggatgaactctgacagtcatggaccaaatcacacatgctgcattacacatggtgaaatgatctgcaaacagatatcaagcatactaattaagtgctttgtaaaaataaatttctcaaaattttcatcaaggattttgaaaaagtcaggaatgattaagttggaaaatgcagtttcttttctctttcctttttttttttaaaaaaamcatgattttaaattatgatcaaatcttataaaactatgagaagagttgctggcccatctctagattaagaacaaactgaaataaattagatttcatgtccaaaaaaaagtaatccagctcaacaacctgtgtgccaagtttctctcatataatttgaaacagtcaagcaataaactctgaaaaaggaatttctaatggaagccttgaaaacacttgactccagctttgctactgggtgccataataaatccagaaacctaaaacctcagatacactggagaagtaaaaactttcagcggagctatgtaatgtatagtctaatatgaaagcttaagaagcaaaaactttgctccagtgaaagtttcatatactttattccccaggcattcaattcccctcccccaccctttgccaacatttcattccttgctaccatattatgaaagctaaaaaaaagcttcctgaatttttgagataaaaatgtcatagtatttaacgtcatttagaagagaaggctttaaaacacaaaagctaggctatgagattcggggaagtagttaggtcaaatatttacgacacagaatggagagactgttttgagtaatagttacaggctgaccaaatttggggcataaggttgaaaacaaccttagggttaaaaaaagcactctagattttcttttcaaacagtggcagacattctgtagctgtattgttgaaggaaatgtaggtcattcatagtttttattagggatacacagataacaatcagcagcaaggctatcccctatgactagggctacagaaggctgctagtaaactgaatagaataagcttcactaaaatagctgaggaaagtctatttgaaagataatgattttgctcaaaattgctacttgacttcataggtgaaaacagtgctctctgatttaagattgctcaaaggaaaaaaactgtctgtgtatatttatttgcctctgaatcattactttcctgtggtgttgggtcaaactataaatcagaactcagtattttcttactcttaccacccacaggaatggaggggacagttttgtcagctctctacatgcataaaatcacactcagtggaagggtactcccaaaggctggttgggaacaggaagaactcaaatcctggctcatcttcttatagggaccatttttacggtcaagtttaatggattccaacttgagatttacagtaaaagaaatgggaatctgatttttttttccttttttttttagatggagtctcactctgtcaccgacgatggagtgcagtgtcgtgatctcggctcactgcaccctctgcctcctggttcaagtgattctcctgcctcagcctccggagtagctgggactacaggcatgtgccaccacacctggcaggaatctgaaccttacagtcaatatttcagaaagcccaataagaaacatacatttactggcaatgaagttgcaaaactgaactaatggttttgtgttgttttcatttcttgatagaattgtgccaatccagtgtcataacgcaggttatttaacaattagcagaaggagggattggcatgatacaggtctctttgaggaatacaaacagctaatttagtaggccaaatctttctgaacacaaggtccctagagagaaaaacagctgttgtttaaaggcagggaatcatttacccatttcaatctaatcattttacagttcaggtggttaactgaggctcacagaagtaaagaatttggccagagaccttaagtaatggaaacaacactcaaatctcgctctaagagttaaattcttcccactcttcaaagttaaattcttcccactcttctaagttttttcctctaagatc

SEQ ID NO: 23699 - DNA, 2108 bp, Homo sapiens
tggtaaaaacattcagacattcggatgaactctgacagtcatggaccaaatcacacatgctgcattacacatggtgaaatgatctgcaaacagatatcaagcatactaattaagtgctttgtaaaaataaatttctcaaaattttcatcaaggattttgaaaaagtcaggaatgattaagttggaaaatgcagtttcttttctctttcctttttttttttaaaaaaaccatgattttaaattatgatcaaatcttataaaactatgagaagagttgctggcccatctctagattragaacaaactgaaataaattagatttcatgtccaaaaaaaagtaatccagctcaacaacctgtgtgccaagtttctctcatataatttgaaacagtcaagcaataaactctgaaaaaggaatttctaatggaagccttgaaaacacttgactccagctttgctactgggtgccataataaatccagaaacctaaaacctcagatacactggagaagtaaaaactttcagcggagctatgtaatgtatagtctaatatgaaagcttaagaagcaaaaactttgctccagtgaaagtttcatatactttattccccaggcattcaattcccctcccccaccctttgccaacatttcattccttgctaccatattatgaaagctaaaaaaaagcttcctgaatttttgagataaaaatgtcatagtatttaacgtcatttagaagagaaggctttaaaacacaaaagctaggctatgagattcggggaagtagttaggtcaaatatttacgacacagaatggagagactgttttgagtaatagttacaggctgaccaaatttggggcataaggttgaaaacaaccttagggttaaaaaaagcactctagattttcttttcaaacagtggcagacattctgtagctgtattgttgaaggaaatgtaggtcattcatagtttttattagggatacacagataacaatcagcagcaaggctatcccctatgactagggctacagaaggctgctagtaaactgaatagaataagcttcactaaaatagctgaggaaagtctatttgaaagataatgattttgctcaaaattgctacttgacttcataggtgaaaacagtgctctctgatttaagattgctcaaaggaaaaaaactgtctgtgtatatttatttgcctctgaatcattactttcctgtggtgttgggtcaaactataaatcagaactcagtattttcttactcttaccacccacaggaatggaggggacagttttgtcagctctctacatgcataaaatcacactcagtggaagggtactcccaaaggctggttgggaacaggaagaactcaaatcctggctcatcttcttatagggaccatttttacggtcaagtttaatggattccaacttgagatttacagtaaaagaaatgggaatctgatttttttttccttttttttttagatggagtctcactctgtcaccgacgatggagtgcagtgtcgtgatctcggctcactgcaccctctgcctcctggttcaagtgattctcctgcctcagcctccggagtagctgggactacaggcatgtgccaccacacctggcaggaatctgaaccttacagtcaatatttcagaaagcccaataagaaacatacatttactggcaatgaagttgcaaaactgaactaatggttttgtgttgttttcatttcttgatagaattgtgccaatccagtgtcataacgcaggttatttaacaattagcagaaggagggattggcatgatacaggtctctttgaggaatacaaacagctaatttagtaggccaaatctttctgaacacaaggtccctagagagaaaaacagctgttgtttaaaggcagggaatcatttacccatttcaatctaatcattttacagttcaggtggttaactgaggctcacagaagtaaagaatttggccagagaccttaagtaatggaaacaacactcaaatctcgctctaagagttaaattcttcccactcttcaaagttaaattcttcccactcttctaagttttttcctctaagatc

SEQ ID NO: 23700 - DNA, 990 bp, Homo sapiens
accttcctgggctactcacctgcctgaagcatgcaattccaggtactgcttccaaccagggctcagcacattgtgcttgaggttggggtctatgatgaggtcccagctgtcagccggctttgcctcctccatcttctcatagaagactttcttccactcatctgtggtcacgcttttacacatggtctcgtcagtagtgagggaaggcaatttccaccttagtgagaacacggagagtgagggtaggtgcagggcagggcagcgcagtctccacggtctaaaaatcctcatcgacaagaccaggaggaagcaggacccagctccctcctttgtccgcagtggaacctgtttccacggcaaccaggcaggttgccagaagacagagcttggggaggagggagtctctgaagaggtgtttcaaggccctgaactgagattgcagaggcagagtttgtgggtctaaatgatccaagacagagtgggggacctgaccagagaytgagcttcagaccatctcaccctggcctggaaagagtatggggaggtgaggactgggaactggctcagtttcaccttgccgtcccctggaggcatcatcagcatctggctgctacggtaaccatgatgccttaggcagccaaggagaaatgagggatggggagatgtaaatttgttagtagatggagcaataataataaactctctctcggcttccccagccatcttgtgaccagcactttgccattttcaaaacacaattggaggtctcttaagttatgattactattgctgcagtacagatcaggagcctaggactcacctagcctataaatggcggagcctgtatacaaattcaagctgttgaccccagaccggttcattaattcattcatttcaaacatatccgagcatgtgggtagggtttgcagacatgtgccaagctctatgtcagtgcttgtagctgactgtgtactgaataactgtgcaata

SEQ ID NO: 23701 - DNA, 2070 bp, Homo sapiens
caggtgatatgtgggcacactccagtttgagaagcatgggctgctctggaaccstgtggcactgttaaccctcctgcagccatggccctccacccacgatctttttcagtaacagccgctacactggaaatgcattccaagagagacctgtgactccctggcaagaaaaaaaggatggctgggtgcggtggctcatgcctgtaatcccggcactttgggaggctgaggtgggtggatcacctgaggtcaggagttcaagaccagcctggccaacatggtgaaaccctgtctactaaaaatacaaaaattagccaggcatggtggtgggtgcctgtaacccaagctactagggaagctgaggcaagagaatcacttgaatccgggagacagaggttgcagtgagccgagataacactactgcattctagcctgggggacagggtgagactctgtctccaaaaaaaaaaaacaaacaaacacacacacacacacacacacacacaagacaaaagggggccttaaaaggaaaaacagaaagatagatgggtaagccactgccaccacctttgcacccctgtgctcacggcacacacacacacagagccaggtgtgtgtgaacatgaggttggaaaacactcaaaaggcagcaggcagcctttccagaggccctgagaggcctgtcccccactgtggagtacctactgtcctcaggtagagacagagactgtgtgctgcaacagggggagtgtcccaaggcgacctatttacccaattcctggaagagattttatttcttgttaaaatatcctggctaggcatagtggctcatgcctgtaatcccagcactttgggatgccgaggtatgaggtttgcttgaatccaggagtttaagacctgcctaggcaacctggtaagatcccatctctattaaaaaaaaaaaaaaaaaactttaaaaatagcccagcgtgatggcatgaaactgtagtcccagctacttgggagactgacatgggaggatcccttgagctcaggagctggaggctgcagtgagctatgattgcaccactgcgctccagcctgggcaacagagcgagaccctgtctttaatatatatatactgaagaaccaccagacgctagttgagaggggcacagaggtggagaaccatgagcctgactgggcccgggggctttggcttgcatggtctccaccagccttctgagctgtcaccgaagcaggtaactgcagcccctccatgtgctgcatgtgccttgtcatgtgccagtgctgcatgtgccttgtcaccctgcatctgcacagcaaccctttggggtgggcaccatggctcatcccatttgataggcgtggaaactggggctcagagaggttgagcagcttatcaagggagaggcagagccaggcgtcattgtgaagaatgtgacccccaaggccgagtgtcttcctggacaccaggctgtcttccagaagcatcacctttgattctcactgtcatgccaaagaggctgctgagtgatctcatcagattcgagcagctctgctcagagatgtccagctgtccacggcctgccctgggtcaggagcaataagcatacttgatcaaacaagaagtcctgcttcctgccccagcagcaaggggcctgcccagggcccatgcagctactcggatgcagtggctctccaattccaaccaggtgggctccaggactaagtgaaatgaacccatcgcaaaagggcaaatattgtacaattccacttataggaggtgctggcatggtcaaattcatagagacagaaagcagaacagtggttaccaagggctgaaggaagagaggaatgagagcaatgggtgcagagtttctgtttgggatgatgaacattctggaggtagatggtagtagtgtttgcacagcaatgtgagtgtacttaatgcccctgaactacacttaaatatggtcaaaatggtcagttttatgttatgtgtgaatatattttgagactgagttttgctctgtcacctaggctggctcactgcagcctcaaactcctggg

SEQ ID NO: 23702 - DNA, 2070 bp, Homo sapiens
caggtgatatgtgggcacactccagtttgagaagcatgggctgctctggaaccctgtggcactgttaaccctcctgcagccatggccctccacccacgatctttttcagtaacagccgctacactggaaatgcattccaagagagacctgtgactccctggcaagaaaaaaaggatggctgggtgcggtggctcatgcctgtaatcccggcactttgggaggctgaggtgggtggatcacctgaggtcaggagttcaagaccagcctggccaacatggtgaaaccctgtctactaaaaatacaaaaattagccaggcatggtggtgggtgcctgtaacccaagctactagggaagctgaggcaagagaatcacttgaatccgggagacagaggttgcagtgagccragataacactactgcattctagcctgggggacagggtgagactctgtctccaaaaaaaaaaaacaaacaaacacacacacacacacacacacacacaagacaaaagggggccttaaaaggaaaaacagaaagatagatgggtaagccactgccaccacctttgcacccctgtgctcacggcacacacacacacagagccaggtgtgtgtgaacatgaggttggaaaacactcaaaaggcagcaggcagcctttccagaggccctgagaggcctgtcccccactgtggagtacctactgtcctcaggtagagacagagactgtgtgctgcaacagggggagtgtcccaaggcgacctatttacccaattcctggaagagattttatttcttgttaaaatatcctggctaggcatagtggctcatgcctgtaatcccagcactttgggatgccgaggtatgaggtttgcttgaatccaggagtttaagacctgcctaggcaacctggtaagatcccatctctattaaaaaaaaaaaaaaaaaactttaaaaatagcccagcgtgatggcatgaaactgtagtcccagctacttgggagactgacatgggaggatcccttgagctcaggagctggaggctgcagtgagctatgattgcaccactgcgctccagcctgggcaacagagcgagaccctgtctttaatatatatatactgaagaaccaccagacgctagttgagaggggcacagaggtggagaaccatgagcctgactgggcccgggggctttggcttgcatggtctccaccagccttctgagctgtcaccgaagcaggtaactgcagcccctccatgtgctgcatgtgccttgtcatgtgccagtgctgcatgtgccttgtcaccctgcatctgcacagcaaccctttggggtgggcaccatggctcatcccatttgataggcgtggaaactggggctcagagaggttgagcagcttatcaagggagaggcagagccaggcgtcattgtgaagaatgtgacccccaaggccgagtgtcttcctggacaccaggctgtcttccagaagcatcacctttgattctcactgtcatgccaaagaggctgctgagtgatctcatcagattcgagcagctctgctcagagatgtccagctgtccacggcctgccctgggtcaggagcaataagcatacttgatcaaacaagaagtcctgcttcctgccccagcagcaaggggcctgcccagggcccatgcagctactcggatgcagtggctctccaattccaaccaggtgggctccaggactaagtgaaatgaacccatcgcaaaagggcaaatattgtacaattccacttataggaggtgctggcatggtcaaattcatagagacagaaagcagaacagtggttaccaagggctgaaggaagagaggaatgagagcaatgggtgcagagtttctgtttgggatgatgaacattctggaggtagatggtagtagtgtttgcacagcaatgtgagtgtacttaatgcccctgaactacacttaaatatggtcaaaatggtcagttttatgttatgtgtgaatatattttgagactgagttttgctctgtcacctaggctggctcactgcagcctcaaactcctggg

SEQ ID NO: 23703 - DNA, 2070 bp, Homo sapiens
caggtgatatgtgggcacactccagtttgagaagcatgggctgctctggaaccctgtggcactgttaaccctcctgcagccatggccctccacccacgatctttttcagtaacagccgctacactggaaatgcattccaagagagacctgtgactccctggcaagaaaaaaaggatggctgggtgcggtggctcatgcctgtaatcccggcactttgggaggctgaggtgggtggatcacctgaggtcaggagttcaagaccagcctggccaacatggtgaaaccctgtctactaaaaatacaaaaattagccaggcatggtggtgggtgcctgtaacccaagctactagggaagctgaggcaagagaatcacttgaatccgggagacagaggttgcagtgagccgagataacactactgcaytctagcctgggggacagggtgagactctgtctccaaaaaaaaaaaacaaacaaacacacacacacacacacacacacacaagacaaaagggggccttaaaaggaaaaacagaaagatagatgggtaagccactgccaccacctttgcacccctgtgctcacggcacacacacacacagagccaggtgtgtgtgaacatgaggttggaaaacactcaaaaggcagcaggcagcctttccagaggccctgagaggcctgtcccccactgtggagtacctactgtcctcaggtagagacagagactgtgtgctgcaacagggggagtgtcccaaggcgacctatttacccaattcctggaagagattttatttcttgttaaaatatcctggctaggcatagtggctcatgcctgtaatcccagcactttgggatgccgaggtatgaggtttgcttgaatccaggagtttaagacctgcctaggcaacctggtaagatcccatctctattaaaaaaaaaaaaaaaaaactttaaaaatagcccagcgtgatggcatgaaactgtagtcccagctacttgggagactgacatgggaggatcccttgagctcaggagctggaggctgcagtgagctatgattgcaccactgcgctccagcctgggcaacagagcgagaccctgtctttaatatatatatactgaagaaccaccagacgctagttgagaggggcacagaggtggagaaccatgagcctgactgggcccgggggctttggcttgcatggtctccaccagccttctgagctgtcaccgaagcaggtaactgcagcccctccatgtgctgcatgtgccttgtcatgtgccagtgctgcatgtgccttgtcaccctgcatctgcacagcaaccctttggggtgggcaccatggctcatcccatttgataggcgtggaaactggggctcagagaggttgagcagcttatcaagggagaggcagagccaggcgtcattgtgaagaatgtgacccccaaggccgagtgtcttcctggacaccaggctgtcttccagaagcatcacctttgattctcactgtcatgccaaagaggctgctgagtgatctcatcagattcgagcagctctgctcagagatgtccagctgtccacggcctgccctgggtcaggagcaataagcatacttgatcaaacaagaagtcctgcttcctgccccagcagcaaggggcctgcccagggcccatgcagctactcggatgcagtggctctccaattccaaccaggtgggctccaggactaagtgaaatgaacccatcgcaaaagggcaaatattgtacaattccacttataggaggtgctggcatggtcaaattcatagagacagaaagcagaacagtggttaccaagggctgaaggaagagaggaatgagagcaatgggtgcagagtttctgtttgggatgatgaacattctggaggtagatggtagtagtgtttgcacagcaatgtgagtgtacttaatgcccctgaactacacttaaatatggtcaaaatggtcagttttatgttatgtgtgaatatattttgagactgagttttgctctgtcacctaggctggctcactgcagcctcaaactcctggg

SEQ ID NO: 23704 - DNA, 594 bp, Homo sapiens
tttttccaggtaaatttatacaactatgagttagtttgatgtcctgtagatatggcaacagtctgcctggtttactggttaagcagctgccatatagatgtctaaaacttgggggtaatttttttttttaactctttaaagctctctccagttttcttaaaggatataacttttacatttaaaaaataccttttacatatttttgctttaaaattaagaaattcaaatgatgttgaaaagtataaaaaaggggactgggcayggcgcctcacgcctttaagtccagcacttcgggaggctgaggtgggcagatcacaaggtcaggagttcaagaccagcctggccaatatagtgaaaccccatctctactaaaaaaataaaaaaattagccagtgtggtggggagcacctgtagtcccagccacctgggaggctgaggcaggagaatcacttgaacccgggaggtggaggttgcagtgagccaagatggcgccactgtactccagcctgggcgacagagtgagacttagtctcaaaaaaaaaaaaaaaggtgggagggcccattcaggataaaaggtaaagttaactttttttt

SEQ ID NO: 23705 - DNA, 565 bp, Homo sapiens
attagagtcactctgcatagtttgaggagctctgtgatacctgtgctgtccctggggattcaatttgcagatacgtttctgtgtccttcgagggaggaagattcaatctgaagttaaagaattctaagctttaaggcccctcactttcatgggcctgttccaaggccctaaaaagagtcaaagtaatatctgtacatagccaagtattttgttaaattaataaaaactgctgtgtttacctattctatctactcttccgttacattttccttgtgtctggtggcattggagtagctgttggcacttattagagagagccaaaggtggtttatattggagatacattgtgtgtgtgtgtgtgwgtgggtgttatttactatggaatatgtagtgggatatattacatatatgttatttatatatatgtgtgtatatatagtgtgatatattatatataaaatatattataacttatatattacatatataatatataacatatattacatatataatatataacatatattacatatataatatataacatatattacatatatat

SEQ ID NO: 23706 - DNA, 565 bp, Homo sapiens
attagagtcactctgcatagtttgaggagctctgtgatacctgtgctgtccctggggattcaatttgcagatacgtttctgtgtccttcgagggaggaagattcaatctgaagttaaagaattctaagctttaaggcccctcactttcatgggcctgttccaaggccctaaaaagagtcaaagtaatatctgtacatagccaagtattttgttaaattaataaaaactgctgtgtttacctattctatctactcttccgttacattttccttgtgtctggtggcattggagtagctgttggcacttattagagagagccaaaggtggtttatattggagatacattgtgtgtgtgtgtgtgagtgkgtgttatttactatggaatatgtagtgggatatattacatatatgttatttatatatatgtgtgtatatatagtgtgatatattatatataaaatatattataacttatatattacatatataatatataacatatattacatatataatatataacatatattacatatataatatataacatatattacatatatat

SEQ ID NO: 23707 - DNA, 585 bp, Homo sapiens
tcaattcagtgaactgcttagattaaaatagctaacatttatgcagtccttcctctgtgacaagcattattccaagcattctgtgcatctcattaatcctgacagcatctttatgagatatatactgttatgatccccacttcacagatgataaatccagaaacagagaggttgrgtaactttctcagaatcatacagttgataggtgacaggatgaagaccaaaacccacagcctgactctaagcccatgcttagctactgtgccatgccaccttctaatcttgggtgcatgtcccatgccactcattgtaagccatgcagtgggaggaacagcagaatggaaggacatggctcctactttccagggctttgtgagctatgaggaaagagacacatgtataaaaatcaccacagaacaaggaaaaatgtgacagatagaataggagggacatagacaactgctttaggagcttagattaattctggtgtggcattaggaatggcttcttagaggaggtggcatttgacaagcctatagacacagagaagacatgggtggatggcatttcatgctgaggagaacc

SEQ ID NO: 23708 - DNA, 585 bp, Homo sapiens
tcaattcagtgaactgcttagattaaaatagctaacatttatgcagtccttcctctgtgacaagcattattccaagcattctgtgcatctcattaatcctgacagcatctttatgagatatatactgttatgatccccacttcacagatgataaatccagaaacagagaggttgagtaactttctcagaatcatacagttgataggtgacaggatgaagaccaaaacccacagcctgactctaagcccatgcttagctactgtgccatgccaccttctaatcttgggtgcatgtcccatgccactcattgtaagccatgcagtgggaggaacagcagaatggaaggacatggctcctactttccagggctttgtgagctatgaggaaagagacacatgtataaaaatcaccacagaacaaggaaaaatgtgacagatagaataggagggacatagacaactgctttaggagcttagattaattctggtgtggcattaggaatggcttcwtagaggaggtggcatttgacaagcctatagacacagagaagacatgggtggatggcatttcatgctgaggagaacc

SEQ ID NO: 23709 - DNA, 582 bp, Homo sapiens
atcgcttgagcttgggaggcagaggttgcagtgagctgagattgtgccactgcactccagcttgggcgacagcatgagactctgcctcaaaaaataaaattaaataaataaataaataaataaataaataaataaataaattaattaattaatttgtagttgaccttggttttattttcccrctcacaaggaagcaggaagatcccaaggaaaaagaagcagcatgaaaaatgacaagaagactacaacagaagtttctacgaactttgcacacacagaagagggttcttttagttttagtcaggataggaaaaggacaaaataaaagtgaacatttattgagccaggccctgtcttctacttgtgttaattcgtttgctcagatcctcgcaggagctctgtgaggtaggcactgatgtgattcccagtttttagatgaggactgtgagggacagagaagttccctaactttcccaaggtcacacagccagtaagcaggagacagggatctgaaccaacactggtagccatggcgccacagcttagagcagtcagtgtaatgtgactggtggccaagacaag

SEQ ID NO: 23710 - DNA, 582 bp, Homo sapiens
atcgcttgagcttgggaggcagaggttgcagtgagctgagattgtgccactgcactccagcttgggcgacagcatgagactctgcctcaaaaaataaaattaaataaataaataaataaataaataaataaataaataaattaattaattaatttgtagttgaccttggttttattttcccactcacaaggaagcaggaagatcccaaggaaaaagaagcagcatgaaaaatgacaagaagactacaacagaagtttctasgaactttgcacacacagaagagggttcttttagttttagtcaggataggaaaaggacaaaataaaagtgaacatttattgagccaggccctgtcttctacttgtgttaattcgtttgctcagatcctcgcaggagctctgtgaggtaggcactgatgtgattcccagtttttagatgaggactgtgagggacagagaagttccctaactttcccaaggtcacacagccagtaagcaggagacagggatctgaaccaacactggtagccatggcgccacagcttagagcagtcagtgtaatgtgactggtggccaagacaag

SEQ ID NO: 23711 - DNA, 582 bp, Homo sapiens
atcgcttgagcttgggaggcagaggttgcagtgagctgagattgtgccactgcactccagcttgggcgacagcatgagactctgcctcaaaaaataaaattaaataaataaataaataaataaataaataaataaataaattaattaattaatttgtagttgaccttggttttattttcccactcacaaggaagcaggaagatcccaaggaaaaagaagcagcatgaaaaatgacaagaagactacaacagaagtttctacgaactttgcacacacagaagagggttcttttagttttagtcaggataggaaaagracaaaataaaagtgaacatttattgagccaggccctgtcttctacttgtgttaattcgtttgctcagatcctcgcaggagctctgtgaggtaggcactgatgtgattcccagtttttagatgaggactgtgagggacagagaagttccctaactttcccaaggtcacacagccagtaagcaggagacagggatctgaaccaacactggtagccatggcgccacagcttagagcagtcagtgtaatgtgactggtggccaagacaag

SEQ ID NO: 23712 - DNA, 1096 bp, Homo sapiens
ttgagggtggggctaaaataacccttcaacactgagcttctgtccagattgcacccttattttacagaagaggaaactgaggcaggaagggccatagtgcaagttgttgaaggacaaggggatgcaaaggaaaggcagaggctttggacagagaagacatattgaaactatgccaagtcctacccatatggccgtggcgattgtggcctctctgagccccagcttccttgcctataaagtggggacagcaacaccacacagcccatggaaggcacttgctaagcaattgctgttcatcatagtcatcacaccaagatcaaaactgagtggatctgattcctgctgttcatcatagtcatcacaccaagatcaaaactgagtggatctgattcctgctgttcatcatagtcatcacaccaagatcaaaactgagtggatctgattcctgctgttcatcatagtcatcacaccaagatcaaaactgagtggatctgattcctgctgttcatcatagtcatcacaccaagatcaaaactgagtggatctgattcctgctgttcatcatagtcatcacaccaagatcaaaactgagtggatctgattcccagggaaaacccgaaccaaaagttgtgcagaaatcacttgacccagcctgcacatcctgaccatggggttgaggttattagggggctctgtgtggcagagtgagcagatgttaaacagcaggaaaaaggatctgagtgtctctcttgctctcctcatagtcccagtgcccggggcagggcctgtgatgcagctcattagttttattgggtaggtggatgaacagatggatggagagattgatggattgacagatggacagacagctaatggtcaagcagacagatggaaggatggacgaacggatggatagacggatggatggttggatggatggatgagcagaaatggaaggtttttcctgccatctaacattggcaactcctctgagaacagaggacagtggagtgagttgaccctggtaggaaggtaagggctggacctccccttcctcaggccaggcrtgagggtgagaagctccacaggaagccct

SEQ ID NO: 23713 - DNA, 800 bp, Homo sapiens
aaaagcagacatacatgtggcccacagcataagaagaaatgctcaacagcgttaatcattacagaaatgcaaatcaaaaccacaagatgctacctcacaccaatcagaatgcctattaaaaagacataaaataatagattttggcgagattgtggaagagaagaaagtttatacactgccagtaggagtgtaaattagttctgccaatgtggaaggcagtctggcgatttctcaaagagcttaaaacagaattaattaccatttgacccagccatcccattattgtgtatacaccccaaaaaatataaattgttctaccataaagacacacagacgtgtatgtgcatcatagcactattcacaggagcaaagaaatggaattaacctaaatgtccatcaatggtagaacagatatagaaaatgtggcatgcatatatatatatatatttatacacacacacacacacacacacacacacacacacacacacacaccatggactattaagcagccataaaaaagaatgagatcatgtgctttgcagaaacatgaatggagttggatgccattatcctaagcaaactaacacaggaagagaaaaccaaatagagccatgttctcacttacaagtgggtggtaaacactgagtacatatagacacaaagaaaggaacaacatctcccagacactaccacagccacgattgccaggcatggtgttggtgggttggtgtctgtgtcgttaaattgcacgacatggctgagcaasatcccttcggtgtccctgctggcacccctgg

SEQ ID NO: 23714 - DNA, 542 bp, Homo sapiens
ccaagaaaacattccagcagtgcttcctttcatcatcaaatcaatgtctctgtactctttctttagaataattgttttggtaactacggctctaattcctgccgttaagaaggtccgagaaaaaaaaaatcatgcacccagggcattttacattatctttgaagaaatgggtcatgaaaatacaaagacataaataataataccctaataaaataaaggtataaaatatgagatgccacagagaaaaacctagtaagttatataacaagtgttccaaataataaggactatttttttttttaaagaatacaggattaacaaagaagccagcatgggttctaactgttttgtgattaacttgttatgtgcttttgggcaaatcacttaacccttttgattcccagtttatctaaaaaatcaaacgtaagaagtaacgatccttcytattccaaaactcgtcagggtcaatataggagcaaacaatgctcattctttttacatcccaagcatcatatatctgctgcagaaaggaaaaagaggga

SEQ ID NO: 23715 - DNA, 542 bp, Homo sapiens
ccaagaaaacattccagcagtgcttcctttcatcatcaaatcaatgtctctgtactctttctttagaataattgttttggtaactacggctctaattcctgccgttaagaaggtccgagaaaaaaaaaatcatgcacccagggcattttacattatctttgaagaaatgggtcatgaaaatacaaagacataaataataataccctaataaaataaaggtataaaatatgagatgccacagagaaaaacctagtaagttatataacaagtgttccaaataataaggactatttttttttttaaagaatacaggattaacaaagaagccagcatgggttctaactgttttgtgattaacttgttatgtgcttttgggcaaatcacttaacccttttgattcccagtttatctaaaaaatcaaacgtaagaagtaacgatccttcctmttccaaaactcgtcagggtcaatataggagcaaacaatgctcattctttttacatcccaagcatcatatatctgctgcagaaaggaaaaagaggga

SEQ ID NO: 23716 - DNA, 602 bp, Homo sapiens
cttttttctgagtcagtgcaactggctttctggacccagagattatttggagttgaaatgtatttggattcagaatttcataccctaagctgatgctttcactgtaatcttgtcctgttttcaatctaaggaacacacacaggacagggtatttaatctctataataatagattctattcaaatgtagataataaaaagattataaaaagattctaatgttgcaatattggaatgccctttctgctgactcaagtcccgtttataaaaaatgggctagcaagacattayatagaggcttttgctgatgcttatataattcttccttctatagcacttgttgaaaggataatcacttggtcaaaagaaatccattttaaaagttctatttaacctctaagtgctttataaaacattaaattagacttttcctgtacaacgcttaaaaaaagtccatactctttgtaaagggcactaaatctaacaagcaacaaagtattccaatggcttttcactcttgttatacaacttcctcatctttcaaactcatattaaagggaaaatgtcatgtgctatcaggatataaagttcatttgaaaataca

SEQ ID NO: 23717 - DNA, 348 bp, Homo sapiens
tgggaaaatggcagattagttgtagtatggaactatgaacttaagcatttataaatgtagtttaaaataggtataacttttaaaytcaagaaacacacaattaaaacactactgttgtcaagttaaggtgccccaatgcataaaaattagtccaaagacagtataataaaattatctgaaatatgctcatttatcactttctaaataaatctgatttatccttaactgacatcttaattatccatatttacatctggaatataacaacttttctctcttttaacaatccaagacaaacaaatattatgattatacattagctatgcctcctcagtttctagagctgaa

SEQ ID NO: 23718 - DNA, 560 bp, Homo sapiens
gagtatttaggctcttttttggttccatatgaattttaaaatagtattttctaattctgtgaaggatgtctttggtagtttgatagaaatagcattgaatctgtagattgctttgggaaatatggccattttaacaatattgattatttctatccataagcatagaaktttttttttaatttgtgtcatctgtgatttctttgagcagtgttttgtaattctcattgtagagctcttcacctctctggttagctgtattcctaggtattttgttctttttgtggctattgtgaatgagattgtgttctcgatgtggctctcagcttggatgttgttggtgcatagaagtgcaactgatttttctacattgattttgtatcctaaaaccttgcggaagttgtttatcagatctaggagcttttgagcagagtctatcgggttttctaggtataatttttttttttttgcattcaaaatacagttgtgaacagatacggcttgattatttttactcctttttaaaacaggaaaaaaattcaagcagtacaaaagagaataaa

SEQ ID NO: 23719 - DNA, 785 bp, Homo sapiens
ctggtcacagccctgttcccattcacactggaacctcaccaccatccctgagtgtctgctctgagtatggcactgtccagatgctgtggacatagaagggaagaagacatggaggggacagttaatagacatgaaaacaaatagcacctatgtgaagtcagcatgtttgcctacaaggaaaacaaaatggtgatgtggatggggtggggggctgcacctgatgatgagtcccgtgtgtcctgtgacatcctggccaccacatctgtcggagggtaactgcaagaccagagaccctccatggatattcctgaaggttcatccccggccttcacrgtctgtctgcagggcgccttctgatgccacctccagccgccatccaccagacgccagcttccccgctgccctgaacttcctccagcgcaccaggccttcctctgtcctgtctgaggatttgctcatgcaacgtgctgtggccaaacaccctgccctcctcccttggcagatgtcttcctctcctttaaggcctggctcaggtgtcgtcttggtggcttcgggtgtcagctgctctgttttgctcatgcacctgcttgtgcttctgttgttgcctcctctccctggctgggctcgagctgcttcagggcaggaaccacgtctttatagtttgatgttcccagagctgacccagtgtttggcataggggtgtgctcaataaaatcgagttgacatgaatgagcagatgctgcctcgttgcagtctggtagtgtaattccaggctgcgcatgtga

SEQ ID NO: 23720 - DNA, 614 bp, Homo sapiens
ggtcatggggccgtgacgctgtggccttggtctacaggtgtctgacttccggcagcagctgctggcctgtgccggggtggaagctgagcgcgtggtggagttttcctgtggtgagaagctgtgcccagggtggggcaggctagaggtcaggttctggcccccgttttctgtgggtaatacctcatactgcgaccaggcacaggggcggaggagaccccggggtgggagcctcacccttcgtgcgctcgcccaggctctcctgctttgctccctgctgcctgctgcccagtgtgactggtgatggtgggcgggtgagcgctgtcagtcgctgttcctgtgctggatgatggggcagggaaatgccctctctgcagtgtcttgcagcacacctgcatctccagttttcggcccctccctggctcttaccaggtcacgtgatccctccagacaacatcctgcccctygtcatctgcagcgggatctccaaccagccgctggaattcacgttccagaaaagagagctgcctcagatggtcagtcccagccagctcgccgcaccacagcctggcctcaggcagcaaagggttttctggggcaggggcgctctggcccac

SEQ ID NO: 23721 - DNA, 1810 bp, Homo sapiens
ccacgaagcctcctggtctggctccaaagcctggcagggtcttttcccagggggagctgcaggcagggaacagtcctgatgggtcttccccttcactcccagcccagagcccccggccaggcacccccagggaaggctctggtggagaacctgtgcatgaaggccgtcaaccagtccataggtgagcctggctgcctccagctgggtggacagatgggggctggagaaagggagaacaggaaagaggggttgcctgccctgtttcctatataagtctgaggaaggggagggggtcgccgtgggaatgtgctgtaggggggaggcaggtgttgctcggagccccagcctctgttcctatgcaggcagggccatcaggcaccagaaggattttgccagcgtagtgctcctggaccagcgatatgcccggccccctgtcctggccaagctgccggcctggatccgagcccgtgtggaggtcaaagctacctttggccccgccattgctgctgtgcagaaggtcagtcctacctttttctttctgagagcctccccaccccgagatcacatttctcactgccttctgtctgcccagtttcaccgggagaagtcggcctcttcctgatgggcaaccacaccactgcctggcgccgtgcccttcctttgtcctgcccgctggagacagtgtttgtcgtgggcgtggtctgcggggatcctgttacaaaggtgaaacccaggaggagagtgtggagtccagagtgctgccaggacccaggcacaggcgttagctcccgtaggagaaaatgggggaatcctgaatgaacagtgggtcctggctgtccttggggcgttccagggcagctcccctcctggaatagaatctttctttccatcctgcatggctgagagccaggcttccttcctggtctccgcaggaggctgtggcagctgtggcatccactgtggcatctccgtcctgcccaccttcttaagaggcgagatggagcaggcccatctgcctctgccctttctagccaaggttatagctgccctggactgctcactctctggtctcaatttaaaatgatccatggccacagggctcctgcccaggggcttgtcaccttcccctcctccttcctgagtcactccttcagtagaaggccctgctccctatcctgtcccacagccctgcctggatttgtatccttggcttcgtgccagttcctccaagtctatggcacctccctccctctcaaccacttgagcaaactccaagacaccttctaccccaacaccagcaattatgccaagggccgttaggctctcaacatgactatagagaccccgtgtcatcacggagacctttgttcctgtgggaaaatatccctcccacctgcaacagctgcccctgctgactgcgcctgtcttctccctctgaccccagagaaaggggctgtggtcagctgggatcttctgccaccatcagggacaaacgggggcaggaggaaagtcactgatgcccagatgtttgcatcctgcacagctayaggtccttaaataaaagtgtgctgttggtttctgctgagttttttattgatatgtgctgctgttttctctggaagcctctttagggaatcgaggagcgcactggtgcaggggctgggtggagccatcctccgatggagcacaggcagacggaagcccccaccccagctgcgtggcctcaagccagcctcccgctccccgaaggtggtctccacacagacctgggacagtttcatccccgccccttccagggcagcagggctga

SEQ ID NO: 23722 - DNA, 1810 bp, Homo sapiens
ccacgaagcctcctggtctggctccaaagcctggcagggtcttttcccagggggagctgcaggcagggaacagtcctgatgggtcttccccttcactcccagcccagagcccccggccaggcacccccagggaaggctctggtggagaacctgtgcatgaaggccgtcaaccagtccataggtgagcctggctgcctccagctgggtggacagatgggggctggagaaagggagaacaggaaagaggggttgcctgccctgtttcctatataagtctgaggaaggggagggggtcgccgtgggaatgtgctgtaggggggaggcaggtgttgctcggagccccagcctctgttcctatgcaggcagggccatcaggcaccagaaggattttgccagcgtagtgctcctggaccagcgatatgcccggccccctgtcctggccaagctgccggcctggatccgagcccgtgtggaggtcaaagctacctttggccccgccattgctgctgtgcagaaggtcagtcctacctttttctttctgagagcctccccaccccgagatcacatttctcactgccttctgtctgcccagtttcaccgggagaagtcggcctcttcctgatgggcaaccacaccactgcctggcgccgtgcccttcctttgtcctgcccgctggagacagtgtttgtcgtgggcgtggtctgcggggatcctgttacaaaggtgaaacccaggaggagagtgtggagtccagagtgctgccaggacccaggcacaggcgttagctcccgtaggagaaaatgggggaatcctgaatgaacagtgggtcctggctgtccttggggcgttccagggcagctcccctcctggaatagaatctttctttccatcctgcatggctgagagccaggcttccttcctggtctccgcaggaggctgtggcagctgtggcatccactgtggcatctccgtcctgcccaccttcttaagaggcgagatggagcaggcccatctgcctctgccctttctagccaaggttatagctgccctggactgctcactctctggtctcaatttaaaatgatccatggccacagggctcctgcccaggggcttgtcaccttcccctcctccttcctgagtcactccttcagtagaaggccctgctccctatcctgycccacagccctgcctggatttgtatccttggcttcgtgccagttcctccaagtctatggcacctccctccctctcaaccacttgagcaaactccaagacaccttctaccccaacaccagcaattatgccaagggccgttaggctctcaacatgactatagagaccccgtgtcatcacggagacctttgttcctgtgggaaaatatccctcccacctgcaacagctgcccctgctgactgcgcctgtcttctccctctgaccccagagaaaggggctgtggtcagctgggatcttctgccaccatcagggacaaacgggggcaggaggaaagtcactgatgcccagatgtttgcatcctgcacagctataggtccttaaataaaagtgtgctgttggtttctgctgagttttttattgatatgtgctgctgttttctctggaagcctctttagggaatcgaggagcgcactggtgcaggggctgggtggagccatcctccgatggagcacaggcagacggaagcccccaccccagctgcgtggcctcaagccagcctcccgctccccgaaggtggtctccacacagacctgggacagtttcatccccgccccttccagggcagcagggctga

SEQ ID NO: 23723 - DNA, 1810 bp, Homo sapiens
ccacgaagcctcctggtctggctccaaagcctggcagggtcttttcccagggggagctgcaggcagggaacagtcctgatgggtcttccccttcactcccagcccagagcccccggccaggcacccccagggaaggctctggtggagaacctgtgcatgaaggccgtcaaccagtccataggtgagcctggctgcctccagctgggtggacagatgggggctggagaaagggagaacaggaaagaggggttgcctgccctgtttcctatataagtctgaggaaggggagggggtcgccgtgggaatgtgctgtaggggggaggcaggtgttgctcggagccccagcctctgttcctatgcaggcagggccatcaggcaccagaaggattttgccagcgtagtgctcctggaccagcgatatgcccggccccctgtcctggccaagctgccggcctggatccgagcccgtgtggaggtcaaagctacctttggccccgccattgctgctgtgcagaaggtcagtcctacctttttctttctgagagcctccccaccccgagatcacatttctcactgccttctgtctgcccagtttcaccgggagaagtcggcctcttcctgatgggcaaccacaccactgcctggcgccgtgcccttcctttgtcctgcccgctggagacagtgtttgtcgtgggcgtggtctgcggggatcctgttacaaaggtgaaacccaggaggagagtgtggagtccagagtgctgccaggacccaggcacaggcgttagctcccgtaggagaaaatgggggaatcctgaatgaacagtgggtcctggctgtccttggggcgttccagggcagctcccctcctggaatagaatctttctttccatcctgcatggctgagagccaggcttccttcctggtctccgcaggaggctgtggcagctgtggcatccactgtggcatctccgtcctgcccaccttcttaagaggcgagatggagcaggcccatctgcctctgccctttctagccaaggttatagctgccctggactgctcactctctggtctcaatttaaaatgatccatggccacagggctcctgcccaggggcttgtcaccttcccctcctccttcctgagtcactccttcagtagaaggccctgctccctatcctgtcccacagccctgcctggatttgtatccttggcttcgtgccagttcctccaagtctatggcacctccctccctctcaaccacttgagcaaactccaagacaccttctaccccaacaccagcaattatgccaagggccrttaggctctcaacatgactatagagaccccgtgtcatcacggagacctttgttcctgtgggaaaatatccctcccacctgcaacagctgcccctgctgactgcgcctgtcttctccctctgaccccagagaaaggggctgtggtcagctgggatcttctgccaccatcagggacaaacgggggcaggaggaaagtcactgatgcccagatgtttgcatcctgcacagctataggtccttaaataaaagtgtgctgttggtttctgctgagttttttattgatatgtgctgctgttttctctggaagcctctttagggaatcgaggagcgcactggtgcaggggctgggtggagccatcctccgatggagcacaggcagacggaagcccccaccccagctgcgtggcctcaagccagcctcccgctccccgaaggtggtctccacacagacctgggacagtttcatccccgccccttccagggcagcagggctga

SEQ ID NO: 23724 - DNA, 830 bp, Homo sapiens
tgggaagaaggataaggattaagtagctgggtaccaggttctttggaaggggaaaaaagtaaaaggccagtgacaagctcaagctactgaaataactcacatttgagttgatagcagtgcggggagggagtgaagctgtcaaaggaagattgtaataaattaactggcaaagaagggtaagatggatatctaggagaggaagatggaagaggaagattttaggaagatgctgtttgctttttgccactatggctttgaggtaatgaggaaagatctaagtaatgaggcrttgaattcatttgaaaatagggctagactttgggaatgagaggccaagggttaagaggatgtggtagaggcaactcactaggcatgcacatactccagattttccagcctccctcacagttcagttggggccatgtgactagtgttagtcaatgaagtgggagaggaaggaaccagggaagagccatgtattcctccattgattcctcccatgccacagcagccttgggctagggccagaaagtgtggctgccaagacggggagggctgtccttccaggaccagactttgacggttgttgctcagctgggaaatgctggtagaagcgagatctgaagctgtaatgggtggcagtgctgacagctatttgtgttgggtctgggtggtatgtggtcttcagggtacagttgtccaccttctcctgacttgatttgctcaggggtctgcattcaatgggctggagcttgctggccaactcattctacctctaggactctcagtgtttctgggggcaggtttacatcttggctgtccagggaagg

SEQ ID NO: 23725 - DNA, 566 bp, Homo sapiens
tactagaaatggttctagaaatagatctttatagatgagaatctggaagtggtttgctgacctgtttcagtctgaatgaattcctgaccttgttgtcgggaggagacagaaacctgatcatctgtagtgtacggtggtatcatgattacttaaatcatcaaatgtggttatygggaatgatgtgttttttaaagtggtacatgagaggtaaaattgctattgtagttgactgttgcagttataattttgtcaacatggtctgtaagagtgcaatggagtcggcccggtgtggtggctcacgcctgtaatcccaatactttgggaggccaagatgggccgatcacgaggtcaggagatcgagaccatcttggctaacacagtgagaccccatctctactaaaaatacaaaaaattagccatgtgtggcggcacacgcctgtagtcccagctactcgggaggctgaggcaggagaatggcgtgaacccgggaggcagagcttgcagtgagccgagatcgcgccactgcactccagcctgggcgacagagcaagactccatctcaaaaa

SEQ ID NO: 23726 - DNA, 566 bp, Homo sapiens
tactagaaatggttctagaaatagatctttatagatgagaatctggaagtggtttgctgacctgtttcagtctgaatgaattcctgaccttgttgtcgggaggagacagaaacctgatcatctgtagtgtacggtggtatcatgattacttaaatcatcaaatgtggttattgggaatgatgtgttttttaaagtggtacatgagaggtaaaattgctattgtagttgactgttgcagttataattttgtcaacatggtctgtaagagtgcaatggagtcggcccggtgtggtggctcacgcctgtaatcccaatactttgggaggccaagatgggccgatcacgaggtcaggagatcgagaccatcttggctaacacagtgagaccccatctctactaaaaatacaaaaaattagccatgtgtggcggcacacgcctgtagtcccagctactygggaggctgaggcaggagaatggcgtgaacccgggaggcagagcttgcagtgagccgagatcgcgccactgcactccagcctgggcgacagagcaagactccatctcaaaaa

SEQ ID NO: 23727 - DNA, 566 bp, Homo sapiens
tactagaaatggttctagaaatagatctttatagatgagaatctggaagtggtttgctgacctgtttcagtctgaatgaattcctgaccttgttgtcgggaggagacagaaacctgatcatctgtagtgtacggtggtatcatgattacttaaatcatcaaatgtggttattgggaatgatgtgttttttaaagtggtacatgagaggtaaaattgctattgtagttgactgttgcagttataattttgtcaacatggtctgtaagagtgcaatggagtcggcccggtgtggtggctcacgcctgtaatcccaatactttgggaggccaagatgggccgatcacgaggtcaggagatcgagaccatcttggctaacacagtgagaccccatctctactaaaaatacaaaaaattagccatgtgtggcggcacacgcctgtagtcccagctactcgggaggctgaggcaggagaatggygtgaacccgggaggcagagcttgcagtgagccgagatcgcgccactgcactccagcctgggcgacagagcaagactccatctcaaaaa

SEQ ID NO: 23728 - DNA, 764 bp, Homo sapiens
ttaagatttatggtgatgggtatccttcctctataaagactgcaaaataaggaaatttaccaagggtataatcaggtgatgagatgtatttgccaaggattattacagcaaatgaataagtaagatagtaaggcttcttcatcataggaaccatctacagaagaagtaaaaataaaatttttgttacttagttggtttattccgttattgtgttgtctttcattaactgtgctgcataagaaatggaaacattttcagaggaaaggcatttaaatatacatctaacttgaaatcactttttgagctctaagtaagaatttttcaaccataaatggcaaaaactttttttgcaggggtaagttatgatattgctattgcacaattttagttaaaaatataatcttaccagtttgcatggtttaaaagtgatgtatgttgaaacttgctcttaaaaagtcttttaaaataaatattggaggtagtattagttcccattcttgctataasagccacaaacttagtggcttaaagtaagacaaatttattatcttatagagattagacgttgaaatgggttttacctggttaaagttaaggtgtcattagggctgtgttctagaggataatttgttctcttcccttttccagcttctaacagccacctgtatttcttttcccccggccccttttcccatcttcaaagcctgaagcatggcgtcttcaaatttctttctgactttgccgtctcccacttttactcttaa

SEQ ID NO: 23729 - DNA, 545 bp, Homo sapiens
gaccttaatcattagtaacaatatgtgctacacaaataacrctatacaagagtatctagacaacagcagtgcccttctgtaatagctccaactcccttctattgtattctttccttagcaatgggtttgctaaactgcaaaaccctccattaagcctttgaggggtagttttctgatttaggactggcttcctgagttctttctcttcagaatattcagagtcagaaattagacctgtatagtctggctatatagtcccaaattttctcttttcttccctgtcctgaaattaagcacataagcccatgatatgtcaaggttttattgcttgccaggaagacagatgggtgcaacaaaaataactaatggagggttataaaagttctaagaattagccatttaaatgtctcaaaactcaactggacattaagcagaatactgaatgggatgattctctttagcaaggacaagtcatgttaagtctttacgttgcataattcaataataaagaagtcaggattaaagtatttcaaagcaacttattt

SEQ ID NO: 23730 - DNA, 607 bp, Homo sapiens
tgcctggcctgttgttactttatagatgtggaaaataagacatcatggttaagtaacttgcccaaggtcacacaggtagagctatcaatagcagactggaaccaatagaggccctcacagaatgattcttgggagatttcagttttcatctgaactttctcagggggatgtaataatgtaaatggactcttggcccctccatcctggaagcttggccaagtggcctaaaccaggggtccccatttagtttctccagcccccttttttcttgctgagttgttttaaaagttraaaagtgcttagtgaccttggacaacattagcaccttctaagtcctggaatccaccaagaaggaggaagggagatggtgctgaattcccctaaggcagggctcaggaagcaagagaaccctgtggtctaacctttcccatctgctctcttgttcccaggctacgtgcaggcctgccgcgccctgatgattgctgcctcggtcctgggtctgccggccattttactgctgctgactgttcttccctgcatccggatgggccaggagcccggtgtggctaagtacaggcgggcccagctggctggtgttttgctcatt

SEQ ID NO: 23731 - DNA, 1096 bp, Homo sapiens
gtaggcacagccacagttggggaggggggtttaagaaaagaaatggggtctgtgcaaagttcctttccccgagggacccatgaaccttgcccctgaggctccccaccccacgcctccagcaaattttcactcctttgggacttttccctaggggttctggccaaccacatcacctctgtctgccacccatggcctatctggctagaggaacacctccacgttccatcttagctgtgctagctgtgcagctggttttggggtgggcggtactcctctccttccattcctgctgtcagcaacaggagtctggctgggcaggaggaattattgggggtcggggggagggaaagggttgacacttctgggaataaagatacggtaggtgggagggtgaggtcagcgctgggatagggtgtggttaatccacttgctcttcaggagtaccagggactgccactcctggtagtgccaggctggcataatgagatctgttaggtgtgaacgccaaacagaaaatgggggaactgaggtgccagcttctcttctcctcatccagcaaagaaaatgtcataaatttcgctcctcatggaaatgtaatcagtgggctcgctgctggctttgtcttaattaggcactattgatggaaacagggagggcgccttcccatccccccactcggcttcctccctgtatttcccaggtctccccaaagctcctcccggcaccaggtacagcggtcttccaggcgccttctagcagccccggcccgcagcgccccctggcaccctcggagatgtaccccggccctcatagccctcccctctcgcctcctctctcacgacgcagcctttgttcctatggagagcgaagcccctcccaggcccggtcaccttccccagggagtccccgcctctcatcccccccaaaaaccagcgatgccttcgaaagccaatcctcagattcccaaaactccagttcccgtcttccctccctttccccgccccgcgccgcccccccgcaatcctagaccccaatccgaactaagaagggggaaggagcaggagggcaagggtgctccaggcccggttttyccccc

SEQ ID NO: 23732 - DNA, 577 bp, Homo sapiens
atggcctgcttcagggaagaagtggaaaagaaagtgagagagagagagagagaccttcctgcttttgctgttttctgaaatgccatgtgccatttttcagaatagcatgtcctgaaactcatcaatctcttaacaataaaaagctccttctccagaagcccctagtaaactttttctgctgtcttactaaaccaaccaggcaaggcgggcggtctgacatcatgactagatgaaatcagaggttctccgcatggttcctaaaccagcaacatcaacatcacctgggaacttactaaaaaacattctcaacttcacctcacacctactagagggatggtccagaaaaaaaaataggagtgtgtgtgtgtgtgtgtgtgtgtgtgtgtgtgtgtaacaatcccttcagattattctaatgacataagagyttgagaaggactgggttgaataatcaggacctcccttacagctcagatcaattagcctctcttgaggcacatgggctgcatggaggaggggtggaaacatgaactaaattaacatgattttaagaaagaagaagggagctgccaggtaa

SEQ ID NO: 23733 - DNA, 547 bp, Homo sapiens
gagcagcctccaaactttgtgcctttgtgcaaattctaaagagccaccttaaagagaatattcttaatggatgtagcagtgcacgtgarcttcctgctcctgaggagctttgcagagcccccatggatagcattcctggtttactcccagctaccctgactcttgcctgctcacggatcccagcctccaggcatgtacaatgtctgcaggttagctgagggtcaggtcgggggtgtgggatggagcccctgggaacaccagtcagtgaagacaagtgtcttttgagaaatcccagagggtcatgggagcggaggcatccatgcacgtgtgtgtgtccccacaggtatgggctcggccatatgtgcttgtgtgagtttgtgcaggatgcagatttcctctgctgcttcaggacttggcaggaggtgcccagaatgcccaccacctccctcccgtgcactggcatgtaaattgggacacctatatggtgtgaactgtgctgccttacacatggtgtcctggtggggtgggcagactgacgcctccaccc

SEQ ID NO: 23734 - DNA, 547 bp, Homo sapiens
gagcagcctccaaactttgtgcctttgtgcaaattctaaagagccaccttaaagagaatattcttaatggatgtagcagtgcacgtgagcttcctgctcctgaggrgctttgcagagcccccatggatagcattcctggtttactcccagctaccctgactcttgcctgctcacggatcccagcctccaggcatgtacaatgtctgcaggttagctgagggtcaggtcgggggtgtgggatggagcccctgggaacaccagtcagtgaagacaagtgtcttttgagaaatcccagagggtcatgggagcggaggcatccatgcacgtgtgtgtgtccccacaggtatgggctcggccatatgtgcttgtgtgagtttgtgcaggatgcagatttcctctgctgcttcaggacttggcaggaggtgcccagaatgcccaccacctccctcccgtgcactggcatgtaaattgggacacctatatggtgtgaactgtgctgccttacacatggtgtcctggtggggtgggcagactgacgcctccaccc

SEQ ID NO: 23735 - DNA, 547 bp, Homo sapiens
gagcagcctccaaactttgtgcctttgtgcaaattctaaagagccaccttaaagagaatattcttaatggatgtagcagtgcacgtgagcttcctgctcctgaggagctttgcagagcccccatggatagcattcctggtttactcccagctaccctgactcttgcctgctcacggatcccagcctccaggcatgtacaatgtctgcaggttagctgagggtcaggtcgggggtgtgggatggagcccctgggaacaccagtcagtgaagacaagtgtcttttgagaaatcccagagggtcatgggagcggaggcatccatgcacgtgtgtgtgyccccacaggtatgggctcggccatatgtgcttgtgtgagtttgtgcaggatgcagatttcctctgctgcttcaggacttggcaggaggtgcccagaatgcccaccacctccctcccgtgcactggcatgtaaattgggacacctatatggtgtgaactgtgctgccttacacatggtgtcctggtggggtgggcagactgacgcctccaccc

SEQ ID NO: 23736 - DNA, 534 bp, Homo sapiens
tgctgagcccttgatcttggccttccagcctccagactgcaagagaataaattcctgttgtttcagctgtccagtgtatggtacttygttatggcagccattcactccctgaagccacccaccataccctcacctcacaaagcaaggcagccaaatcctatgctgactcctgacagtgcgcccgagtgccctgttctctgtaaaattcttcttccccttgttccctccccttatgagctcagacccgttctaggctagcacaaccaacagaaagaaaacgtgagccacaatgcaattttaatctttttagcagccacatgaacaccagagacaggtgcagttaatttaagtaatattttagttgacctaatatatccaaaatattattatttcaaaagtaatcaatatacaaattaacaagacattttacatccaatttttttttttggtactaggtcttccaattccagcatgcattttacacctctagcatatctcagcttgggcattgcatttccatggcaaatacttgac

SEQ ID NO: 23737 - DNA, 1040 bp, Homo sapiens
gagaagcaagcacaatgtctttgttcctggaaccagttccaaaaacaaaatgacattgtcctctccctcttctgcagcacaaaagcaaactgtcactgagcagatgcttcccatgggtctcccttcagtggccctggggcagagaatggctccacccaaatatgggcagctctgagtgcaatcctaggatggcgcaatagttccaactctaatgcgctagtggctcattaggactaaattagtccacagctactaatactcatttgtcatgaacagtaaatgcaagattcgatacactcgcagggcacacagacccagaaagatcttcccagagggaggtggggaggtgggaagatggctctgccctgccttgccattcagacacctctatttctactttgggccttcctcttcaccctggtttaacctcagaaaattcataaccatgtgaaaaagagtaaataaaataaaatgaagacagcccctgtattttattttattttattttatttatttattttttgagacagagtcttactctgtcacccaggctggagtgcagtggcacgatctcggctcactgcaagctccgcctcccgggttcacgccattctcctgcctcagcctccagagtagctgggactataggcgcccgccaccacgcctggctaatttttttgtatttttagtrgagacggggtttcaccgtgtcagccaggatggtctcgatttcctgacctcctgatccgcccgcctcggcctcccaaagtgttgggaatacaggcgtgagccaccgcgtccggccttttaacctcaatttttattctcaggtttctaaacttactctactgaacatctcttggagcaaatgacttgccctccaaaaatacaccaccagacactcctattggaatcatctcccttgaacacccctttcatcctgacgttggctccttgttctctccaatgttaattgtgaactctattccctccaacttctagcctctccttatctgctcacctgctctcactgctcccaa

SEQ ID NO: 23738 - DNA, 964 bp, Homo sapiens
atccctcctctgaatttttcttagcctcgtaaattaaaaaagtatgatttatatttgtatttctttgattgctagtgaagttaagcatcttttcatctgtgtgattgcttcttagcttctgttcttggaaattttctgtttaatccccatttattttctattgaagtgtttgttcatttttattgatttaaaatatatttgtacatattcagtgcattattgtgtttttgacatatgttggatgttttttcccagtttgtcatttgtattttgtttttatgtatggcatattttgctctagagtttaaaaataagttttgtaatcaaacctgtcaatattttcctttaagttttccgagtttagtgtaatagttagaacattcattggctctacttttgttagaattttttttttgtttcttgagataattgatcaattttcacattttcctgttttttacagatttgaatttttctctgaatgtggctgtagctgtatcccaaaagttttgataaggagagttatcgttgttgcttttctaaataatctgtaaattcagttttaacttttcttttatccaggagttagagatgtcatttaatatctccaggcaattacttttttaaaaagctatctttttgttgatagcttctattttaaattttattttggtcaaggatttctacttgtagaatttattatttactaacaacatgatgcaattgcaattattctggaaaactcatcattaaccttcctcatgagatcactcacggctgtcattatctctgtttacagatcaagtctttcccaacctcacctgaactactgtaatttgatatttactgamttctctttcttcagaacaactttgcctttatactttctttccatttctagaaacgtgtatgaaatcttttgataaatgtagagaatggtcttttgagcctttcagagtctttt

SEQ ID NO: 23739 - DNA, 333 bp, Homo sapiens
ttaattgattataaatgaataataatagtagagtagtttgcaagagaaaactgaagaatgttgagaaaaatatttatagtctcagatgtccctatttgaatatacagagtgacacatctaaacagatagggtctctcgggcatcttaagmcttggcgggatttgcctaatgactggaatgagactgaaaatatatcatccttcattcatgtattcatttatttagcaaacattaattgaataccatttaatgtgccaggcactaggctagtttcatggtatgataaagactgtactcactagaagacagagagactgatgtgtaaatgagtta

SEQ ID NO: 23740 - DNA, 333 bp, Homo sapiens
ttaattgattataaatgaataataatagtagagtagtttgcaagagaaaactgaagaatgttgagaaaaatatttatagtctcagatgtccctatttgaatatacagagtgacacatctaaacagatagggtctctcgggcatcttaagccttggcgggatttgcctaatgactggaatgagactgaaaatatatcatccttcattcatgtattcatttatttagcaaacattaattgaataccatttaatgtgccaggcactaggctagtttcatggtatgataaagactgtactcactagaagacagagagactgatgtrtaaatgagtta

SEQ ID NO: 23741 - DNA, 1294 bp, Homo sapiens
catgcaatttaaaatatttagaattttctcttcctttggcaccttacagttcttttgctccaagccaggctcaaaggctcaaagggctgtgtgagcgtgagcccttttgtatactgggtgaagggaggctggggagggaggccagaaagtagctttgacatcagtcctcaactacagcagatctttttcaggaaagtacgtatggaagttgagaacctgggaaaaaggaaccccttaaatccattcatgcctgtgtgccccttctaatggctttgtgaaccatcaggacataaagttctctcatttggagacctctgttacaaaagattgcctgctccctgggcacctccacaggtgctgtatagctaccaccaaagggtcacttgtgtgggtctctctgcgtagctggacccagttggaagtttgtaatgagaattataggaggcaactggaatgctctacagaggaggctccagacagttattgccttgaggaagtttatgaaaaaggctcccactaggcacccagcaatgcagcgggtgtgtttaggaaaggctggccggccaggaggtgagctgccaagaggcttcaccaggcctgcagaacttcagagaatcgctatagtccaggtcagactccctgcctgtcggtatgtggagcgcgggtctacagctcacagaactgagttctcaaatccaggtatcagtgtgctaatttgtaagaagaaattattggcatgggggctgaaccccaaaatctacaggcaaatctatgtggaatgtcaaatggtaagccaggactcaggacaagatgggacgattgagatgaattgggggtggggccgagatagtggactagaggcagctcatgtgtgctgctgttttggagaagaaacaaaaggactagcaaacactgagctgcaggccgatcatctgaaaaaccacgttgggacccatcagggcagtagaggaacacagagtgcagaaaggartgaagccaggcaccagctgtttgggctcagcatggagccaggagaacctctccagcacaggacagggtgagtgagtgagagcccccagggtgattcatgctctccacagggacctgtgcaagactgggaataggagaatcccactgggccccacacccacccatcgtgtttctagactgaggcagagagccactcagacgtattatagggccaactctcgagtccaaggggacctctataagccttgggccctggggcagaccagccagcgccgaagccccagcaaaggctgcagttgccatg

SEQ ID NO: 23742 - DNA, 534 bp, Homo sapiens
gccaggctaagttttgggaacacaggatgaaggctgcacggtccctgttctcagtgagcccacaggcgtgcagtgaagatagatatcaccaaccgagaagtgccatatagtttgcatgggaggggaacaagtattccatgtctggatatcccaggyattaggcctgcgtttaaggtggagagtgaatccagggcagggcttgctggggaacagacgcagaaggacgcagcctctgctccattcagctatgaaaggcatggccaggtatacgctgcacctgttgggtgtgtgggggtaggggacgcctgttcttttcaggtggtttgttaatgtaactggtcttctcacctgagggcctgtacactgggaactgaaaggcatggaaacaaaggtatagtagaaatggaaagtcttcttttgttcactcaagcacaaatcattttaaagtgctactcgaataaggatagctgtcatcagagtagaggtcactggtataaacaaacagtagctatatgatatttgggaactatttta

SEQ ID NO: 23743 - DNA, 520 bp, Homo sapiens
ttgtaagggaggtgcataattagtaagtagcaggtgtgactccaaggttgctttttttctctagcttacacatttttctttatatctgcaaggatttctttctgaagaaagggtcatctgtaragatgctaatatcagcctggtgtggtggctcacacctgtaatcccagtgctttgggaggccgaggcaggagactcacttgaggccaggcattcaagaccagtctgggcaacatggcaagaccccatctctacagaaaagtaaaaaattagctgggctttctggttcacatctgtagtcccagctacttgggaggccaaggcaggaggatcgctggagcccaggagtttgagatcaccctgggcaacacgataagaccctgtctctacaaaggaaaaaaaattactctatacatcacaattacaaccccaaaaggatcaataatgcttacacactcaaatgctccaaaaggaaacattgtgtttgttccttttgcaaaagcatctttttcattttaag

SEQ ID NO: 23744 - DNA, 1798 bp, Homo sapiens
tctgggaacatagcattgtgagatggggtagggacgcagggatggcccagygctgattttttaatttcctttctgagaaatggggagaagcctatggcggcacgtctgctttgacctcagcatctcatgcaggtcttctatatttcagtgccagtggagactcatccatctaaattcgctcaaattgatggaactgatttacactgggtctctttttgatacacaattttagcttcagtgtcaacttgaaaaactgtgctttggagacagatgtgagacatcacccttagtctcctgctgaacaaattgctcagagctgagtggggctaagtgcaggggtgagtgaagcttgcttgcttggggccatcttgaggagcccctgcgtgggacttgaactacagccttctcctcatgggactgtctgacctgccaggggcatgtacaagtcagctgtaacttgtatgataactatttgcctgcatgtctgactccccactggcggtgagctcctccggggttggacctcagccttctttgtgtcctgggaaccctgcacacgtccagcctgtagtcagctctacacatatgtgaagtcaaaccctgcctgtcggccctggaaactggaggccccgtggagaacctggggggaagccaggttgacagctgagcagctctcccaggagcagccttataaatctgttctcattagcaggagccccagggggaggggaggagaacaagtgtgtgtgtgtgtgtgtgtgtgtgtgtgtgtgtgtgtgtgtgtcgagagggctggggagggtgctgccattaacttgtcaggaacccccttcaatctatgacactttacttctgcgtctgggaaggctgtgtttgctggtggtagcttttcaggatcctggaaaaatcctgattctgaaccccaatgccgtgcaaagctgcacagcacccagtccagaaagtcatgcttctccatctcagtcacattttcaggtgcactaattggcttatgcttttttgcataaaggttggtgaaagagctgaaaagttcttttccgcttcggtggtgggttctctttgttctgagtgctctattcgggtcacatctggtagcctcagctgcaattgacttttggctcttggtctttaggccaaaggactttcctgccacacaaatgagaagtttttaaaaagagctttaccatcctacccataagttacaacaattgtcgctgacccagcattcagaactttgcaggagtgaggcctccaacagcgaggcttctccttggagccagctacatgtgtggatgcctccctttctatctgtgcagccagctctcaggcatgcctcttcccagcatgaggcagtcacattcacaggcaggttagcatctgctgtccctctccggaggctcagagcccacaccaatgcccatttacagcacctacaccagctgtcaaggtgcaacatgcttgctccctctctgtttctcacttttctatttaaatttgtttagcattaggataatgaaacatattctgtttgttaaggccagagaaacctggttttggcatagagaccctaagggggcacaataatgagcaagattaagataaaaacaaatgaaaggacagggagtctcaggtgggcacatacgtaaggctctgcttgagtctgagcttttagactggcacaattagcatcattactgttatagtctcagcctcaacatggaataaaccttcactgatgatttttgttaactgaaaaggcaggtctcagctgttttccatg

SEQ ID NO: 23745 - DNA, 1798 bp, Homo sapiens
tctgggaacatagcattgtgagatggggtagggacgcagggatggcccagcgctgattttttaatttcctttctgagaaatggggagaagcctatggcggcacgtctgctttgacctcagcatctcatgcaggtcttctatatttcagtgccagtggagactcatccatctaaattcgctcaaattgatggaactgatttacactgggtctctttttgatacayaattttagcttcagtgtcaacttgaaaaactgtgctttggagacagatgtgagacatcacccttagtctcctgctgaacaaattgctcagagctgagtggggctaagtgcaggggtgagtgaagcttgcttgcttggggccatcttgaggagcccctgcgtgggacttgaactacagccttctcctcatgggactgtctgacctgccaggggcatgtacaagtcagctgtaacttgtatgataactatttgcctgcatgtctgactccccactggcggtgagctcctccggggttggacctcagccttctttgtgtcctgggaaccctgcacacgtccagcctgtagtcagctctacacatatgtgaagtcaaaccctgcctgtcggccctggaaactggaggccccgtggagaacctggggggaagccaggttgacagctgagcagctctcccaggagcagccttataaatctgttctcattagcaggagccccagggggaggggaggagaacaagtgtgtgtgtgtgtgtgtgtgtgtgtgtgtgtgtgtgtgtgtgtcgagagggctggggagggtgctgccattaacttgtcaggaacccccttcaatctatgacactttacttctgcgtctgggaaggctgtgtttgctggtggtagcttttcaggatcctggaaaaatcctgattctgaaccccaatgccgtgcaaagctgcacagcacccagtccagaaagtcatgcttctccatctcagtcacattttcaggtgcactaattggcttatgcttttttgcataaaggttggtgaaagagctgaaaagttcttttccgcttcggtggtgggttctctttgttctgagtgctctattcgggtcacatctggtagcctcagctgcaattgacttttggctcttggtctttaggccaaaggactttcctgccacacaaatgagaagtttttaaaaagagctttaccatcctacccataagttacaacaattgtcgctgacccagcattcagaactttgcaggagtgaggcctccaacagcgaggcttctccttggagccagctacatgtgtggatgcctccctttctatctgtgcagccagctctcaggcatgcctcttcccagcatgaggcagtcacattcacaggcaggttagcatctgctgtccctctccggaggctcagagcccacaccaatgcccatttacagcacctacaccagctgtcaaggtgcaacatgcttgctccctctctgtttctcacttttctatttaaatttgtttagcattaggataatgaaacatattctgtttgttaaggccagagaaacctggttttggcatagagaccctaagggggcacaataatgagcaagattaagataaaaacaaatgaaaggacagggagtctcaggtgggcacatacgtaaggctctgcttgagtctgagcttttagactggcacaattagcatcattactgttatagtctcagcctcaacatggaataaaccttcactgatgatttttgttaactgaaaaggcaggtctcagctgttttccatg

SEQ ID NO: 23746 - DNA, 1798 bp, Homo sapiens
tctgggaacatagcattgtgagatggggtagggacgcagggatggcccagcgctgattttttaatttcctttctgagaaatggggagaagcctatggcggcacgtctgctttgacctcagcatctcatgcaggtcttctatatttcagtgccagtggagactcatccatctaaattcgctcaaattgatggaactgatttacactgggtctctttttgatacacaattttagcttcagtgtcaacttgaaaaactgtgctttggagacagatgtgagacatcacccttagtctcctgctgaacaaattgctcagagctgagtggggctaagtgcaggggtgagtgaagctygcttgcttggggccatcttgaggagcccctgcgtgggacttgaactacagccttctcctcatgggactgtctgacctgccaggggcatgtacaagtcagctgtaacttgtatgataactatttgcctgcatgtctgactccccactggcggtgagctcctccggggttggacctcagccttctttgtgtcctgggaaccctgcacacgtccagcctgtagtcagctctacacatatgtgaagtcaaaccctgcctgtcggccctggaaactggaggccccgtggagaacctggggggaagccaggttgacagctgagcagctctcccaggagcagccttataaatctgttctcattagcaggagccccagggggaggggaggagaacaagtgtgtgtgtgtgtgtgtgtgtgtgtgtgtgtgtgtgtgtgtgtcgagagggctggggagggtgctgccattaacttgtcaggaacccccttcaatctatgacactttacttctgcgtctgggaaggctgtgtttgctggtggtagcttttcaggatcctggaaaaatcctgattctgaaccccaatgccgtgcaaagctgcacagcacccagtccagaaagtcatgcttctccatctcagtcacattttcaggtgcactaattggcttatgcttttttgcataaaggttggtgaaagagctgaaaagttcttttccgcttcggtggtgggttctctttgttctgagtgctctattcgggtcacatctggtagcctcagctgcaattgacttttggctcttggtctttaggccaaaggactttcctgccacacaaatgagaagtttttaaaaagagctttaccatcctacccataagttacaacaattgtcgctgacccagcattcagaactttgcaggagtgaggcctccaacagcgaggcttctccttggagccagctacatgtgtggatgcctccctttctatctgtgcagccagctctcaggcatgcctcttcccagcatgaggcagtcacattcacaggcaggttagcatctgctgtccctctccggaggctcagagcccacaccaatgcccatttacagcacctacaccagctgtcaaggtgcaacatgcttgctccctctctgtttctcacttttctatttaaatttgtttagcattaggataatgaaacatattctgtttgttaaggccagagaaacctggttttggcatagagaccctaagggggcacaataatgagcaagattaagataaaaacaaatgaaaggacagggagtctcaggtgggcacatacgtaaggctctgcttgagtctgagcttttagactggcacaattagcatcattactgttatagtctcagcctcaacatggaataaaccttcactgatgatttttgttaactgaaaaggcaggtctcagctgttttccatg

SEQ ID NO: 23747 - DNA, 1114 bp, Homo sapiens
tgttgtacaactaccccctgtgwgtcctacaggcaccttagactctaaatatctaaaatcagactttccatcttcccttcgcatcagctctactctctacattctgtcaagaccccagtaatcaaggctaaagataggtgaggtggtgatttcctagtcgtggttctgaagcttcagggtttatacttaggtgaatcgcaactctgaaggctgagttttcttcctttttaataaaaatacatagaaatttggcccatggggtaaaagtgagtagtattgggaaaacactttcatgtttaagaagtctcctgtgtcttgtactcaaaggtagacagctggagtcctctgggcttctgcctcttgagatcacctgtattcattgcatattgatccttctccaaaaagcttcatgagacctgattcatgttcacaaaatcttcaggacctgaaatttggaacttctgaatcttttggctttatagaaaccaaagaggaacttctagttcagtgttctcttgaaaggcttagacctcaagcgttctgttacccaactgtctgattgttttgactaaatgttggcatacctagggtaaacctctggccattcaaaattcaaagtctctcttattgaggtctcttccctgctgtcctttttaaaaatgcaagtggctgggcatggtggttcacgcctgtaattgcagcactttgggaggccgaggcgggtggatcacttgaggacagggattcaagacccgcctgaccaacatggcaaaaccctgtctctactaaaaatacaaaaattagctgggtagggtggcatgcgcctgtaatctcagcttctcaggaggctgaggcaggagaattgcttgaacctgggaggtggaggttgcagtgagccaagatcacgccattgcactccagcctgggcaacaagagtgaaactctgtccctccaaaaaaaaaaaaaaaaaaaaaaaaaaaaaaaaaaaaaagtagattctttcctaagctttcctgccttctcactcaaggcagtgtccccaagtgagctcatcctctcccatatcttttactgtcatatctctttttaaacccaaacctctttccttgcctct

SEQ ID NO: 23748 - DNA, 1114 bp, Homo sapiens
tgttgtacaactaccccctgtgtgtcctacaggcaccttagactctaaatatctaaaatcagactttccatcttcccttcgcatcagctctactctctacattctgtcaagaccccagtaatcaaggctaaagataggtgaggtggtgatttcctagtcgtggttctgaagcttcagggtttatacttaggtgaatcgcaactctgaaggctgagttttcttcctttttaataaaaatacatagaaatttggcccatggggtaaaagtgagtagtattgggaaaacactttcatgtttaagaagtctcctgtgtcttgtactcaaaggtagacagctggagtcctctgggcttctgcctcttgagatcacctgtattcattgcatattgatccttctccaaaaagcttcatgagacctgattcaygttcacaaaatcttcaggacctgaaatttggaacttctgaatcttttggctttatagaaaccaaagaggaacttctagttcagtgttctcttgaaaggcttagacctcaagcgttctgttacccaactgtctgattgttttgactaaatgttggcatacctagggtaaacctctggccattcaaaattcaaagtctctcttattgaggtctcttccctgctgtcctttttaaaaatgcaagtggctgggcatggtggttcacgcctgtaattgcagcactttgggaggccgaggcgggtggatcacttgaggacagggattcaagacccgcctgaccaacatggcaaaaccctgtctctactaaaaatacaaaaattagctgggtagggtggcatgcgcctgtaatctcagcttctcaggaggctgaggcaggagaattgcttgaacctgggaggtggaggttgcagtgagccaagatcacgccattgcactccagcctgggcaacaagagtgaaactctgtccctccaaaaaaaaaaaaaaaaaaaaaaaaaaaaaaaaaaaaaagtagattctttcctaagctttcctgccttctcactcaaggcagtgtccccaagtgagctcatcctctcccatatcttttactgtcatatctctttttaaacccaaacctctttccttgcctct

SEQ ID NO: 23749 - DNA, 1114 bp, Homo sapiens
tgttgtacaactaccccctgtgtgtcctacaggcaccttagactctaaatatctaaaatcagactttccatcttcccttcgcatcagctctactctctacattctgtcaagaccccagtaatcaaggctaaagataggtgaggtggtgatttcctagtcgtggttctgaagcttcagggtttatacttaggtgaatcgcaactctgaaggctgagttttcttcctttttaataaaaatacatagaaatttggcccatggggtaaaagtgagtagtattgggaaaacactttcatgtttaagaagtctcctgtgtcttgtactcaaaggtagacagctggagtcctctgggcttctgcctcttgagatcacctgtattcattgcatattgatccttctccaaaaagcttcatgagacctgattcatgttcacaaaatcttcaggacctgaaakttggaacttctgaatcttttggctttatagaaaccaaagaggaacttctagttcagtgttctcttgaaaggcttagacctcaagcgttctgttacccaactgtctgattgttttgactaaatgttggcatacctagggtaaacctctggccattcaaaattcaaagtctctcttattgaggtctcttccctgctgtcctttttaaaaatgcaagtggctgggcatggtggttcacgcctgtaattgcagcactttgggaggccgaggcgggtggatcacttgaggacagggattcaagacccgcctgaccaacatggcaaaaccctgtctctactaaaaatacaaaaattagctgggtagggtggcatgcgcctgtaatctcagcttctcaggaggctgaggcaggagaattgcttgaacctgggaggtggaggttgcagtgagccaagatcacgccattgcactccagcctgggcaacaagagtgaaactctgtccctccaaaaaaaaaaaaaaaaaaaaaaaaaaaaaaaaaaaaaagtagattctttcctaagctttcctgccttctcactcaaggcagtgtccccaagtgagctcatcctctcccatatcttttactgtcatatctctttttaaacccaaacctctttccttgcctct

SEQ ID NO: 23750 - DNA, 1114 bp, Homo sapiens
tgttgtacaactaccccctgtgtgtcctacaggcaccttagactctaaatatctaaaatcagactttccatcttcccttcgcatcagctctactctctacattctgtcaagaccccagtaatcaaggctaaagataggtgaggtggtgatttcctagtcgtggttctgaagcttcagggtttatacttaggtgaatcgcaactctgaaggctgagttttcttcctttttaataaaaatacatagaaatttggcccatggggtaaaagtgagtagtattgggaaaacactttcatgtttaagaagtctcctgtgtcttgtactcaaaggtagacagctggagtcctctgggcttctgcctcttgagatcacctgtattcattgcatattgatccttctccaaaaagcttcatgagacctgattcatgttcacaaaatcttcaggacctgaaatttggaacttctgaatcttttggctttatagaaaccaaagaggaacttctagttcagtgttctcttgaaaggcttagacctcaagcgttctgttacccaactgtctgattgttttgactaaatgttggcatacctagggtaaacctctggccattcaaaattcaaagtctctyttattgaggtctcttccctgctgtcctttttaaaaatgcaagtggctgggcatggtggttcacgcctgtaattgcagcactttgggaggccgaggcgggtggatcacttgaggacagggattcaagacccgcctgaccaacatggcaaaaccctgtctctactaaaaatacaaaaattagctgggtagggtggcatgcgcctgtaatctcagcttctcaggaggctgaggcaggagaattgcttgaacctgggaggtggaggttgcagtgagccaagatcacgccattgcactccagcctgggcaacaagagtgaaactctgtccctccaaaaaaaaaaaaaaaaaaaaaaaaaaaaaaaaaaaaaagtagattctttcctaagctttcctgccttctcactcaaggcagtgtccccaagtgagctcatcctctcccatatcttttactgtcatatctctttttaaacccaaacctctttccttgcctct

SEQ ID NO: 23751 - DNA, 1114 bp, Homo sapiens
tgttgtacaactaccccctgtgtgtcctacaggcaccttagactctaaatatctaaaatcagactttccatcttcccttcgcatcagctctactctctacattctgtcaagaccccagtaatcaaggctaaagataggtgaggtggtgatttcctagtcgtggttctgaagcttcagggtttatacttaggtgaatcgcaactctgaaggctgagttttcttcctttttaataaaaatacatagaaatttggcccatggggtaaaagtgagtagtattgggaaaacactttcatgtttaagaagtctcctgtgtcttgtactcaaaggtagacagctggagtcctctgggcttctgcctcttgagatcacctgtattcattgcatattgatccttctccaaaaagcttcatgagacctgattcatgttcacaaaatcttcaggacctgaaatttggaacttctgaatcttttggctttatagaaaccaaagaggaacttctagttcagtgttctcttgaaaggcttagacctcaagcgttctgttacccaactgtctgattgttttgactaaatgttggcatacctagggtaaacctctggccattcaaaattcaaagtctctcttattgaggyctcttccctgctgtcctttttaaaaatgcaagtggctgggcatggtggttcacgcctgtaattgcagcactttgggaggccgaggcgggtggatcacttgaggacagggattcaagacccgcctgaccaacatggcaaaaccctgtctctactaaaaatacaaaaattagctgggtagggtggcatgcgcctgtaatctcagcttctcaggaggctgaggcaggagaattgcttgaacctgggaggtggaggttgcagtgagccaagatcacgccattgcactccagcctgggcaacaagagtgaaactctgtccctccaaaaaaaaaaaaaaaaaaaaaaaaaaaaaaaaaaaaaagtagattctttcctaagctttcctgccttctcactcaaggcagtgtccccaagtgagctcatcctctcccatatcttttactgtcatatctctttttaaacccaaacctctttccttgcctct

SEQ ID NO: 23752 - DNA, 1114 bp, Homo sapiens
tgttgtacaactaccccctgtgtgtcctacaggcaccttagactctaaatatctaaaatcagactttccatcttcccttcgcatcagctctactctctacattctgtcaagaccccagtaatcaaggctaaagataggtgaggtggtgatttcctagtcgtggttctgaagcttcagggtttatacttaggtgaatcgcaactctgaaggctgagttttcttcctttttaataaaaatacatagaaatttggcccatggggtaaaagtgagtagtattgggaaaacactttcatgtttaagaagtctcctgtgtcttgtactcaaaggtagacagctggagtcctctgggcttctgcctcttgagatcacctgtattcattgcatattgatccttctccaaaaagcttcatgagacctgattcatgttcacaaaatcttcaggacctgaaatttggaacttctgaatcttttggctttatagaaaccaaagaggaacttctagttcagtgttctcttgaaaggcttagacctcaagcgttctgttacccaactgtctgattgttttgactaaatgttggcatacctagggtaaacctctggccattcaaaattcaaagtctctcttattgaggtctcttccctgctgtcctttttaaaaatgcaagtggctgggcatggtggttcacgcctgtaattgcagcactttgggaggccgaggcgggtggatcacttgaggacagggattcaagacccgcctgaccaacatggcaaaaccctgtctctactaaaaatacaaaaattagctgggtagggtggcatgcgcctgtaatctcagctkctcaggaggctgaggcaggagaattgcttgaacctgggaggtggaggttgcagtgagccaagatcacgccattgcactccagcctgggcaacaagagtgaaactctgtccctccaaaaaaaaaaaaaaaaaaaaaaaaaaaaaaaaaaaaaagtagattctttcctaagctttcctgccttctcactcaaggcagtgtccccaagtgagctcatcctctcccatatcttttactgtcatatctctttttaaacccaaacctctttccttgcctct

SEQ ID NO: 23753 - DNA, 1180 bp, Homo sapiens
ctttatccactcatgaaccactgtccaatttttgccacatctattaagcaactatattattggctcaatatttttctttaattcacctcacaaattgccacaaatgttttcaaaaggaaactttacatcactgttataagtggaaaaccagtatcaaaggccacaatgggtaattatttaaaaatgaaaatgaatgaactttatcaatttacagtcaaatgttttgctcactaaagagagcttgaggctggctctcttggctacaaaaagattgagtcttaaagttgttaaagaaatattagcatcagagtcttgcctcttaaagcaattagaaatatggaaagagaattgaaaaaaatgatattgcaatgtgagttagtgttatataatctgtttccatagatatccttagtagtttatgcccccaatccatagaaacccttaacaagaaaacttaaggaccacatattttaatcggtttcatcaaatgcatggatacaaatcagattatacacttaacaccatgccatataaaaaccaatgaaaacaaaaactaacccaaatctatatttggaggagacattgattcctccttcctaagactattcttgcatcagaagcagaggttttatttttctttcattttcttagatcttgtttcttcttagaatctgctttaagtttatggaacttcaattgttgagtttaatgtacaaacctaagaaaatatagctgaaaaaataatgtagatatcaaaaagttcttgggccaggcatggtggttcacgcctgtaatcmcagcactttgggaggccaaggtgggtggatcacttgaggtgaggagtttgagaccagcctggccaacatggaaaccctgtctctactaaaaatacaaaaaatcagctgggtgtggtgggcatctgtaatcccagctactcgggaggctgaggcaggagaatcgctcgaacccaggaggcagacattgcagtgagccgagatcgtaccactccattccagcctcggtgacagactgagattccatctcaggaatggaaaaaaaacaacaatgaaccagataaagaaagaaagaaagaaaatcttaagtctaggttataccgactagaataagatgatccacattccacataaagttataaatccaagcatacttccccactcat

SEQ ID NO: 23754 - DNA, 1193 bp, Homo sapiens
ctttcttayaccttatacaaaaactaactcaaggtggattaaagacttaaatgtaaaacccaaaaccataaaaaccccagaagaaaatctaggcaataccattcaggatacaggcatgggcaaagacttcatgatgaaatcaccaaaagtaattgcaaaaaaagcaaaaatgacaaattaaactaaagagcttctacacaacaaacgaaattatcatcagagtgaacagacaacttacagaatgggagagaatttttgcaatctatccatctgataaaggactaatatccagaatctaaaaggaaattaagcaaatgtacaagaaaaaaaaaatcaaacaaccccattaaaaagtgggcaaaggatataaacagacacttctcaaaaaaagacatacatgcggccaacatatgaaaaatagctcaacatcactgatcattagagaaatgcaaatcaaaaccacaatgagataacatctcacgtcagtcagaatggcaattagtaaaaagtcaagaaacaacaaatgctggcaaggttgcagagaaacaggaacacttttatactattggtgggaatgtaaattagttcaaccattgtggaagacagtgtggtgattcctcaaagattttgaacccgaaatgccatttgacccagcaatccccttactgggtatatacccaaaggaatataaatcattcacagggcttttcatatttcttgttaagatagtagatatgtaggaagcatctgttaattactccctaattacagttaattacttccttcttcttgacatatctcttttcttagattccatgacagcatgctctccttctgcctccctggatatatcttgtcaatctgattttctggctactctggctactactatacccccaaatgcaggcgtgtcccaagcctaagacctggacttctttctatgtattctctccccacattacctcatctagtccacttacttttaataaaacattccaaatataaaaacaaaaatatgtatattttataagtatataaaatatagacatatattttcaatttgtgtgttatccctagtctagccctcagttatgagcttcagatttatatatccaatgtctatacaggtcttgaaggcatcttaattactccttcagtctttcctacctcaatctacccagttactaaagcca

SEQ ID NO: 23755 - DNA, 1627 bp, Homo sapiens
catttgtgtctgcttggtcctaaaaatttgattacaagctccttgcagatgagaggtggagtctcacatttcattgtatccactcccttgggcctagcacaatgctttatggattacgtggccacctggatccccaactttcttttgttttgagacagagtttcgctcttgttgccaaggctggaatgcaatggcacggtctcggctcaccgcaacctccgcatcccgggttcaagcaattctcctgcctcagcctcctgagtagctgggatcacaagcgtgcgccacgccacacctggctaattttgtatttttagcagagacggggtttgtccatgttggtcaggctggtctcgaactctcaacctaaggtgatctgcctgccttgacctcccaaagtcttgggattacaggcgtgagccactgcacctggcctggatcccaaactttcacactggctgggaaggtcacacctggtgacagactttatcaagttatataaacttgatagtacagtcattctcgatttctaattatgaattagaactttggtgtcctaggtttgcaaatgacctgaaagagaataacaccggtgtgaataacttgacactcccttatgctgaaattattactgcatatgcaaggcagatggacaaatttcagagccagcctgtctctttcgttgaagtgctcattctgttttcatctctctcaatcaagagacttccacagttttctctaggaagactgtatcatggccaggtgtggtagctcatgcctgtaatcccagcactttggaggccaaggcagtctgatcacctgaggtcaggagtttgagacccacctgcccaatatggtgaaactcccgtctctacttaaaaatacaaaaattagccaggtgcggtggcacatgcttgtaatcccagctacctgggaggctgaggtaggaggatcgctggaacccaggaggtggaggtcacagtgagttgagattgcagcactgcggtccagcctgagtgacagagtgagactccctctcaaaaaaaaaaaaaaaaaaaagactgtaactgaacatgattatgttatctgtgtagacagtgtttcaagtcttaagctaaaatttccccataatttcactacctctatttcattttttaccacattaattcctgttttgcagtagtaaaaagaagctccgtaataacattattaacacattttctagtcacattttcaagctggatgttcgaaagattgtaacatataagttgtataaactagactccattccatttttttgaaaggcaaaacctaaatgcataaaaattacttaaaatgctgaagaaaataaatccctttggttttattccatgaagggtaccactacctcttttattttgctgtctccatagttaatgccttataatgtgaaatctaacaaaagcaaaggataacaagtgacaatgtaaaattcatgtctaaagaagtatgaaaacaaaaatttcttttctgcatgtcaacactcaagacaaagttcatatgtttcttagyatatatattataaaaataagccaccatgaattttttttaaaaaaattgttttacttcaatgtaaacactgaaggag

SEQ ID NO: 23756 - DNA, 1627 bp, Homo sapiens
catttgtgtctgcttggtcctaaaaatttgattacaagctccttgcagatgagaggtggagtctcacatttcattgtatccactcccttgggcctagcacaatgctttatggattacgtggccacctggatccccaactttcttttgttttgagacagagtttcgctcttgttgccaaggctggaatgcaatggcacggtctcggctcaccgcaacctccgcatcccgggttcaagcaattctcctgcctcagcctcctgagtagctgggatcacaagcgtgcgccacgccacacctggctaattttgtatttttagcagagacggggtttgtccatgttggtcaggctggtctcgaactctcaacctaaggtgatctgcctgccttgacctcccaaagtcttgggattacaggcgtgagccactgcacctggcctggatcccaaactttcacactggctgggaaggtcacacctggtgacagactttatcaagttatataaacttgatagtacagtcattctcgatttctaattatgaattagaactttggtgtcctaggtttgcaaatgacctgaaagagaataacaccggtgtgaataacttgacactcccttatgctgaaattattactgcatatgcaaggcagatggacaaatttcagagccagcctgtctctttcgttgaagtgctcattctgttttcatctctctcaatcaagagacttccacagttttctctaggaagactgtatcatggccaggtgtggtagctcatgcctgtaatcccagcactttggaggccaaggcagtctgatcacctgaggtcaggagtttgagacccacctgcccaatatggtgaaactcccgtctctacttaaaaatacaaaaattagccaggtgcggtggcacatgcttgtaatcccagctacctgggaggctgaggtaggaggatcgctggaacccaggaggtggaggtcacagtgagttgagattgcagcactgcggtccagcctgagtgacagagtgagactccctctcaaaaaaaaaaaaaaaaaaaagactgtaactgaacatgattatgttatctgtgtagacagtgtttcaagtcttaagctaaaatttccccataatttcactacctctatttcattttttaccacattaattcctgttttgcagtagtaaaaagaagctccgtaataacattattaacacattttctagtcacattttcaagctggatgttcgaaagattgtaacatataagttgtataaactagactccattccatttttttgaaaggcaaaacctaaatgcataaaaattacttaaaatgctgaagaaaataaatccctttggttttattccatgaagggtaccactacctcttttattttgctgtctccatagttaatgccttataatgtgaaatctaacaaaagcaaaggataacaagtgacaatgtaaaattcatgtctaaagaagtatgaaaacaaaaatttcttttctgcatgtcaacactcaagacaaagttcatatgtttcttagcatatatattataaaaataagccaccatgaawtttttttaaaaaaattgttttacttcaatgtaaacactgaaggag

SEQ ID NO: 23757 - DNA, 893 bp, Homo sapiens
aattttccaaaattatatgataaaaatatagtagttttctcatttaaaaattttaaatttaaaatagycacaggaaatttcatcttatgtaagcaaaatgtctgaaggtgtcctgatttcctgattgaacaaatccttttttttttttggctcagtcacccaatctggagtgcagtggtgcgatctctgctcactgcaacctccgcctcctgggttcaagcaattctcctgcctcaacctcctgagtagctgggactacaggtgtctgccatcatggctggctaatttttgtatttttagtagagacaggggctcaccatgttggccaggctggtctcaaactcctgacctcaagtgatccacccacctcggccttccaaagtgctgggattataggcatgagccactacggccagcctttttttttttttttttttttaggacagtcttgctctgtcacccaggctggagtgtagtggcatgatctgggctcgctacaacctccgcctcccgggttcaagagattcttgtgccacagcctctgaatagctgggattacaggcaaacaccaccatgcctagctatatatatatatattttttgagacagtttccctctgtctgttgcccaggctggagcacagtggagtgatcttggcttgctacaacatcctccttccggggttgaagcaattctcctgcctcagcctcctgagtagctgggattacaggcgggcaccaccacacctggctaattttgtatttttagtagaaagggggtttcaccttgttgtccaggctggtcttgaacacctcacctcaagtgatccacccgcctcggcctctcaaagcgctgggattacaagcatgagccacagtgcctggcctaatttt

SEQ ID NO: 23758 - DNA, 893 bp, Homo sapiens
aattttccaaaattatatgataaaaatatagtagttttctcatttaaaaattttaaatttaaaatagccacaggaaatttcatcttatgtaagcaaaatgtctgaaggtgtcctgatttcctgattgaacaaatccttttttttttttggctcagtcacccaatctggagtgcagtggtgcgatctctgctcactgcaacctccgcctcctgggttcaagcaattctcctgcctcaacctcctgagtagctgggactacaggtgtctgccatcatggctggctaatttttgtatttttagtagagacaggggctcaccatgttggccaggctggtctcaaactcctgacctcaagtgatccacccacctcggccttccaaagtgctgggattataggcatgagccacyacggccagcctttttttttttttttttttttaggacagtcttgctctgtcacccaggctggagtgtagtggcatgatctgggctcgctacaacctccgcctcccgggttcaagagattcttgtgccacagcctctgaatagctgggattacaggcaaacaccaccatgcctagctatatatatatatattttttgagacagtttccctctgtctgttgcccaggctggagcacagtggagtgatcttggcttgctacaacatcctccttccggggttgaagcaattctcctgcctcagcctcctgagtagctgggattacaggcgggcaccaccacacctggctaattttgtatttttagtagaaagggggtttcaccttgttgtccaggctggtcttgaacacctcacctcaagtgatccacccgcctcggcctctcaaagcgctgggattacaagcatgagccacagtgcctggcctaatttt

SEQ ID NO: 23759 - DNA, 550 bp, Homo sapiens
ccatattgttgaggctggtcttgaactcctgaccttgtgatctgcccaccttggcctcccaaattgctgggattacaggcgtgagccaccatgcctgctgctcatacactttaaatgagtgaactttatggtatataaattatatcttaaagctgttagaaaggaacacacaaagtggttaccctcaggcatttgaaaaaagccacatttacctttgtatgccactcctctctatttagccacacatgtgttttgttaatgcttttctaggtcctttgttttttcatgtctttcttggctattgctcctcaacagtaagtttagatcacttcattctttttgccttacattccattgtatggatattccttaatgtatataaccagctgatagagattgaggttttgttttcattctagctactacagacaatgccaccttccaaggagattgtatcaattaacacgttcatcagggatgtatgggagtgcatttcctcacatcctcagccacaaggtatattatcytgcttttttttttttttgagatg

SEQ ID NO: 23760 - DNA, 485 bp, Homo sapiens
ctgcacagtatgcaaaggccctgctatacagctttctcaacctgttgtgctgtttttggcttccttgaacccacttgattccatcctttgagactcaaatgttattgtctctgtgaagcctttccctttcccaaccttccgtcacactctacatgtattaacaatttatccatatgccataattacatatcaataattgcatgtaatctttatcccaccagttcactcctcctcatcccacacattgtctaaatcagcagtgaccaacagaactttctgtgattatagaaatataatatctgcactgtccaaaacaagatcctctagacaaatacrgccactgaacgcttgaaatgtggctgatgtgacagagaattcaattttatttattttagatttaaattaaaatttaaataacagcatctggctagtggctactgtactggacatatggttttatactatgaacttcttgaaggcaagaa

SEQ ID NO: 23761 - DNA, 476 bp, Homo sapiens
gtagctcagaaatcaataaaagagcaggtttatgattgctgatgcttaaattatacttgtcattctaaagatatttattgcacacttactatgcaaaactgtgttctaagtgctttaaaggaaattgagatgaatcatgcatgaacctgacctccaagaatatggtcatcactgaaagataagatacaggtataatagatamaaagtagcaattgctaagtacaattatccctccatatctgagtgggattagttctagaactccctccagatactacattgccatgatgctcaagtcccttatataaatggcatattatttgcatataacctatacacatcctgtatactttatattatctctagattatttataataccgaatacaatgtgagtactatgtaaataattgttatactttattttctatttgtattatttttattgttgtattattattttttatttattcattt

SEQ ID NO: 23762 - DNA, 910 bp, Homo sapiens
ttatagatccatattgctaacactgccacttgcttacctgacttgggagattagaataaccttttcattttttacccccaggaaaaagttatccctaaatgcattttcactttatgagccaagggtggagccaaggaagggtgctttggggtgggctcatgagtttggaatctgatcctttcttgaggcttgagctggctgaaaaggaaggggagggwtaatgcattcagacccctgctggaacccagaggacgtggagtcagctgtctcgtgacactgctattttaagacactttgagattttgaaatgaattgaagatggaaccagcagcagggaaaggcacctctttatgaccccttggtatactactaagagggctaaggtgcctggggcttttagtgccaccttccagaaatgccctgcaaccccagcacacttgtgtgtgtgcaacacacacacacatacacacacactcattcctgggattgccccatgtaaaactctatggggtgtaaaataaaacaccctggacaccatagctgtgggtgcttccagctgctcctccatgcaaagaccccaccgccaccatccctcccaacccccattacccctcctgggctttcaggactcccccctccaccaccaccccagagaggaggagtgagactgtgccaggagctgaagtccccatcctcactctcgtgctcactaattgattatgtggcagcttaatttgttgatcatggatatgtggaggtattttcagaagcaaaatgctctttgtatgtgtgtgctcctcaaaggagagctgcttgatttggggcatttgtgagggtggcacaggcctgccagctcccctggggacaatggatgtgtcagggcagggatagagtggtgggagcaggcaga

SEQ ID NO: 23763 - DNA, 910 bp, Homo sapiens
ttatagatccatattgctaacactgccacttgcttacctgacttgggagattagaataaccttttcattttttacccccaggaaaaagttatccctaaatgcattttcactttatgagccaagggtggagccaaggaagggtgctttggggtgggctcatgagtttggaatctgatcctttcttgaggcttgagctggctgaaaaggaaggggagggttaatgcattcagacccctgctggaacccagaggacgtggagtcagctgtctcgtgacactgctattttaagacactttgagattttgaaatgaattgaagatggaaccagcagcagggaaaggcacctctttatgaccccttggtatactactaagagggctaaggtgcctggggcttttagtgccaccttccagaaatgccctgcaaccccagcacacttgtstgtgtgcaacacacacacacatacacacacactcattcctgggattgccccatgtaaaactctatggggtgtaaaataaaacaccctggacaccatagctgtgggtgcttccagctgctcctccatgcaaagaccccaccgccaccatccctcccaacccccattacccctcctgggctttcaggactcccccctccaccaccaccccagagaggaggagtgagactgtgccaggagctgaagtccccatcctcactctcgtgctcactaattgattatgtggcagcttaatttgttgatcatggatatgtggaggtattttcagaagcaaaatgctctttgtatgtgtgtgctcctcaaaggagagctgcttgatttggggcatttgtgagggtggcacaggcctgccagctcccctggggacaatggatgtgtcagggcagggatagagtggtgggagcaggcaga

SEQ ID NO: 23764 - DNA, 588 bp, Homo sapiens
gttatttcctatcgctagatcatatattggcactgcttcactggagattattggatccatgatcaacaaaaccacactaaagtcaaaaatatagaaccaattgactatagaatgctccttttatgtcaatgaagacatttggatggtgttggcttcattgattgttgattctatttcacattaaaactaattttaaatgcactatttacaacaagtttctacaaatttactaaaattcatgggattgtttcctctgctgatttacatattggtttataagtctggtaatttgcagtgacactatttctgatgtattccatctccatctcctaattaaagtwagttttgcattttttctgaactttcagcatgttctctgtatttttcattgaagctaattctgtttcctctgctcttttgggagcctgataattaaatacatttcaggtgccaacaagctaaatatccccctcccttgcaatcctgtcctattttcttcccttgtttattatttctgttttaaatatcactatatcatcctcaacaaaagcaaacatgtattgaatgtctgctgtggtgatgacatta

SEQ ID NO: 23765 - DNA, 541 bp, Homo sapiens
tgcaaagaatattttattttatacatcactagccatgaatttttgccattagttattatacaaatgctgcctagtgccattagatggcaaggtaggaaaaatatattttaatcatttttcatttaagtggccttatgtaaaaaataarctaataatttagcagtttcaagtctccaaagggcattttcaaatgttcataaaagaaatggttacagagatttttaagaagcatcttccatgtccacatcctcttgtagctgctgtgccattttctcttccaactgcttccctttgcctgcaagaggggctcggataagatggatgttttgcttgacttctttgatatcctgaactttctgtagctctttatttttcttcaatctgttcattaagcttcgtgtttctgtttgatctcttcaattctcttcattgcatcagtagttttattccatagctctcactggtatttgataggttcatttctacggttttcaaattcaaatgaattatccactgtaagctctttaccagctgctttcca

SEQ ID NO: 23766 - DNA, 540 bp, Homo sapiens
tttggaaaaatccaaatctttcccaggagaaagagtaagaaatatctcatgygtagtatgtaaatcagagtagagcccagaaaatacctgccaacactggcctttgactttatagatgctcacattaagctattatactgatgaaacaggttgaggctaacctcatggaaaatgataaatgaaatgatgggaggtcctcctgttttaggtctgtatcatatgatataccatcatttgggaatgtgcttgtatttgtgaatcagaatcctcaaagtacatgcctatgtacatgtgaccaaacttggcatttcactgtttagtcttcattggtacgttaggttttctgagaaaagtagctgaatccatctgagacagcatcattaaatcagtgcaattgaattcagatgagagaaattagtgtcacccattagtaaatttttcttttaaattttgtttagcatcatgcttacactaccatttctccagagatctaaaattattcaaagtggctagtacatgtcatatttgggaactgaaatt

SEQ ID NO: 23767 - DNA, 1104 bp, Homo sapiens
cctttcagaagtcagcaagttcaatcactgataaaaatccctatattgsgttcacagtttggctttgacatttcagctcagatggcaaatgaaatcctttaatgtgtttaaacttttggtaaaactctattaccctctaactcttgctgaaaaagacattatcttttgcatgttgcatgaagaaggcttcccttttaatgtcacttccacatttctattacagcattcacagagctttcgtaaatatgtgaatatgtgcatttctacacatattttccccactcaaatgaaagaaaagagtggagaattggaagccttaatacatatttttcattatatggaagattgcatgttccttggacttaggaaaggaaatactttctagctatttagcttgccaagtctagaataaaggtgcatagaatcttctgaaaggatttttaaaggaaggaaaagattttatgaaatgggttttaataaaggcacttaaggaaatataactcaatctaaaatatattcttacttcctgcgtatttatttttttaagcaattttatgttgtatttcatttttacacgtggatatgtgcaattcaccattttgggaatgggatcaagaggttttgctaaagtcaaacaggtttttaaaaacttttattgtaaaacaaaacagacataaaaagtcatacaaaacaaacagatagtgaattataagactaacacccactcagattaagaaatagatatttgtgaggtatcccagaacatgtcacctccctctctccaaaaataaccactatcctgactattatagtaatcacttccttatatttctttatatttttttactcaagtgtacatccttagcactgtgtattcttattcactttaaaaaaaatttgttgtttttaatttccttttaatctactgattttccctccatcccttgctcttgcttataatttatttgttgaagatccttggtggtttgacctgtagaatttcccactatctatattttgctgattgtgtattcatggtgcacatgagtacaccatgagcacctgtttctctgtcctctgtgttacctgaagatcacagcctgt

SEQ ID NO: 23768 - DNA, 1104 bp, Homo sapiens
cctttcagaagtcagcaagttcaatcactgataaaaatccctatattgcgttcacagtttggctttgacatttcagctcagatggcaaatgaaatcctttaatgtgtttaaacttttggtaaaactctattaccctctaactcttgctgaaaaagacattatcttttgcatgttgcatgaagaaggcttcccttttaatgtcacttccacatttctattacagcattcacagagctttcgtaaatatgtgaatatgtgcatttctacacatattttccscactcaaatgaaagaaaagagtggagaattggaagccttaatacatatttttcattatatggaagattgcatgttccttggacttaggaaaggaaatactttctagctatttagcttgccaagtctagaataaaggtgcatagaatcttctgaaaggatttttaaaggaaggaaaagattttatgaaatgggttttaataaaggcacttaaggaaatataactcaatctaaaatatattcttacttcctgcgtatttatttttttaagcaattttatgttgtatttcatttttacacgtggatatgtgcaattcaccattttgggaatgggatcaagaggttttgctaaagtcaaacaggtttttaaaaacttttattgtaaaacaaaacagacataaaaagtcatacaaaacaaacagatagtgaattataagactaacacccactcagattaagaaatagatatttgtgaggtatcccagaacatgtcacctccctctctccaaaaataaccactatcctgactattatagtaatcacttccttatatttctttatatttttttactcaagtgtacatccttagcactgtgtattcttattcactttaaaaaaaatttgttgtttttaatttccttttaatctactgattttccctccatcccttgctcttgcttataatttatttgttgaagatccttggtggtttgacctgtagaatttcccactatctatattttgctgattgtgtattcatggtgcacatgagtacaccatgagcacctgtttctctgtcctctgtgttacctgaagatcacagcctgt

SEQ ID NO: 23769 - DNA, 1104 bp, Homo sapiens
cctttcagaagtcagcaagttcaatcactgataaaaatccctatattgcgttcacagtttggctttgacatttcagctcagatggcaaatgaaatcctttaatgtgtttaaacttttggtaaaactctattaccctctaactcttgctgaaaaagacattatcttttgcatgttgcatgaagaaggcttcccttttaatgtcacttccacatttctattacagcattcacagagctttcgtaaatatgtgaatatgtgcatttctacacatattttccccactcaaatgaaagaaaagagtggagaattggaagccttaatacatatttttyattatatggaagattgcatgttccttggacttaggaaaggaaatactttctagctatttagcttgccaagtctagaataaaggtgcatagaatcttctgaaaggatttttaaaggaaggaaaagattttatgaaatgggttttaataaaggcacttaaggaaatataactcaatctaaaatatattcttacttcctgcgtatttatttttttaagcaattttatgttgtatttcatttttacacgtggatatgtgcaattcaccattttgggaatgggatcaagaggttttgctaaagtcaaacaggtttttaaaaacttttattgtaaaacaaaacagacataaaaagtcatacaaaacaaacagatagtgaattataagactaacacccactcagattaagaaatagatatttgtgaggtatcccagaacatgtcacctccctctctccaaaaataaccactatcctgactattatagtaatcacttccttatatttctttatatttttttactcaagtgtacatccttagcactgtgtattcttattcactttaaaaaaaatttgttgtttttaatttccttttaatctactgattttccctccatcccttgctcttgcttataatttatttgttgaagatccttggtggtttgacctgtagaatttcccactatctatattttgctgattgtgtattcatggtgcacatgagtacaccatgagcacctgtttctctgtcctctgtgttacctgaagatcacagcctgt

SEQ ID NO: 23770 - DNA, 1104 bp, Homo sapiens
cctttcagaagtcagcaagttcaatcactgataaaaatccctatattgcgttcacagtttggctttgacatttcagctcagatggcaaatgaaatcctttaatgtgtttaaacttttggtaaaactctattaccctctaactcttgctgaaaaagacattatcttttgcatgttgcatgaagaaggcttcccttttaatgtcacttccacatttctattacagcattcacagagctttcgtaaatatgtgaatatgtgcatttctacacatattttccccactcaaatgaaagaaaagagtggagaattggaagccttaatacatatttttcattatatggaagattgcatgttccttggacttaggaaaggaaatactttctagctatttagcttgccaagtctagaataaaggtgcatagaatcttctgaaaggatttttaaaggaaggaaaagattttatgaaaygggttttaataaaggcacttaaggaaatataactcaatctaaaatatattcttacttcctgcgtatttatttttttaagcaattttatgttgtatttcatttttacacgtggatatgtgcaattcaccattttgggaatgggatcaagaggttttgctaaagtcaaacaggtttttaaaaacttttattgtaaaacaaaacagacataaaaagtcatacaaaacaaacagatagtgaattataagactaacacccactcagattaagaaatagatatttgtgaggtatcccagaacatgtcacctccctctctccaaaaataaccactatcctgactattatagtaatcacttccttatatttctttatatttttttactcaagtgtacatccttagcactgtgtattcttattcactttaaaaaaaatttgttgtttttaatttccttttaatctactgattttccctccatcccttgctcttgcttataatttatttgttgaagatccttggtggtttgacctgtagaatttcccactatctatattttgctgattgtgtattcatggtgcacatgagtacaccatgagcacctgtttctctgtcctctgtgttacctgaagatcacagcctgt

SEQ ID NO: 23771 - DNA, 1104 bp, Homo sapiens
cctttcagaagtcagcaagttcaatcactgataaaaatccctatattgcgttcacagtttggctttgacatttcagctcagatggcaaatgaaatcctttaatgtgtttaaacttttggtaaaactctattaccctctaactcttgctgaaaaagacattatcttttgcatgttgcatgaagaaggcttcccttttaatgtcacttccacatttctattacagcattcacagagctttcgtaaatatgtgaatatgtgcatttctacacatattttccccactcaaatgaaagaaaagagtggagaattggaagccttaatacatatttttcattatatggaagattgcatgttccttggacttaggaaaggaaatactttctagctatttagcttgccaagtctagaataaaggtgcatagaatcttctgaaaggatttttaaaggaaggaaaagattttatgaaatgggttttaataaaggcacttaaggaaatataactcaatctaaaatatattcttacttcctgcgtatttatttttttaagcaattttatgttgtatttcatttttacacgtggatatgtgcaattcaccattttgggaatgggatcaagaggttttgctaaagtcaaacaggtttttaaaaacttttattgtaaaacaaaacagacataaaaagtcatacaaaacaaacagatagtgaattataagactaacacccactcagattaagaaatagatatttgtgaggtatcccagaacatgtcacctccctctctccaaaaataaccactatcctgactattatagtaatcacttccttatatttctttatatttttttactcaagtgtacatcctyagcactgtgtattcttattcactttaaaaaaaatttgttgtttttaatttccttttaatctactgattttccctccatcccttgctcttgcttataatttatttgttgaagatccttggtggtttgacctgtagaatttcccactatctatattttgctgattgtgtattcatggtgcacatgagtacaccatgagcacctgtttctctgtcctctgtgttacctgaagatcacagcctgt

SEQ ID NO: 23772 - DNA, 549 bp, Homo sapiens
ggaaagtaggttacagcagggaaagaatcctaaagcagtttcagctgaaatcctgccttggcctgatcccacagggagctctaggatgtgagtggcaccacagagttcgtttgagtcaagagggctgagcatttatatcagtttgcatactgcctcctgtggacaaagggaattctttttttttttttttttttttttaagacagagtctcgctctgtcgcccaggctggagtgcagtggtgcaatcttggctcactgcaacctctgccttcygggttcaagcaattctcctgcctcagcctcctgagtagctgggactacaggtgcccgccaccatgcccggttaattttttgtatttttagtagagacggggtttcaccgtgttagccaggatggtcttgatctcctgacctcgtgatccacccgccttggcctcccaaagtgctgggattacaggcgtgagccaccgcgtccagccgacaaagggaattcttacgaagccattagccaacattctcagcagttggggtaagaggcaactgggcagg

SEQ ID NO: 23773 - DNA, 526 bp, Homo sapiens
tggcaaataaaaagcttaagcagccaagtgataagaataattaaatgtgctaactttttggcttggttactaccctccttaaaggttaaaagaaagctatgctggataaagtatgtgtaaaaggtaggccctcagctaacgtagacttgcttctttttcaaagctatccatgctgaatcctggcatagggaatgctttttcatcctattccttaatgggatctaccctgaacttagtattttagctaagaaatagtagctaagttaaaaaagaccacctrtttaatgaaatcagtcttccaaatacatattcatggaatttagctggctactttgaaaaccatttgtaaaaaataaaattttttaatcaccgttttaagagtgtctgcctttgtacaccacaaagagagggagaactgaatcattagaaccttttacaattagtttaaatttatgtcataagacttacctttgcttaaggtgctcttcctgtccatcttgtcttaattgcacttttacctacaact

SEQ ID NO: 23774 - DNA, 1163 bp, Homo sapiens
cagagtgagactccatctcaaaaataaataaataaatctcactactggatctccattcattccttcaatgatcaagtgtctttcagggacctcgcacactgctggtgttctaccaggcgcttggggtcgagggctgaacacaaaattgttcctgttctgaaggtagttaggagtgttgctgccagatgaacacaggaagacagctgtaccgtaagattacactataggcggtggtasacatgtagttacatacagaatgggcacgaggaagacagcagccagatccaacgtactgtcaagtgaagcttcctaggagatcacaggggagtagaatcacgaaagataagcagaatgatctgatgtctgaaggatattcctagcaagaggcctggcatgggcaaaggaggcacagaaaagtctcgtagaaactacaaagagaatgaaaatgccgggtgtaaggcgtgtgtgggagagggagagagcgtaccagccacgggtagaagtgattttttttttccctgtaggaaatgcagactcccacctcacggtatttacggaggggaactacagatgatctgatgtggaaaaaaggtgggagccaccggaagggaggatagcaggagctaaattatcacatgattctaatcctcaatgtaagctagtgctcaaaattaaaacagcaagagaaatgcagagaaggggttccacagatgcagaacagggcttggcctccttcacccatcccatcccctctctcaatgaattaaagacccccatttaaacatcttcaatttatacctattagaaaatatgaggatgtatataaaatatatatataacatatagatattatctatttatatattatatagagatatatatagagagaaagagagattttctattttggagagggtgttccactcttgtcacgcaggctggagtgcaatggtgccaccttggctcaccgcaacctctgcctgctgggttcaagcaattctcttgcctcagcctcctgagtagctgggattacaggcttgtgccaccacacctggctaattttgtatttttagtagagacagggtttctccacgttggtcaggctggtctcgaactcctgacctcaggtgatccacctgtctcagcctcccaaagtgctggga

SEQ ID NO: 23775 - DNA, 1163 bp, Homo sapiens
cagagtgagactccatctcaaaaataaataaataaatctcactactggatctccattcattccttcaatgatcaagtgtctttcagggacctcgcacactgctggtgttctaccaggcgcttggggtcgagggctgaacacaaaattgttcctgttctgaaggtagttaggagtgttgctgccagatgaacacaggaagacagctgtaccgtaagattacactataggcggtggtagacatgtagttacatacagaatgggcacgaggaagacagcagccagatccaacgtactgtcaagtgaagcttcctaggagatcacaggggagtagaatcacgaaagataarcagaatgatctgatgtctgaaggatattcctagcaagaggcctggcatgggcaaaggaggcacagaaaagtctcgtagaaactacaaagagaatgaaaatgccgggtgtaaggcgtgtgtgggagagggagagagcgtaccagccacgggtagaagtgattttttttttccctgtaggaaatgcagactcccacctcacggtatttacggaggggaactacagatgatctgatgtggaaaaaaggtgggagccaccggaagggaggatagcaggagctaaattatcacatgattctaatcctcaatgtaagctagtgctcaaaattaaaacagcaagagaaatgcagagaaggggttccacagatgcagaacagggcttggcctccttcacccatcccatcccctctctcaatgaattaaagacccccatttaaacatcttcaatttatacctattagaaaatatgaggatgtatataaaatatatatataacatatagatattatctatttatatattatatagagatatatatagagagaaagagagattttctattttggagagggtgttccactcttgtcacgcaggctggagtgcaatggtgccaccttggctcaccgcaacctctgcctgctgggttcaagcaattctcttgcctcagcctcctgagtagctgggattacaggcttgtgccaccacacctggctaattttgtatttttagtagagacagggtttctccacgttggtcaggctggtctcgaactcctgacctcaggtgatccacctgtctcagcctcccaaagtgctggga

SEQ ID NO: 23776 - DNA, 1163 bp, Homo sapiens
cagagtgagactccatctcaaaaataaataaataaatctcactactggatctccattcattccttcaatgatcaagtgtctttcagggacctcgcacactgctggtgttctaccaggcgcttggggtcgagggctgaacacaaaattgttcctgttctgaaggtagttaggagtgttgctgccagatgaacacaggaagacagctgtaccgtaagattacactataggcggtggtagacatgtagttacatacagaatgggcacgaggaagacagcagccagatccaacgtactgtcaagtgaagcttcctaggagatcacaggggagtagaatcacgaaagataagcagaatgatctgatgtctgaaggatattcctagcaagaggcctggcatgggcaaaggaggcacagaaaagtctcgtagaaactacaamgagaatgaaaatgccgggtgtaaggcgtgtgtgggagagggagagagcgtaccagccacgggtagaagtgattttttttttccctgtaggaaatgcagactcccacctcacggtatttacggaggggaactacagatgatctgatgtggaaaaaaggtgggagccaccggaagggaggatagcaggagctaaattatcacatgattctaatcctcaatgtaagctagtgctcaaaattaaaacagcaagagaaatgcagagaaggggttccacagatgcagaacagggcttggcctccttcacccatcccatcccctctctcaatgaattaaagacccccatttaaacatcttcaatttatacctattagaaaatatgaggatgtatataaaatatatatataacatatagatattatctatttatatattatatagagatatatatagagagaaagagagattttctattttggagagggtgttccactcttgtcacgcaggctggagtgcaatggtgccaccttggctcaccgcaacctctgcctgctgggttcaagcaattctcttgcctcagcctcctgagtagctgggattacaggcttgtgccaccacacctggctaattttgtatttttagtagagacagggtttctccacgttggtcaggctggtctcgaactcctgacctcaggtgatccacctgtctcagcctcccaaagtgctggga

SEQ ID NO: 23777 - DNA, 571 bp, Homo sapiens
tgcagttttgcccaccaaagtatggaggaagaactccaaatactgagcctttagaaggagcctatcacaatcaagaagctttgatttagtacttgaaatgatagtgaaaggtccttatgttggcagtatctgctgggaaagttgctatcttccacatatttttccagagaaaccaggcaggaactacagaaatatagattactttcaatatcaaagtcacttttaggcttctataacatagcttccagaaagtgattttatttcaacaatatctacttggaatatttttagtrtgtccaagaaaacgtggtatcaacttctgaaagaaaaatgtaattttttcataagacataggatttataaatatatcactcacattttaaaacaacaaagtgcttaaataattctccaaatttactacaaacagtctaaggcacaggccaatatgataacacatataaggttgaaggttggattttctagaggcagaagtggagtcaaggattaaagtccccatgacttcaggtggaagtacaattgaaacagctttcaaaggaatgaggcaaacaag

SEQ ID NO: 23778 - DNA, 622 bp, Homo sapiens
gaacaaaaaaccaaacactgcatattctcactcataggtgggaattgaacaatgagatcacatggacacaggaaggggaacatcacactctggggactgttgtggggtggggggaggggggagggatagcattgggagatatacctaatgctagatgacgagttagtgggtgcagcacaccagcatggcacatgtataygtatgtaactaacctgcacaatgtgcacatgtaccctaaaacttaaagtatagtaaaaaaaaaaaatcctgcttgatggtttgcagtcataagagaataactgacacttgacaagccttcttaccataatcaatcagaaaattagaagactatatgaataatctttttacttatggaaaacaggaatcacaataatgtactctctgcacaaagggataaagataaagtgaagttttaaattaccacatattattaactaaagacactttccaggcaataacatactatggtggtttaactaatttgaggagttagaaattatacaaagattttaaaaagctaaggcagctacaaactatagagaataataccaggaaaatatggcattatatacaggaagaagtccatgcttctaaaatggca

SEQ ID NO: 23779 - DNA, 629 bp, Homo sapiens
tcttacaattaagtgtattatttcctataacctgatttttcacaaatttccagttcatgaaatcacattcaacraagtggtgaaatagtaacaaagcaaataagtaggggccatttgttgtgaagaagtaacatccaggataaccaccagttctaaataatgcaaatatagtttcacaagtgtatgagtatgaacctcaaaaaaaatatgaaaaataaaatttgtgacaacttatctatgaaaagggaaaaaaacgactgctttaccactgcgtttaactcctaaagtgctactgagtgcattccaacacaagtcatttagctaacatttaaactaaaatttggcagaaaaataattttcttatatgcctacataatacatggctagaatgaaaacaaacgtgtcacacttctggatccttctcagccagaatcatatgggatggcggcggggagggtactgaaactgtctgagttcttctggctctatcattacagaactcaatgaataggctcagtcaggatttccagaggaaacacctattttcatcccagtctctctggaataaatacttttgaaagtgttccaatttgcacttaaaccacttttaaaattactaacaacttcct

SEQ ID NO: 23780 - DNA, 1127 bp, Homo sapiens
agatcagtatgactccagagcttgtattcttaagagttttcagaatatcttccatgtatatgttccagtcatacctcacaacagacattacagaacagtagagctgaatatttcatgcaattgtgtaaagaacaccaattctaaaaattatcattaggtatcccattcattttttttaattgtcaagtaagattagataataaaccaatacaattttctttactgaagtttttcatgattgggctgtgactcttcacaagagagctgtatagctagtggtattatctaaactgatgaattgtggggtccccttgaagaaggcccaagccccaatagagatgaaaatgttctaaatgaggctgtagagaatcagacaattgaaggacatttctagcagactgacttggtaaatattatagttaatacctgcagattgacattgcattctattaatgttcagtaaaacggttatatatcatagttcattcaaatatattttactctttgcaatttgtagagtatactgaaagatattttcatggatgatgttcaatattcttactagtaaatgcatattgtaagtaactttacagagagaatgtctaatcagagactaaactgacttcacatagacagtaggaagaagtccatgaagtggatttgagtcctctccttgctatgtagtttattttttcatttacaaaatgaataatacttatatcaaaaaagcaatgatgtaaataaaatttttatgctagacatacatatgacagaaggtggttattaattttagtaaaagcagaggtcagaggtctgtgcttttttagactagtaattgatatctcctctcaaggatagccctggagcttcctacacacacacacacacacacacacacacacacacacacacacaaaacaaaaaacaaaaaacaaaaaamacacctaagcattgactggtcttggaactgctcaaattcccttgacttcctaatttactcaaataagtcatcttctctaatggaactttaaaattgagagtggttcactatgctatggaggagtgaggccagcaggagacagccattcattcgtccaagtgggtgaatagggaagagtctgggctca

SEQ ID NO: 23781 - DNA, 619 bp, Homo sapiens
taattaatcagggtattctcatccaccaagccttagaacataactatctcgaaaaccactgcttttatataggagttgtctaagagagaaaaacttatttctcatttctcaaatcctataaatcttttggcccaractctaaatcataagcaggttcatactttggaaagggcttgaggctttttaagagttgcctagattcctctgaggtttcaagactgttttgtaacattactgtcatgtatttgttctgcccttgtaacttttctcaagaactttattttcatttattgttcatctattttcccccatcccaacactttcaggtcaacagaagagagagttgagctggctcatctttatcatctttagtcatacaactaactacaagccaagcttaaacttgtacacagatcccttgactcctagtctatttctcgggaatggcggacagagcagggcagaaaaatgagggaaggatgacagaagctcatcagaaagccagtaatacataagattagttttgtcagcaaaacctagtaaactttgacgttaaaagacaaatattttgatctctcattcccactctcaaaaaggtttctagttcatattgttttgc

SEQ ID NO: 23782 - DNA, 619 bp, Homo sapiens
taattaatcagggtattctcatccaccaagccttagaacataactatctcgaaaaccactgcttttatataggagttgtctaagagagaaaaacttatttctcatttctcaaatcctataaatcttttggcccagactctaaatcataagcaggttcatactttggaaagggcttgaggctttttaagagttgcctagattcctctgaggtttcaagactgttttgtaacattactgtcatgtatttgttctgcccttgtaacttttctcaagaactttattttcatttattgttcatctattttcccccatcccaacactttcaggtcaacagaagagagagttgagctggctcatctttatcatctttagtcatacaactaactacaagccaagcttaaacttgtacacagatcccttgactcctagtctatttctcgggaatggcggacagagcagggcagaaaaatgagggaaggatgacrgaagctcatcagaaagccagtaatacataagattagttttgtcagcaaaacctagtaaactttgacgttaaaagacaaatattttgatctctcattcccactctcaaaaaggtttctagttcatattgttttgc

SEQ ID NO: 23783 - DNA, 564 bp, Homo sapiens
ttttttttttttttttttgagacggagtctcgctctgtcgcccaggctggagtgcagtggcgggatctcggctcactgcaagctccgcctcccgggttcacgccattctcctgcctcagcctcccgagtagctgggactacaggcgcccgccacyacgcccggctaattttttgtatttttagtagagacggggtttcaccgttttagccgggatggtctcgatctcctgacctcgtgatccgcccgcctcggcctcccaaagttctgggattacaggcgtgagaatgctttgttaatcaggatacttttattctgaaaaaaagtgtacagcagagatggtggagacttaaagctttgcatgcccctcaggataatgaaggaagaagagatggcgggcaaaagtgtaagactctggacccccttttgcaagtttatacgttctaaggcagaaacaatctgctgtttgcaattgacactgagctgtgaaatgtttttgctagtagcagtgtatttcttgaggcacagtagaaacccaaccaatctatattcaagtctaagaggag

SEQ ID NO: 23784 - DNA, 564 bp, Homo sapiens
ttttttttttttttttttgagacggagtctcgctctgtcgcccaggctggagtgcagtggcgggatctcggctcactgcaagctccgcctcccgggttcacgccattctcctgcctcagcctcccgagtagctgggactacaggcgcccgccaccacgcccggctaattttttgtatttttagtagagacggggtttcaccgttttagccgggatggtctcgatctcctgacctcgtgatccgcccgcctcggcctcccaaagtkctgggattacaggcgtgagaatgctttgttaatcaggatacttttattctgaaaaaaagtgtacagcagagatggtggagacttaaagctttgcatgcccctcaggataatgaaggaagaagagatggcgggcaaaagtgtaagactctggacccccttttgcaagtttatacgttctaaggcagaaacaatctgctgtttgcaattgacactgagctgtgaaatgtttttgctagtagcagtgtatttcttgaggcacagtagaaacccaaccaatctatattcaagtctaagaggag

SEQ ID NO: 23785 - DNA, 541 bp, Homo sapiens
tggacaaccgcacagggataggtatgggacattctttattcctttggcccagacagctttgatgagcctggtatcaatgcgcacatctggagttcccatctctttcatggcaaatttctggatctctgtgagtgcctgaggggcatgctgcttgaagcccactccaggaagctcttgggattgttgatggtgcattctcgggtcaccacctcgttgatggtagaacggcctttcttctcaccaccctcttcgcaggagccattttaccgcacccaagttggaaaggctcaatttctttatgattataggataaatgattatttccgttttccttgagtcactctggtaagtttttttctttcccargaaatttgtggcagggcacagtgtctcatatctgtagtcccagcactttgggagactgaggcagatggatcccttgagcccaggagtttgagtccagcctgggcaacatggtgaaaccctatctctacaaaaaatacaaaaattttagctgagcgtggtggtacatgcctgtagt

SEQ ID NO: 23786 - DNA, 580 bp, Homo sapiens
aagtcagaggatgcagccaaactcttctccacgtcgggaagtggtgggaatgcggcttctaagttcacggtggtttgcctgaggtcctgcagagtcctcagaacccaggtgtcctggctcgctgtcacattcacccgagaatccagggagtctgggagagctgctcttcccagaaagagcatcacatttacatcacttaggacctgggcctggggctggggctatagactgaaagggaaatgcagtgaaacaaatctcgtaggaccccctaccccctaaatgactccactggtcattgagatgaaaaagcctcagaattctttcagctctcttctaggatcttccttttgaatgcaaaggaagactggraactctccacagagtaaaatgtgggtctccatctcaatgcccagagacaaaagccaaaaaatgtgaagaatttccaaagagcctccttcaaacggcatctccccccacctctggctgtgctccacaggcgccgtggatgggaatggcgactttcttctttgggcccggcttggacagttgcccactcactaaaagcctgtatgaggagaaa

SEQ ID NO: 23787 - DNA, 1134 bp, Homo sapiens
ctggaatcccagtggtcccattccccagcmtccctctctagatgtttacaagccaggtgatgggctcggtgttggagagagaaacattggctcccctagaaagggaacacggtggtcccaggactccacagtcaggtcttggccagtcttgggtggaaaacccaaacccagagcgtctactaggtggattagggacaaagactgcaaatcccgatgtatctgtgaggccaaccctgggtcttggcattgggtgggcaggcccctcgtcagcctcaggatctgtgtcagggtctgtatcagcagcggcacctgcaggaagcagctgcacctcccatcacctctcaggcccagaaggtacagaacattgtaccccgagatgttagccggtgggaagaggaagggaagatggtggaaatggattccatgttagccgctgggaagaggaagggaagatggtggaaatggattccgaggaaagccagctctgcctgagggggatcttatcagagctggggccagggcctattgctctgcagacagtgggagttcagcaaacaacagcgacaattaacatgtattgagtatccagtgttgttatctgacagacacacctctacatgctttgtaaaatatctctttatccttgtaacaatcctctgattcttaattggttttatttttaacaggtcaagtcactgaggtgcagagacactgccttcctgtcctaaagtccagttcaggccagctctctccagagttccaggcttttggtctccgtctgcagatctcctttgctttgaatgagtctgtccctgaggagggctaggagcaaccttgagaaggaacatgatggtcactaattcagccagaacactctcaaggtgcattctgagcgaggctgatgccaggtgcagaacaaacacctcttgcgcctgggagcttcctgaagtttggagaatgtgtcagatatcacctgtttgcccctgggggcctagccccacccctgtctgcatttcgtgcagactacactggggcctccgttgccctccgtttggccagcaggaagctctggcaaaagatcagtgggatagaggaagatgctttggggatttatttttcccgctccctctctgg

SEQ ID NO: 23788 - DNA, 1136 bp, Homo sapiens
cccatttttaaaccctctccttgaaaacaaacgtcataatgtaagaaaagagaacaagaggagttttaacaggaaacacatgttccttctgggctccttactgcagggctgtgcatgaaatcgggatcaagagctctttgctcaggaggcagatccctcacgaggcccaaagctgtgcggacacctccatcctctcagtgggaggaaactggcaaatgcacaggcggcgcagccaaggtgcagacgctccaccaagcttggcaggggacagccaatcctaggaatttcccttctgctgaaaaggcagcaatctttcctagggcgaacaaacagaatgtggttacaggtgtggagtcccggtgtgttctccctgtgtcttcgtctcttccttcccagctacaggcctagacaagccaggcggttggggaggttcctgcagatcaggggccaggaggatggatgttgagaacagctgcctcaggaagactgcctgggaggcacacacaccctcactctggtgctttcagatgcatgcaagtagctgctgggtgcaaagcaagcagatggccaaaaccagggctgctcctgcccatttctaaataactgactgtcatctgctattgttgctactgtgggggcactgtcaggggcaccagatgtccaggggtcagcaccatgattcctcgtgtgaagaaatgggtcctaaggttcttaaagtgtccaggggtcaagaccctgattcctccttatgtgaagaaatgggtcctaaggttcttcaagtgtccagggggcagcaccctgattcctcctcatgtgaagaaatgggtcctaaggttctttaagtgtccagggggcagcaccctgattcctcatgtgaagaaatgggtcctaaggttctttaagtgtccagggggcagcaccctgattcctcctcatgtgaagaaatgggtcctaaggttaagtgtccaggggtcaagaccctgattcctcctcatgtgaagaaatgggtcctaaggttctttaagtgtcccaggggtcagcaccctgattcctcctcatgtgaagaaatgggtcctaaggttctttaagtgtccaggggycagcaccctgattcctcctcacgtgaagaaatggat

SEQ ID NO: 23789 - DNA, 1136 bp, Homo sapiens
cccatttttaaaccctctccttgaaaacaaacgtcataatgtaagaaaagagaacaagaggagttttaacaggaaacacatgttccttctgggctccttactgcagggctgtgcatgaaatcgggatcaagagctctttgctcaggaggcagatccctcacgaggcccaaagctgtgcggacacctccatcctctcagtgggaggaaactggcaaatgcacaggcggcgcagccaaggtgcagacgctccaccaagcttggcaggggacagccaatcctaggaatttcccttctgctgaaaaggcagcaatctttcctagggcgaacaaacagaatgtggttacaggtgtggagtcccggtgtgttctccctgtgtcttcgtctcttccttcccagctacaggcctagacaagccaggcggttggggaggttcctgcagatcaggggccaggaggatggatgttgagaacagctgcctcaggaagactgcctgggaggcacacacaccctcactctggtgctttcagatgcatgcaagtagctgctgggtgcaaagcaagcagatggccaaaaccagggctgctcctgcccatttctaaataactgactgtcatctgctattgttgctactgtgggggcactgtcaggggcaccagatgtccaggggtcagcaccatgattcctcgtgtgaagaaatgggtcctaaggttcttaaagtgtccaggggtcaagaccctgattcctccttatgtgaagaaatgggtcctaaggttcttcaagtgtccagggggcagcaccctgattcctcctcatgtgaagaaatgggtcctaaggttctttaagtgtccagggggcagcaccctgattcctcatgtgaagaaatgggtcctaaggttctttaagtgtccagggggcagcaccctgattcctcctcatgtgaagaaatgggtcctaaggttaagtgtccaggggtcaagaccctgattcctcctcatgtgaagaaatgggtcctaaggttctttaagtgtcccaggggtcagcaccctgattcctcctcatgtgaagaaatgggtcctaaggttctttaagtgtccaggggtmagcaccctgattcctcctcacgtgaagaaatggat

SEQ ID NO: 23790 - DNA, 534 bp, Homo sapiens
tgggctttggtttatttttactactacacttgctatcgaaaccaagcaggtgacttcatttctcttggattcagctttctcatgtgtcaggatgggagaggaagggaggcgttgggataagtgtcattccactgtctgtacttcaaatctggctaacacgtgtggcaaatacttagatttgttgacagaggtttcctggagtgctgtcttgaacgattctgaacaggctcagcaagaaagtrtgtttcagttttaggtgtatctgtcatggagaaggaagtaaggactggggagcactcacagcattcctggggcattcctgtccattatttcaatacctggtgctgatgtttcctgtctcttgtcaggaatcctgtctactgtgtgtctgatgacatgaacttactgagtgctgcttagttgcatcatagacaccacctgtctttgaacagctaccctgactcttgatggaatgcaaaggctgccgagggccactggtgtgtggaatggccttcggtcatttctgcttagaac

SEQ ID NO: 23791 - DNA, 516 bp, Homo sapiens
gtcctgaaaagccatacaaaattacacatatatatgtctctgtgtgtatatatgtatacatgtataaaaacatatatacatatatacatacatatatacacatatakgcatgcatatacatatatacacatatgtatatatacatacatatatgtaatgaggttgcaattttaacctctcatttgaaatagatgtgtgtatcttcatctaagagtaatttcaccattgtagacctcaactgatcaataataaaaagaaaatatttctgatgagagatttttttcattcaactgagaagaaaactcttcaccattctgatcctagtatgaatcctgagtaaaaaactatgtcaaaaggaaagtgcttctttaaggacagaattgatggaggaaaaagtcccccatgccatctgatgacttaacaacattaaaatgaaagattttcgtgtacttctctctgtaaactcagcaattaatggtcatttttaacaacctgcgaatcatgtgtcttcaggtc

SEQ ID NO: 23792 - DNA, 1222 bp, Homo sapiens
gtgtgcaccctgccatgctgcgtgtgtgtctgtgacctcactttcagtccctttcaattggggcagcttgtcttgagaatggtcattaaacaaagcattgggttatccttccattttttcttctgctattattttaccttcccatctagttttattgtcctaatccgggtaattttcctcagcatctttatcctaatttttttctcttgaatttatttctttagcttcttggatgtccactacttcaccccctccttccatttgagcaatgaaaaaaagaacaaaacgctttaaattgaagttattccatgaaatatgggatgacatatttcccctgaatgtcataaagatcaacctttatgaagctattacagctccactataatctagccatattgccatccaagttgtagataaccaaccatgccattaaaacagttagtttaggaggttttggcaaactggatagacttagggagccataaaatttggtaaactgcctcctatccttaggcccatgtcggtgggaaggaaaaccttcaacagcccaggccmtttgggctggaagcaactttctggcttagatccaccctcctctcctctcagtggggtaaaacgagtgagttttctgaagtaaacatcttcctttgggaacagaaaaagaaaaaaaagtagaaaaagtgttttcagataatgaacagaagtttgccatcaacttgatgcgtgtcggattctccaaagatgagctatgtgcagcaaactcccttctttcaagtcctgtttatggttggttaaataagcagtggtgtgatctgtcacctccgctctccagccggtgagcggagggaacaacaagccaatctgatgtgaaatgatttggacagtaagtaaataaatcccaccttgataagcgggactccgctagctctcccacgggccctaaacattttgattaagggctgatgagggcttcccaggggaaggccagagacgcatcttgcctggaggtccctgcaaacagaaccacatcctatctgttggggatagtttaggtggaagagggtaagtgggcaaatgagtgaaccaggtgacctttttaggtttcttccacccaggaggcttggaaacaataccacatcagagcaagtaacccaactttggagtatggatcaagtataggacttgcaccaaatttctgctcactgcattgatgaatagatag

SEQ ID NO: 23793 - DNA, 637 bp, Homo sapiens
tgtagcaaagctttaaaggtgccacagcagaaatacccatggtgcatttgtttttgtttaattttgttttgagacggggtctctccctgttgtccaggttggagtacagtggtgcaatcatggctaagtgcagctttgaattcctgggctcaagtgatcctcgtacctcaccctcctgagtggctgggactacaggcacgtgccaccacccccagctaattttttacttatctgtagagactgggtctcaccatgttgcccaggttggtcttgagctcctggcctcaagcgatcctcccatctcagcttcccaggctgctgggactataggtgtgggccatcatgcccsgtccccatagtgcatttgtttaaaactctaggccatgggatccatgtggaccaaagagctaagaggagaaatggctggcatagacaaggaaccacagcagttagttgagtactgctggaatgctcttgcgggagaagacaagccttgtgtgccatgctctcattaggtcattgtcccgtaagtgaagaaacccttgaaagacttcttcattataaaccataattaataaactatctcagtaagtatcacaacccctcacttatcagagtttagatgtctactaatcta

SEQ ID NO: 23794 - DNA, 640 bp, Homo sapiens
tgcacatcatcttcccaggaaggcagggccttctcatgactttgagatgggggacacagaattggaagcacccagcgaagatcagaacggccctctcaccacgcccttccacctgtcgccttccggaggtggctgtgccctcagtgccttccctcacgctgacccagggtgactggtccaagaagcctgagtctggctgggggagaagcacacagctggaaaataagcacacgtggccacatcccctcgcctcacccagtccacaccacactaagacctgcgtggtctgggagaagccctgtacggggtgctcagttccctgagataaaaatgccaagactctgccttcagggacctcgtccagtaaggaaagaccagaaaacacagtcaccacaccccagagaagctcctaacagggaggagggagctggccatggagcgctgaggacaggcacctaagcctgccctggcttgggtaccaagatgcgaaggcttcagctggctgggtagcaggactgctggggtccagaggtgggaggggccttaaggaaggcctcccaggtaggggctgggccctgaggctgggcrggattggtccccaggaggaagctcctcatagctccctgggagcaccttgctc

SEQ ID NO: 23795 - DNA, 1660 bp, Homo sapiens
caactctcagattctggtttcagttttaatccctttggctggtctctcttcctctctaggcctgtattttactgtctgtaaaaggaaatgttttgaaataaaccagcggttcttctccaggcacagagacaggaggcatgtccatctggggtagaggtgacttttcagactataatgttctaggccacccagtcatcccttggagatcctgatatgcccctcgagcgatgggaacctccaggttaagattcactgtstctgaccagagacggtcctgatgggagtcattgtgcagggaaatggtttggaaacagacacatgaaaaagcttgaaaatctaccatgtgatctggatgggccctctgggcaggcgctctctgagaaaaaaagattggatgggagtgaggagacccaagttctggaacagttttgtgacatctttgtaggtagctgtgaatgggtccattcacatagcctgtgttcttatctctaagcaaggaataaagcaccacctgctcgcagcgagatgctcctagggagaatgctttgtgccctgcaggtgctgcacaagcaagaggccagattccagtgcctgtaacctgtggtcccaagaagtgagcagcagagtggccgagaaaagtgtccatgtgttcaggctcacctgcattctcccagctttgcagagactgctcccttaccgtccccctcaccaccctagtctttatcacctttcagaccttggaatatccttgaagctcactcagatgtcccctcccagaggatgcttctgacccccaatctgacccccaacccttgctgtagaatgcctctcttgaaggcaaagggatagcagagactttttagggacacccttcttatgggtgggagaagcctgggtatcccactccctcttcctcaaaccctgtcttatgagtaggcagtcagaaaatgaagggagtcacgtgttttactgctgggatccagccatgctttaaaggacttgtgttcaacccaacacaggtgggcacaaatgtgatttagggaaagcaacaaatagggttctggttctgaataatatggagcaagcaaactccaccttgtccctcccactgaaagcaattataaaacctagacagaatgcagggagcaattacagcagaagacttcagaacatctctctcagtagagatagaaccagtagacgaaatcagcaagcatatttgaagagctacacaaacatcaaccaactggagctaaatgacatttatagagttatagagtacttcacccaacaacaggaggaaacacattcttttcaagtacacatggaacatccaccgagaaataccatatactggctcactaaaaaagaaccataacaaatgtaagagcatggaaatcatacaaggtacattctttgatcataaagaaattaaaatagaaatcaataacagaaagataaaaggaaaaactccaatttggaaattaaacaatgcacttataaataatccatagtcaatgaagaagtatcagggagatcagaaaatatttttaactgaacataaatgaaaatacaacatgccaaaatttgtgctatgcagctgaagtagtgcttagaggaaagcttacagcattaaatattaatataagaaaaaaagaga

SEQ ID NO: 23796 - DNA, 593 bp, Homo sapiens
tcccagtcattttattaggttagcatcaccctgatgttaaaaccagattttagaaacattaaaaagcaaaaccagagatcaatatccttcataaacatagatacaaaagtcttcaaaaaatatttgcaaattgaatccagcaatattttaaaagaataaagcacagaaaccaagaggtttttactccagaaacacaaggctggtttgatattcaaaaatcaaggggccagacacagtggcttatgcctgtaatcccagcacttcaggaggctgggggattcgcttgagcctgagagttcaagaccagcctgtgcagcagaaggagaccccatctctacataaaattaaaaatcagctgggtgctgtcatatgcacctgtagtcccagctacttcgggggttgagatgggaggatcatttgaggccaggagatcaaggcttcaacgagccattattgtgccactgcactccagcctgggcaacagaragaccccatctaaaaaaaaaaaaaaaaaaaaaaaaaaaaaaaaaaaaaaaaaggatgttagttagggttttgctctcacctgtgggtggtaggtggggtggggaagg

SEQ ID NO: 23797 - DNA, 1192 bp, Homo sapiens
attgccatagaagtagtgtgatcttttggaggtgtcaaagcactctttttacactgctggagttactgagctgattccttctcttctaaagaaaccgtcattttctttctttctttttttttttttgaaattgctattgtttgcaagggactttatatttattttttcctcccttgaaggtgtgactgtagtacatattttgtatgatcatttggcttctgggtgcttttagacaaccgaggctctgtatgaattcattggttatagatagcttttgtgtggtggctttctcaaattctgcttgttgtagctatacattgggcatatgagccaattcactctcttctaggaggccaggaatacagggatctcaggtagctgatgtcctccctagcactgtgtccttctgtcagccactttttgttttgttttggtttttgttttgtttttggtgaagtttggtctccagtaggtggtgccagagccagtttccctttggatattgagatgatgtgtggaagcacctgccctaatgaagctcatggagggagtttgtggtgggatgcactgaggtttccagggtggtaaagagagggctgcaccagctccccatcctgggaagtcaggaatatgatccacttccatatcatgcccctatctcagggttcatggccttcagttcagatagtcactgtcctttatctccaggccacaatgcaacttaggtctgtgagaaatgcctgtctggtggctactgatgaaatgacctttcagcagaacctcttcccccaacaccaaacagatgactcygcagttagttggtttacactgttttgcagtgatgctgccactctgtgtagaaaggcagaaattagccccgttctatgtacaagcctaagcagtgggcacaccttcactgaggacacagctatcccaaaaaatgctggaaggaggacacttacggcaacctccaacaggaaaggccttggctacctctgcagcagtgtacgggacagtgggagatccatttctggccactagggtcacctatccactagggcagaacagtgccccctttggagatcagcactgttacctgcatttcctctgttccgaggagcgctttggcagtctgcattccccctctctccctctctctagggtcagcacactcgaaggactatacctctag

SEQ ID NO: 23798 - DNA, 558 bp, Homo sapiens
gcaatcacagcttaaagtttaatggaactcttactgtgtacccagttgaagtgttttcccctgagaatacatccacattacttaaagttacagagacagaaaggaaaaattctgcaatcgggcccttgggaagtacgtaaagctacttctacttctatcatttggtctctggatttatatattcctatccactgggaacaaagcaccatataatagtcattggtttagagtgtagattgaatgctggagaatggtaccccgtccaagcaaaatattctctctaatctggcctcctcaaaaggccatcccagagctttctcaggtagacagccttggcatcatcttgagcacatttctacatctgcttttctgtgargaaggtctctaggtctgagattatcttaggtgttatgctatgccatttgaataaacactctgtaagccttctgataatggagctggctaaagctttgtgtgcagaaaatgcagacccatacctggaaaatgtatctatttcagataagaagaaaggctacttctgccaggatagaaagtgtc

SEQ ID NO: 23799 - DNA, 1145 bp, Homo sapiens
atatagaaatttctattatattgaaataacagatagtaaattaatataatttctgtccaagctgcaactgcttwaaaaaaatcccaaccctatttaaggtttaagaacccctctaattaagattgggtaaaacacagagatgatgaattctgaacattaatttctttgaagtttaaatctcaagggcaagtggatttgacttcagacactaactgctttggacttaatttgcatggggttttaatctttgcactttaattttccctgggaatttgatcatgggagagagggtctttgtgtttactgtattttattattaaagtattttaatggtgccaggtcgtctcattgcaagctctctgaaatgtgagattggacaatgctactgaaaatcattgttatggaaaatagaccaggggattaattttcagatttgaagtttctttaattaaggtactatttgtggtggttataaaacagggcctgttttatgtcttgtcctagcagcgtctctcctatgcagggcttcatcctggaagggtgctaggttggttttcagcactgacccaaaggggctagaacattccagcaccatccaatcttcccacaattcccttggtttcacctgcaaaatagagcccatgaagttcctctctgattttgactgctatcctcagatgggccctctaagatttcactcactaagtgggactccttccttcctgggcatgttttggtaacttggcttttggctttgttttatttagctccctctgcctcctcccacctgtgaatcttgttgctctcatgacatctccctgtatgtgtatatttgagggctcataaacttgctattgatgttgtttgcaggttttaggttttgcgatccaagttactgtatctgtgtttgtggcaagttttggggctattaaaaaactgtgccactgccaactgcccagaattccttttactttttttcttaatccctttatgtagcagagataattatatcctcccacatccttttttgtatttcctttacagttgcctacccttccccaacaattaagcatggccatgtgacaagttctcactaatgaaacttgcatggaagtaacaggtgtcacttcagaacagtggccgtg

SEQ ID NO: 23800 - DNA, 2106 bp, Homo sapiens
gtcccacgtgggccaagatcttctttgggtgcagagggtcagtgcagacaaaggcacttggatcgcttgcgatggttcctctctctctaattatagaaagtatttagctattattccctaattgctcactgcagttgggtttgagcatttttttttttttctgacaaaaggctggtttctgatgagttgttcttttctttccgccttggttcactgccataccagtgcctggctcttccactggaaaactgcaggaggtggtatggtatttctggggaagccactttacctcatccaattgctttcatggcttcccagttgcctaataggaagggaattaacatttactgggcatctatttagtatgtgccaggcactgtgctaagtgctcacgtaggttgtcttattcaatccttgcagcaaacttsagaggcagatataattattccgaatttatagatgaagaatctaaggtgaaggtagtctcagtcagtatgtggctgagtcagaattcaaacccaggtctttgtgtgtgagtcctttttttttttttttttgagacatggtctcactctgtcactcaggctggagtgccgcggtgcaatcttggctcactgcagcttcaacctcctgggctcaaacaattctcctgcctcagcctcccaagtagctgggactacaggtgtgtgccaccacacatggttaatcttgttttattttttaatgagatgggctctcaccatgttgcccaggctggtcttgaacttctgggctcaagcaattctcctgctggagtcagtctgggcacagtggctgaggcttgtaatcccttcccaaaatgctgggattgtgagctactgtgcccagactgactccatgttttcctctctcaaaagtttttctagacttctggctgataaaacattggtgttggagactcccgctctcttgccctaaaagtgcttatttctaggtcctctgctagtggtagggcttggtggggatgcctataggacgcttaaaggagctctaggtttcctgttttggctcatgacacatgaaggaatttccagtgtcatggtagcaaggacgaggaggaaagccatcgctcctggggctgtagcagtaaggatcctatgggaaacagatggcacattcaggggtttacatgcagaacagaatattcaatgaatggactacttagcagagttatgggcagttaaaggaaccaacaagcaatggggaagctaccgggtactggcagcagcaggaagccatcaccacccctaggtttaaagggacatggtgtgagaatggtgttcctgaagcccattgacagctgggggtatggcagaagcatccagacaggagctgtgacaggagggaaacccagccactgcccgaacaccagcaggaagggcagcagcagctggtgtgtgagtgtgtatatatacagacatccaggtctctccctcctctgccttcccatctgctcatgctaccactggccaaacccagctagaagacagagagtaggggagcctagagatgcagctcttgcaggtcagcctcctgaggcacagggcaggaaggaagggtggagagagcacctgggaagatacagagagtgttcagcacaggggctgactcacctgtgccatccacagcagtgtcttttttttttttgagatagagtctctctctgttgcccaagctggagtgcggtgatgcaatctcagctcactgaaatctttgcctcccgggttcaagcgattcttctccctcagcctcccgaatagctgggactacataagtgcaccaccacacccagctaatttttgtatttttagtagagacggggttttgctatgttgcccaggctggtctcaaactcctggcctcaagtgatccaccctccttggcctcccaaagtgctaagattacaaatgtgagtcaccacacctggcccagtgtcatttttttggtgagtggagacatactctataggaagtgggacattgtttacaggctcaaagaatcatggaatgtgagagtgggaagtgcccttagagctctacctgtaaaattcctttactttataaagag

SEQ ID NO: 23801 - DNA, 2106 bp, Homo sapiens
gtcccacgtgggccaagatcttctttgggtgcagagggtcagtgcagacaaaggcacttggatcgcttgcgatggttcctctctctctaattatagaaagtatttagctattattccctaattgctcactgcagttgggtttgagcatttttttttttttctgacaaaaggctggtttctgatgagttgttcttttctttccgccttggttcactgccataccagtgcctggctcttccactggaaaactgcaggaggtggtatggtatttctggggaagccactttacctcatccaattgctttcatggcttcccagttgcctaataggaagggaattaacatttactgggcatctatttagtatgtgccaggcactgtgctaagtgctcacgtaggttgtcttattcaatccttgcagcaaacttcagaggcagatataattattccgaatttatagatgaagaatctaaggtgaaggtagtctcagtcagtatgtggctgagtcagaattcaaacccaggtctttgtgtgtgagtcctttttttttttttttttgagacatggtctcactctgtcactcaggctggagtgccgcggtgcaatcttggctcactgcagcttcaacctcctgggctcaaacaattctcctgcctcagcctcccaagtagctgggactacaggtgtgtgccaccacacatggttaatcttgttttattttttaatgagatgggctctcaccatgttgcccaggctggtcttgaacttctgggctcaagcaattctcctgctggagtcagtctgggcacagtggctgaggcttgtaatcccttcccaaaatgctgggattgtgagctactgtgcccagactgactccatgttttcctctctcaaaagtttttctagacttctggctgataaaacattggtgttggagactcccgctctcttgccctaaaagtgcttatttctaggtcctctgctagtggtagggcttggtggggatgcctataggacgcttaaaggagctctaggtttcctgttttggctcatgacacatgaaggaatttccagtgtcatggtagcaaggacgaggaggaaagccatcsctcctggggctgtagcagtaaggatcctatgggaaacagatggcacattcaggggtttacatgcagaacagaatattcaatgaatggactacttagcagagttatgggcagttaaaggaaccaacaagcaatggggaagctaccgggtactggcagcagcaggaagccatcaccacccctaggtttaaagggacatggtgtgagaatggtgttcctgaagcccattgacagctgggggtatggcagaagcatccagacaggagctgtgacaggagggaaacccagccactgcccgaacaccagcaggaagggcagcagcagctggtgtgtgagtgtgtatatatacagacatccaggtctctccctcctctgccttcccatctgctcatgctaccactggccaaacccagctagaagacagagagtaggggagcctagagatgcagctcttgcaggtcagcctcctgaggcacagggcaggaaggaagggtggagagagcacctgggaagatacagagagtgttcagcacaggggctgactcacctgtgccatccacagcagtgtcttttttttttttgagatagagtctctctctgttgcccaagctggagtgcggtgatgcaatctcagctcactgaaatctttgcctcccgggttcaagcgattcttctccctcagcctcccgaatagctgggactacataagtgcaccaccacacccagctaatttttgtatttttagtagagacggggttttgctatgttgcccaggctggtctcaaactcctggcctcaagtgatccaccctccttggcctcccaaagtgctaagattacaaatgtgagtcaccacacctggcccagtgtcatttttttggtgagtggagacatactctataggaagtgggacattgtttacaggctcaaagaatcatggaatgtgagagtgggaagtgcccttagagctctacctgtaaaattcctttactttataaagag

SEQ ID NO: 23802 - DNA, 619 bp, Homo sapiens
ccggaagcttgttatttggcaacaagctagagatagaaagagctattccagatggttccttctccctcattgccttcaaatcaaccaaattttgtcttatacccgcaaaaatatatttaatctatatatcagatatatattaacattctcaaattaaaggtaagaaaacaggtgaagagaaagaaatcagcaaaggaagtgctactggagttttccctgaaggaaagttgtctcttcagggttatgtggtattatcggaggggaggaggaggaggaggagcccaaatatgaaawccactttcatctctcttatcttttactttcccattattttccgtaattcctgaatttataaaatattagttttcttgtaaatatttaatagtttgatataggaatagacaaatggtacagttctctagtgaccacaaagcagtgatagataataagcaaaaagaaaatgatacatcttctgagggaaatatacatcttgagagcacataaccagaatttctatcacactgacattcataatcagaggttctaacatttaaatttatgttatagtgtgctataataaatttcagcacaatttaacaaatctaaacttaagatctat

SEQ ID NO: 23803 - DNA, 552 bp, Homo sapiens
ctaaggttagtattacacaaatgcacattttgtgttctgtaattgttttatgtctgtataccttgcacccctatcttccctgttgccaaagacagattttcttctgtgtacacaacccccaggacagagcaaggcaccaacagtaattcccaaaataattttttgattaaaacttttggagtcatactgtcatcagccagaaaaaaaaacatgcgtgaggagaatgaagggtgttaaaagagctcaagctgatgtcctraaaggattactttatctataaccttcctgaacactagccttttcctgttgagttcgcatggaaagtttttccacttaaaatggggcagcaaggctgggaactagtaggagtagcgtaacttctcggactctcccactgaaaagcatctttttcttaaaggcggagagcactttacagacggttactaaggtaaccggaaacagcaaaactgaggtggttctatctacggaagaaattctaagctccaaagttaaaatgcggagcagtggcgcatatcagcagacggcggtcac

SEQ ID NO: 23804 - DNA, 552 bp, Homo sapiens
ctaaggttagtattacacaaatgcacattttgtgttctgtaattgttttatgtctgtataccttgcacccctatcttccctgttgccaaagacagattttcttctgtgtacacaacccccaggacagagcaaggcaccaacagtaattcccaaaataattttttgattaaaacttttggagtcatactgtcatcagccagaaaaaaaaacatgcgtgaggagaatgaagggtgttaaaagagctcaagctgatgtcctgaaaggattactttatctataaccttcctgaacactagccttttcctgttgagttcgcatgkaaagtttttccacttaaaatggggcagcaaggctgggaactagtaggagtagcgtaacttctcggactctcccactgaaaagcatctttttcttaaaggcggagagcactttacagacggttactaaggtaaccggaaacagcaaaactgaggtggttctatctacggaagaaattctaagctccaaagttaaaatgcggagcagtggcgcatatcagcagacggcggtcac

SEQ ID NO: 23805 - DNA, 552 bp, Homo sapiens
ctaaggttagtattacacaaatgcacattttgtgttctgtaattgttttatgtctgtataccttgcacccctatcttccctgttgccaaagacagattttcttctgtgtacacaacccccaggacagagcaaggcaccaacagtaattcccaaaataattttttgattaaaacttttggagtcatactgtcatcagccagaaaaaaaaacatgcgtgaggagaatgaagggtgttaaaagagctcaagctgatgtcctgaaaggattactttatctataaccttcctgaacactagccttttcctgttgagttcgcatggaaagtttttccacttaaaatggggcagcaaggctgggaactagtaggagtagcgtaacttctcggactctcccactgaaaagcatctttttcttaaaggcggagagcactttacagacggttactaaggtaaccgraaacagcaaaactgaggtggttctatctacggaagaaattctaagctccaaagttaaaatgcggagcagtggcgcatatcagcagacggcggtcac

SEQ ID NO: 23806 - DNA, 577 bp, Homo sapiens
agggttttcatcatacaaaatattaccagttttagagtttccccaaaatacaaggcacaaagaatatgctttttttttcttacttgcacagacatttgtgtgtgtgtgtrtatatatatatatatatatatatatttatatatatcatcttgagctctgacaatgaacatctaatatggcccacaggcacaagtgctgggtgtgccatatacaagtgagattaatggttgtggaaaattagaacaaaaagcaataattctaaaaacaatttaaaccgactgtttaaaaaaatgcttcctcaatttttttgtgtggttcagagcataaatctgccacaatacttggcattttactatttcactcctccaaaatgttttgctttaacagatttttgtaatctgtacctaacatttacttaaacatatgattttcaattctgatgccagtagcagttttaatcatggtttatgcttctgaaaatgcaataatcaagtattttggatcatgcttcacttatgctacttagttcttaaaacaatgtaacctaattgtaaatgtttacataatgctaactgac

SEQ ID NO: 23807 - DNA, 716 bp, Homo sapiens
cctgtgttccctccacaaattgaagagtaaaaaattttggaaagaattccacccactctgccccttgcttgcatggataataaaatctcactctctttttattacacctcactcatgtttctttctataagcagcgagcagccagactttktgctggttacagttcattgttgtcattttaatgtgtttttcctcggtcagtagggaggacttaccatggtctcccttgcattatagctcttaatgttcaagttgtatttccccgctatggtgaacatctgctctgctgcccagcatctagcctccttttttctggtaattattctctgattttcctttggaaaaccacttctgccaccccccatatatatagttctggtgaggctgactctgcctccaatccaggggctgaccactagggtcacaatgattggttcaggtatgtgcatgtgcaggggtcccaatctagacaacaggagttagtgccaagactattcctggagctagcaggcaaaatggagagtgggcatgaaactgtctgtcttttctgtccccctaccaaagcagaatctaatccaaatgacccctaaccccgctgagggacagggccccagggacagggcagggtcaaattgtgtgcttcagtttccccatctataaaatgaggaggttggactctgtgcctctaaaaccattttagctcattgtgcatgcat

SEQ ID NO: 23808 - DNA, 569 bp, Homo sapiens
ctgtccattcaaaggtgttcgtgggctcgttgggtcagtgctaatctgtggtgtgtaaggtcttcttttggaggattgttttgttttgtttttgagatggagtttcgctctttcacccaggctggagtgcagtggtgcgatcttgggttcacaccattctcctgcctcagcctccagagtagctgggactacaggcgcccrccaccacgcccggctaatttttgtatttttagtagagacagggtttcaccatgttggccaggctggtctcgaactcctgacctcgtgatctgcctgccttggcctcccaaagtgctgggattacaggttaagccactgcacccggcccttttggaggtttttcataaaccaaactccctccatgaaatactattccttcagtactttgacaataccgtcctctggctctttggcattgtgcagtgttgaaatcaactttgatcgtggcctacatccctttgaagttttctaaacttcttgatattcaattttaaaaaattcaggtctcatttcagagtacccttctcttaaaggagctcaaatgtgct

SEQ ID NO: 23809 - DNA, 547 bp, Homo sapiens
cctgagactggctgaagtggctgttgattttcacttttctaggccagcccacagcattcattcgacactgattttctttttttgaagtgattagttctcaatttgaccttgaatgcaggaactatccagtatcttacatattccagacagatcaaggaatttgccccacagtataaagataacaatcccttargcctacactacacttcttcatgcattgtcaattagcatgtatgagtaaataacttggagtaatagcaaagataacttttctgaatgctttacatgaaaaatctcattgaagacttttatgtcctatgcagaatgaatcacaatacctaaaaggatagtagccttcatctccattttgcagctgaggaaacaagctgaggaaggggtgggacttgggcaaggccatacaagaatgaaccagactcctgccttccagacctgttctgttctaccacactcctccaaaggaggcctgctcaaggctcctgggatttattggtgaccaggaacatttttcatcaaatataataaaaaa

SEQ ID NO: 23810 - DNA, 632 bp, Homo sapiens
atcagaatcacactggtgataatgaaggtacttgtgcttctctgaagacttacggaatcaggacctctgggtttgaagccaaggacactgcattaggacaagcatcccagtgtatcttagtgactttaaagttggagagacactgccctatggagacctggattctagtcccagctctgccatgcagttgctttgtgaacttgggaacgtctctttcctaagcctcagttttgtcatcttaaagaggaataataacatttgttccatctgtctgcctcacagggctgtcatgaggctcaattgagatgaaggcacctgagaatgctttggaragaagtaagtgctgtaaacatgggatatatttttgtccacctgttaaacttgatagagagttgggaaactgagttggatttttaaaagtgcattataaatttaccaggagtcagtgatctatgaaaaaacgtgatgacatagaaaaaacaaaacaaaacaaaacaattctgttgagtagaccagagcggttgttatcaaccatggttacaaattagaatcatctggggatattttaaaactacttaagccagggagccatcaaggcagagttaaaggagaactcctgggtaggagctggg

SEQ ID NO: 23811 - DNA, 632 bp, Homo sapiens
atcagaatcacactggtgataatgaaggtacttgtgcttctctgaagacttacggaatcaggacctctgggtttgaagccaaggacactgcattaggacaagcatcccagtgtatcttagtgactttaaagttggagagacactgccctatggagacctggattctagtcccagctctgccatgcagttgctttgtgaacttgggaacgtctctttcctaagcctcagttttgtcatcttaaagaggaataataacatttgttccatctgtctgcctcacagggctgtcatgaggctcaattgagatgaaggcacctgagaatgctttggaaagaagtaagtgctgtaaacatgggatatatttttgtccacctgttaaacttgatrgagagttgggaaactgagttggatttttaaaagtgcattataaatttaccaggagtcagtgatctatgaaaaaacgtgatgacatagaaaaaacaaaacaaaacaaaacaattctgttgagtagaccagagcggttgttatcaaccatggttacaaattagaatcatctggggatattttaaaactacttaagccagggagccatcaaggcagagttaaaggagaactcctgggtaggagctggg

SEQ ID NO: 23812 - DNA, 632 bp, Homo sapiens
atcagaatcacactggtgataatgaaggtacttgtgcttctctgaagacttacggaatcaggacctctgggtttgaagccaaggacactgcattaggacaagcatcccagtgtatcttagtgactttaaagttggagagacactgccctatggagacctggattctagtcccagctctgccatgcagttgctttgtgaacttgggaacgtctctttcctaagcctcagttttgtcatcttaaagaggaataataacatttgttccatctgtctgcctcacagggctgtcatgaggctcaattgagatgaaggcacctgagaatgctttggaaagaagtaagtgctgtaaacatgggatatatttttgtccacctgttaaacttgatagagagttgggaaactgagttggatttttaaaagtgcattataaatttaccaggagtcagtgatctatgaaaaaacrtgatgacatagaaaaaacaaaacaaaacaaaacaattctgttgagtagaccagagcggttgttatcaaccatggttacaaattagaatcatctggggatattttaaaactacttaagccagggagccatcaaggcagagttaaaggagaactcctgggtaggagctggg

SEQ ID NO: 23813 - DNA, 670 bp, Homo sapiens
tgtctgatgagaacaatgctgtgcacctggaaaggagatagtgcaaagagcctccaattacaaaccagcataggaaataacttatatacatgyaatatgaagacgttcatttaaaaattacttagtgagagcctaatccctacttgaccccgggccaaattctagagacataaacataataaaacacagtctctacactcaagctcatagtgaggaaggctactgaaactatccacaccctaggagtggacgttgtagttagagtatttatgaagttcctttgtaatctatgaaaatgctaagtaaatatgaagacattttgaaacaaccacaaaacatttgtaaaaaaaaaaacaactttattattcaaaaacgtattttctgatcttttttccttaattttacctccaaggggtttcagactcctgagttcctcttacccagtggaagaatggccagctcagatggttgggaacatatcaaacactttctagcatgtaatatccactcaacaatttttgttgaatgaatgaaagcaggcagaatttgaataataaactgagatggaatagggcataggaagacaggatatggaaatggagtttcatcgagagtaaatatacacagcagaggttttcctactttcttggggtcataatcccctgagaaa

SEQ ID NO: 23814 - DNA, 496 bp, Homo sapiens
aggaatagagagaagatatgatatttacttccgtgtgaagttttctcaggctggctatgttcactccacagaaagtctttagtccttcctcttaaagtagcttgctgtgatacactctcctcttctatcaacttccaaatcttccgaagcctatggcggtagtggtagatggctagcagctaatagctctgggttctttttaatttcattttatttttcataagggaatcaatcctaatagctctgggttcttaatgatgtttcatggctccaatatatgctccatgcactccttttcacataatttctttgcaaataaagcctcttcaaatatattgtgtgccatttattcgcttgctatcaatattttattattattattattagtagtagtagtagtactgtatttttcctgaagagtatgtgtttggggttgggaggtaggtagtggagataggggtgcaagtgtggttgtayatatgcaagaaagcagttt

SEQ ID NO: 23815 - DNA, 636 bp, Homo sapiens
gtagccccctcagacctgttctacattatgtctctccccagtgttccaagctcagccctgttttactccctcacatggaattaactctgtctcccagaatgtattggacttatgtctttgcatgtgttgttctcactatctgtaatgctttctccaatattctctgacaaagctttcattttaaaagttgtagctcaaataataccttatctcttggtgagttaattaaatgtgccttctgtgctcccatgacatacacttcacagccccaggtatgtctcctcaccaaatcaatgcctttccrtatttgactactcattgcctagtgtcatgccttcatggcggagggactcaatagcttttaagtgaacccagagaatgaagtgggttatgttctcatagaactactgaagaactactgaaaaggctctatatccaccacatagtctttatggaaatgactagaaaagaggatcatgccattagggtcagttttctccacagaaataatgctctaattggggggcccttgtatagagaaaggtaaatcatagcttcgaccacatgggaaaagcaaagatataacaattatataacaatcatgtttataacaattataaactttaattactaaac

SEQ ID NO: 23816 - DNA, 2049 bp, Homo sapiens
tgcgacgcgccaggtagccacggacgcccgcctggatagtgatcactgcgaggatgcggatctcctctgcagcctgcatggacaccattggctccccggaccgcctgggaggcaccaccgccttgttgcgccaggtgtcccaggacgcagcacccctggctggctcccatgcgcggttccacgattggccaccaaccacaccagcgtccgcggggccctggagtatagtggagttcagggatgccttgtgactaacggcaggattctgggggctataggagtcctgccgtctccacggtgactcctggttaaaaaggggtggcagggaaccacttggggaagactcatagcctagagacaccctccgaactcccggggccagcggaggaatgaccgaggagtgtgtcatctccccagtgcggatgacgggccttacctctgcagagggcctgtgggtggggtttgcaccacttcgggctgaggcctgggatggttgtctttgcacatactgtaagggcctaaccctggccacagaactttctagcagttctggaacaatcctaccatgcacggatctgtaggaatttttagggcccatggcgtcccagcggctgctcggagccatgtttccagacactgttttctggagtggattggggacagcttctgtctggaagggactggacaatgcccttctagccgaggacggatatagtggcacatgtgagaccatgctggtggtccctgacctctgaagaagactaggattccccatcctgcccacagacactgaaagcaatctgaaagcctcagtactgccacgggccagctggggtgatcctgagactacattagaagccactgtaccctgagagtgatttkggggtatgacgtgagtgacagacccctgttgataaactgagggggacttagtggctaaacccggggcctggaaagggacagggaccatgccactagcatggctgggagccacctcccttggggaagagaccctttctcagacagggacctatgatcatggcccccatcagctcccagaggactggagtacatccactgggttgcaccagtgaccctggctttgctgaataggtcattggatccacttgatcctgacacttggaacacagcctcatccaattctcctagcttggcttggtcccctgtgaccccagatggcattatcctagcatcttggctcaattgtaaggctcttgatagaaccgtgggcactcggtgtagactcctcactgtgccactagctgccggggctgaggagtgacctggagccagactggtggtgtggggcatctgcaagggggctaaagacctctccccagccaggctttgaggtaaggaggggcagtgatgtcaatcaccatgggccccttgggagcagctctgagccacactagaggcccccatcattggcacagaaccagggggacaactgggctcacccgactcactactgaacctgggagcaagtttggagcagctaagctagcggagggtcttacagatagacttggcttctttctgtctgccatcagactgggagccacccaactggacacagagcctgcgggaaggctgtgacccatgcctcggatggtggagcccgggggaaggctggaggttatgccaccaggcagagtgcctgggactgcgcccgtgctcattctactggctacaaaacctcctgccgcaccacgaccagccctgctcttcagagagtcctgcggaatcacatctctctgctggtaactgggtgggaccatggatgcctcagaagggtgccagcagtctatgttttttggaataaccacactgatctgggagctgctggggtccatgctgttcagggaaagattagactgagtcacggccagtctgttgggcactgaagccagagaggggctgggggccatccctgtggttccagagggatgtgtcaaagggccacctgcctctaagacctgggatgcaagggaagccatgccattggccacctgacattgactttgg

SEQ ID NO: 23817 - DNA, 2049 bp, Homo sapiens
tgcgacgcgccaggtagccacggacgcccgcctggatagtgatcactgcgaggatgcggatctcctctgcagcctgcatggacaccattggctccccggaccgcctgggaggcaccaccgccttgttgcgccaggtgtcccaggacgcagcacccctggctggctcccatgcgcggttccacgattggccaccaaccacaccagcgtccgcggggccctggagtatagtggagttcagggatgccttgtgactaacggcaggattctgggggctataggagtcctgccgtctccacggtgactcctggttaaaaaggggtggcagggaaccacttggggaagactcatagcctagagacaccctccgaactcccggggccagcggaggaatgaccgaggagtgtgtcatctccccagtgcggatgacgggccttacctctgcagagggcctgtgggtggggtttgcaccacttcgggctgaggcctgggatggttgtctttgcacatactgtaagggcctaaccctggccacagaactttctagcagttctggaacaatcctaccatgcacggatctgtaggaatttttagggcccatggcgtcccagcggctgctcggagccatgtttccagacactgttttctggagtggattggggacagcttctgtctggaagggactggacaatgcccttctagccgaggacggatatagtggcacatgtgagaccatgctggtggtccctgacctctgaagaagactaggattccccatcctgcccacagacactgaaagcaatctgaaagcctcagtactgccacgggccagctggggtgatcctgagactacattagaagccactgtaccctgagagtgatttgggggtatgacgtgartgacagacccctgttgataaactgagggggacttagtggctaaacccggggcctggaaagggacagggaccatgccactagcatggctgggagccacctcccttggggaagagaccctttctcagacagggacctatgatcatggcccccatcagctcccagaggactggagtacatccactgggttgcaccagtgaccctggctttgctgaataggtcattggatccacttgatcctgacacttggaacacagcctcatccaattctcctagcttggcttggtcccctgtgaccccagatggcattatcctagcatcttggctcaattgtaaggctcttgatagaaccgtgggcactcggtgtagactcctcactgtgccactagctgccggggctgaggagtgacctggagccagactggtggtgtggggcatctgcaagggggctaaagacctctccccagccaggctttgaggtaaggaggggcagtgatgtcaatcaccatgggccccttgggagcagctctgagccacactagaggcccccatcattggcacagaaccagggggacaactgggctcacccgactcactactgaacctgggagcaagtttggagcagctaagctagcggagggtcttacagatagacttggcttctttctgtctgccatcagactgggagccacccaactggacacagagcctgcgggaaggctgtgacccatgcctcggatggtggagcccgggggaaggctggaggttatgccaccaggcagagtgcctgggactgcgcccgtgctcattctactggctacaaaacctcctgccgcaccacgaccagccctgctcttcagagagtcctgcggaatcacatctctctgctggtaactgggtgggaccatggatgcctcagaagggtgccagcagtctatgttttttggaataaccacactgatctgggagctgctggggtccatgctgttcagggaaagattagactgagtcacggccagtctgttgggcactgaagccagagaggggctgggggccatccctgtggttccagagggatgtgtcaaagggccacctgcctctaagacctgggatgcaagggaagccatgccattggccacctgacattgactttgg

SEQ ID NO: 23818 - DNA, 2049 bp, Homo sapiens
tgcgacgcgccaggtagccacggacgcccgcctggatagtgatcactgcgaggatgcggatctcctctgcagcctgcatggacaccattggctccccggaccgcctgggaggcaccaccgccttgttgcgccaggtgtcccaggacgcagcacccctggctggctcccatgcgcggttccacgattggccaccaaccacaccagcgtccgcggggccctggagtatagtggagttcagggatgccttgtgactaacggcaggattctgggggctataggagtcctgccgtctccacggtgactcctggttaaaaaggggtggcagggaaccacttggggaagactcatagcctagagacaccctccgaactcccggggccagcggaggaatgaccgaggagtgtgtcatctccccagtgcggatgacgggccttacctctgcagagggcctgtgggtggggtttgcaccacttcgggctgaggcctgggatggttgtctttgcacatactgtaagggcctaaccctggccacagaactttctagcagttctggaacaatcctaccatgcacggatctgtaggaatttttagggcccatggcgtcccagcggctgctcggagccatgtttccagacactgttttctggagtggattggggacagcttctgtctggaagggactggacaatgcccttctagccgaggacggatatagtggcacatgtgagaccatgctggtggtccctgacctctgaagaagactaggattccccatcctgcccacagacactgaaagcaatctgaaagcctcagtactgccacgggccagctggggtgatcctgagactacattagaagccactgtaccctgagagtgatttgggggtatgacgtgagygacagacccctgttgataaactgagggggacttagtggctaaacccggggcctggaaagggacagggaccatgccactagcatggctgggagccacctcccttggggaagagaccctttctcagacagggacctatgatcatggcccccatcagctcccagaggactggagtacatccactgggttgcaccagtgaccctggctttgctgaataggtcattggatccacttgatcctgacacttggaacacagcctcatccaattctcctagcttggcttggtcccctgtgaccccagatggcattatcctagcatcttggctcaattgtaaggctcttgatagaaccgtgggcactcggtgtagactcctcactgtgccactagctgccggggctgaggagtgacctggagccagactggtggtgtggggcatctgcaagggggctaaagacctctccccagccaggctttgaggtaaggaggggcagtgatgtcaatcaccatgggccccttgggagcagctctgagccacactagaggcccccatcattggcacagaaccagggggacaactgggctcacccgactcactactgaacctgggagcaagtttggagcagctaagctagcggagggtcttacagatagacttggcttctttctgtctgccatcagactgggagccacccaactggacacagagcctgcgggaaggctgtgacccatgcctcggatggtggagcccgggggaaggctggaggttatgccaccaggcagagtgcctgggactgcgcccgtgctcattctactggctacaaaacctcctgccgcaccacgaccagccctgctcttcagagagtcctgcggaatcacatctctctgctggtaactgggtgggaccatggatgcctcagaagggtgccagcagtctatgttttttggaataaccacactgatctgggagctgctggggtccatgctgttcagggaaagattagactgagtcacggccagtctgttgggcactgaagccagagaggggctgggggccatccctgtggttccagagggatgtgtcaaagggccacctgcctctaagacctgggatgcaagggaagccatgccattggccacctgacattgactttgg

SEQ ID NO: 23819 - DNA, 1083 bp, Homo sapiens
ctcaaaatcttaaaagaagatacatcaaagtgccaggtgaggctgggcacagtggcttgtgcctgcaatcacagcactttgggagactgaggtgggaggatcgcttgagcccaggagtatgagaccagcttgggcaacacaaaagattctgtctctacaaaaaatctagaaattagccaggtttagtgatgcatgcctgtggtcccagctacttgggaggctgaggtcaggtgggaggatcacgggccagtgaggttgaggctgtagtgattgtgccactgcactccagcctggatgagagtgagatctcagctctgaaaaacaaaaaaagtctagagtgcagtggctcacgcctgtaatcccagcactttgagaggccgaggtgggtggatcacctgagctcaggggttcaagactagcctggccaacatagtgaaacctgatctctactgaaaatacaaaaattatccaggtgtggtggtgcgtgcctgtaatcacagctacttgggaggctgaggtaggagaatcactctcggagaggtggaggttgcagtgagctgagattacaccactgcacttcagcctgggcgacagaacaagactctgtctcaaaaaaataaataaaatgaaayagaaaaagaaaaaaagtgccaagtgtgataggagaggccccaccctggtttatggaaggtcacaagaaaattcagaaaagagaattcctttctctgggctttcttggagcatctggaatctggttctcaggtctagatccacgaggacctaaacccagtgcctcctaattcaggaagctgtccaggactgcccatccccgctgctaacctaggccactccttctggccctgccctgacgacagggaactggaagtgtgtatcctgtgatggcttgtccattctcggctactcctccaggaaacagctggacagccaggactctggatgttcagaaggtgggaaggggctgaatgaatgagttcacactttgcccacgcaccgttctacatactgggaatctagtcggaagaaaaacgaagatcctgctcccacaaaacttaacacagggat

SEQ ID NO: 23820 - DNA, 557 bp, Homo sapiens
gacagtaaattaaactagccattataccccactttccaaatacacagaggtgaagtgaagctatcgggataatctattattgggtttggttttttatatggtttggctgggtccccatccaaatctcatcttgaattatagttcccataattcccacgtgttgcgggagggacccagtgggaggcacccagtgggaggcagttgaatcatgggggtggtttcttccatattgttctcatggtagtaaataaatctcacaagatctgatggttttataaggggaaatccctttcacttggttctcattctctctcttgcctgctgccatgtaagacgtgccttttgccttccgccatgattgtgaggcctccccagccatgtggaactgtgagtccattaaacctctttttccktataaattaccaagtctcaggtatgtctttaacagcaaacaaactaatgcagtttttttgtttgtttgttttgtttttcattccttgccacccttttattccacaattccattctatacttcatcagttcctaggaacttttcc

SEQ ID NO: 23821 - DNA, 582 bp, Homo sapiens
gtcagcggcaggtgacatttagcacaggctttatctcagttgtggtaattactgggctgacatgagctctcatacacagcacagattgttttcagcagatgtaaccaagcaactctgctttctctggagcagtttatctggctttcaaattgtggcattccatatagacacacacgcacgcacatacaagcayacaaatagtttaatgtcatttttatggaaatagtcattcttttttgctctgactatattgatttatgccacgaggtgatggaatgagatatcttcattgtatgcaacttctgcattacacgctggtagtgcatcctattaaacagaaaggttattgttattgtaatgtatcttagcgtgcccaaatgctactttaatgatgtaattaatatgcttagatttaccatttgatgttcttaggcaccagttgtgtgactgatgggatagcaataatcattttttaaaaaatttgtgagagcagtattttttcttagaagttggaataagaaagtgttttattaaaagaaggtgctacactaacaacacttaattgtctgtgtaagacatatc

SEQ ID NO: 23822 - DNA, 582 bp, Homo sapiens
gtcagcggcaggtgacatttagcacaggctttatctcagttgtggtaattactgggctgacatgagctctcatacacagcacagattgttttcagcagatgtaaccaagcaactctgctttctctggagcagtttatctggctttcaaattgtggcattccatatagacacacacgcacgcacatacaagcatacaaatagtttaatgtcatttttatggaaatagtcattcttttttgctctgactatattgatttatgccacgaggtgatggaatgagatatcttcattgtatgcaacttctgcattacacgctggtagtgcatcctattaaacagaaaggttattgttattgtaatgtatcttagcgtgcccaaatgctactttaatgatgtaattaatatgcttrgatttaccatttgatgttcttaggcaccagttgtgtgactgatgggatagcaataatcattttttaaaaaatttgtgagagcagtattttttcttagaagttggaataagaaagtgttttattaaaagaaggtgctacactaacaacacttaattgtctgtgtaagacatatc

SEQ ID NO: 23823 - DNA, 582 bp, Homo sapiens
gtcagcggcaggtgacatttagcacaggctttatctcagttgtggtaattactgggctgacatgagctctcatacacagcacagattgttttcagcagatgtaaccaagcaactctgctttctctggagcagtttatctggctttcaaattgtggcattccatatagacacacacgcacgcacatacaagcatacaaatagtttaatgtcatttttatggaaatagtcattcttttttgctctgactatattgatttatgccacgaggtgatggaatgagatatcttcattgtatgcaacttctgcattacacgctggtagtgcatcctattaaacagaaaggttattgttattgtaatgtatcttagcgtgcccaaatgctactttaatgatgtaattaatatgcttagatttaccatttgatgttcttaggcaccagttgtgtgactgatgggatagcaataatcattttttaaaaaatttgtgagagcagyattttttcttagaagttggaataagaaagtgttttattaaaagaaggtgctacactaacaacacttaattgtctgtgtaagacatatc

SEQ ID NO: 23824 - DNA, 766 bp, Homo sapiens
tcttttcttaaaatgagttatctatttgaaatttcttgtttccttggggtattgtccccataaacttttcgtaaagcatcagtgatttcattattcttccacccaagtttcaccataaatttggtatttgttcttgcttcgattttagcagaattcatgttgatctgataggggcttttcgcaaactgatgtcttacctttgtggtgccttaaacaagattctgttgaaacatgttatcacaagttagcacaagtttattttggtgcagaatttttttcttgaaattcttgcatagtttttccatgatacacattttttatgaactttttgaagactccttgtaggagtaacagaagtacttaggggtttcatttttwaaaaacaaaccctttcatatcaatacaagatatgtggccatataagaaacaagcttggaggtttcctgatcaaatgaagtagctattgatgcagtgttcatgactgcccaagtagaaaacctaatgagtagtcagaaatatggtggtactgaagaaaaagaggagtgatattgctgttacttttagtataagaatttagcagatttgcttcacatctgttaaaagtttccagcctgaagagcctttgacaccaaggattaagcagtcaaggagttcattctaattttaatatcagtttattaatcttacctgtttattcattttcagaaagatactcaaagcctgagctcaaaaatccttttgatgtgtcttggggtctttgtataat

SEQ ID NO: 23825 - DNA, 797 bp, Homo sapiens
tcttcctgatttctgcccagctgccttctcactgtatccccacgagagagggagaggaaccagctctcagtctcagttctgtctccctgtgaatctgagagtgtgctgaggccaggaacctttgtccccttagcacctagacaggatgtgggacaggagttaggcacataaataaatgaatgaatgaatggaaagaaaatatatgattggtaataatccttcattgattcaacaagccaaccctgcacagtcctcactctcagctggggacatccgttgcaaaagttcaatcacctctggccctggccagtcccaggtggcacctcagctgtcaccaacctgtcccctgacagtgccctggatgaggccaccagcacctccctcctgactcacaagcatggggctcttctagcagccctacttgactactcttggatctgtggggcttttggttctcygaaagtcactcactcatttatcaaagggggacttcatgttccacctttgacccacaactcttttgtactatttgcaagactctgaggcttttttttttttttttttgagacagggtttcactctttttgcccaggctggagtgcagtggcatcatctcagctcactgcaacctctgtctcccaggttcaagtgattctcctgcctcagcctcctgagtagctgggattacaggcacccatcaccatgcctggctaattttttgtatttttagtagagacggggtttcaccatgttggtcaggctggtcttgaactcctaacctccagtgatccacctgc

SEQ ID NO: 23826 - DNA, 482 bp, Homo sapiens
ctacaccaccgctgtgaaagcatgaaacaaatgtgacctagacctgagggtcccagaggcttccctgaacaggcaacctaagctgagaccccaagaaagcttagattgaaccgagagggttggggagggatgtgatgggccttccaggcagaacaatgtgtgttctgtgtgggagagaactaatgagtttggaggaagagcggaggcccagtctggccacaaacacaagagtatgggacacgccagaggaagccacacggattttgcagggagacagtaaggattttgstcatcatcttaaagtacgtaaagtacgtgggaaagcctcctgcacagagttttagctggcagtcagcaggccctctggtcctggccacgcacctttccctcagcctcgcctcagcattcaagggaaaacctgccaccgcgcaagccctccagggtctggaatgctggcaggaggggatggatgcctctgctcc

SEQ ID NO: 23827 - DNA, 482 bp, Homo sapiens
ctacaccaccgctgtgaaagcatgaaacaaatgtgacctagacctgagggtcccagaggcttccctgaacaggcaacctaagctgagaccccaagaaagcttagattgaaccgagagggttggggagggatgtgatgggccttccaggcagaacaatgtgtgttctgtgtgggagagaactaatgagtttggaggaagagcggaggcccagtctggccacaaacacaagagtatgggacacgccagaggaagccacacggattttgcagggagacagtaaggattttgctcatcatcttaaagtacgtaaagtacgtgggaaagcctcctgcmcagagttttagctggcagtcagcaggccctctggtcctggccacgcacctttccctcagcctcgcctcagcattcaagggaaaacctgccaccgcgcaagccctccagggtctggaatgctggcaggaggggatggatgcctctgctcc

SEQ ID NO: 23828 - DNA, 1083 bp, Homo sapiens
aaaagaacgaagttatgttcacatctcgctggttcatattgttaaaatacccagtcaatatttttatagtctctcaaaagcctattttaattactacttcaggaaagcttttctttttttagtttgcatcagcaccatttttccttacatggcagcacagatcattggttatattccagccaacttcgccagacttcttgctgggctgttcaggttaccgccatccacagaagctcaggcacctttgccacgytcccacccgtggtgccagggtcacatcacactgagcagctgtttgagtcaggccattctgccgtccacccagcactgtgtgcagctggcagacatctgctctttctctcttgcatgccctgcatggagagttcttgggtgcttctcctagtggattggaggttagagaggacccggccatttcatatatagcacaccacacaatggtgtcctaggcctcctgccctccttcctcttcgtccgcatgcctggtcctttgggcttgcacattgcagggtgggaatgatgggggtgagatgtagttgccaggtgccactctccgaggctttcacatggggatgagcccaacctgtgaccagaaccaccttgtggttgccccccatccttttctttttttttttttttgaaatggagtcttgctctgtcacccaagttggagtacagtggtgtgatcttgtctcactgcaaccttcgcctcccaagctcaagcaattctcccacctcagcctcccgggtaactgggattacaggtgcccaccacaacgcctggctaatttttatatttttagtagagatggggtttcgccatgttggccaggctggtctccaactcctgacctcaggtgatccacccgcctcggcctcccaaagtgctgggactagcaccttgcccagcccatgatatagcctttacactgtactaatgaggcaataattctttgtcctcttatcatcaaagattgcatgatttccacctctggtcactatctgatctcacccactaatcggatgaactgtgggatcagtttggagctcagcttgctactccat

SEQ ID NO: 23829 - DNA, 869 bp, Homo sapiens
ttatttccagcttgctaaatgttataaggttgcttttggtcacattatgataggcatccgtaattacatttaccttttcaggcttgctacaagggcttacttagtctctgaagagcttcctgcaggcttggggtctgtggactgaaaatcagttggattgaygaaagctatgagaagaattatgatgagggtcagatcatatgggcatcaggaaagtaaaatattaccatttaaactagaaataaaactttttttcctaagtgatcatatttaccatgacaagctgggtaattaattgtaagattaatagtacttgacattcactcatccacttattcaaaagaaaattatcctatgagcctactacatgagaaggaccattatatacaacttctaactttataaaatgtatctttgaataatatccttctgggtctttaagaaaaatttggccaaaaagaaccttgagagtttgcttgtagggtttatttaaaagagttcagaaactggaaactcctaggtaaagcagcattttttttaatcattattatactttaagttctgggatatatgtgcagaatgtgcaggtttgtgtacataagtatacctgtgccatggtagttttctgcacccatcaacccgtcatctatattaggtatttcttctaatgctatccctcccctagcccctaaccccacaacaggccctggtgtgtgatattcccctccctgtgtccatgtgttctcatagtgcaactcccaattatgagtgagaacatgtggtgtttggttttctgttcctgtgttagtttgctgagaatgatggtttccagcttcatccatgtccctacaaagtatatgaactcatcc

SEQ ID NO: 23830 - DNA, 821 bp, Homo sapiens
tgcgcctactgagggggtgcctcccagttaggctgctcaggggtcaggggtcacggacccacttgaggaggcagtctgcccattctcagatctccagctgcgtgctgggagaaccactgctctcttcaaagctgtcagacagggacatttaagtctgcagaggttactgctgtctttttgttcatctgtggcctgcccccagaggtggagcctacagaggcaggcaggcctccttgagctgtggtgggctccacccagttcgagcttcccagctgytttatttacctaagcaagcatgggcaatggcaggcgcccctcccccagcctcgctgctgccttgcagtttgatctcagactgctgtgctagcaatcagcgagactccatgggcgtaggaccctccaagccatgtgcaggatataatctcctggtgcgccattttttaagcctgttggaaaagcacagtattagggtgggagtgacccgattttccaggtgccatctgtcacccctttctttgactaggaaggggaactccctgaccccttgtgcttcccgaatgaggcaatgcctcgccctgctttggctcgtgcatggtgcactgcacccactgtcctgtgcccactgtctggcactccctagtgagatgaacccggtacctcagatggaaatgcagaaatcacccgtcttctgtgtcgctcatgctgggagctgtagaccagagctgttcctatttggccatcttggctgccccaattatttcttaattatatcacacattaatatgggactgccctagtcgaaggggaagagccatgcagaa

SEQ ID NO: 23831 - DNA, 584 bp, Homo sapiens
caccccccaccaagtgagataacccaaatttctcaagacgttgccaaatgtcctctggggagtaaaatcactcctggtgagagcaatggtccagaattctcatttcacccttgacattatcaacgggtaaaacagggcctcagagtcaaaggcccaaaaaggccaaggtgagatttacagaagaaagaggtccaatgtagaggtgtgtgctcctcacagcaaacactgagtcccaacttaccagaaactaatttagtactttgtgtgtattgatttattttcccacttcatacaccacaatcatctcccattttttagatgaggaattgaagtacaaagaggrtcactcacccaaagtcacatgcctcctgagttgaactctatgcaacccaaggtcaagtatccacagagctgagctccgactctagagcccacactcttatccactgccccatacttcctccccttgaacccaactctttccaaaagaacagaggggtctcagaaggcaaggatcaggtgggtgaaggggatagtcccaggatccctgaatggagtgaggctgagaggcaggcagaaattct

SEQ ID NO: 23832 - DNA, 584 bp, Homo sapiens
caccccccaccaagtgagataacccaaatttctcaagacgttgccaaatgtcctctggggagtaaaatcactcctggtgagagcaatggtccagaattctcatttcacccttgacattatcaacgggtaaaacagggcctcagagtcaaaggcccaaaaaggccaaggtgagatttacagaagaaagaggtccaatgtagaggtgtgtgctcctcacagcaaacactgagtcccaacttaccagaaactaatttagtactttgtgtgtattgatttattttcccacttcatacaccacaatcatctcccattttttagatgaggaattgaagtacaaagaggatcactcacccaaagtcacatgcctcctgagttgaactctmtgcaacccaaggtcaagtatccacagagctgagctccgactctagagcccacactcttatccactgccccatacttcctccccttgaacccaactctttccaaaagaacagaggggtctcagaaggcaaggatcaggtgggtgaaggggatagtcccaggatccctgaatggagtgaggctgagaggcaggcagaaattct

SEQ ID NO: 23833 - DNA, 1133 bp, Homo sapiens
ttctttctcttccagagttgcactcaycctcccatccctatagggttcaaatatactcggctgaggcagtattattcgttctgaatgctgggctgtacctgctgcaagggaaggagaagtacagagcattatgggccttcctgctttgaaatcaggtaccacagggccttgggatatccctggggaccctgcctcccctagatctgccagaatcctgtctctgtgatggtctttactatcatctgagacttgtggccccttctccagatctgtctctttcccttcatgcacagcagaagaacctcacacccaccctttttcaattcctgggaggctgggatggatgagggggtacacgggggccatggctactagtagtttctctctccatttctgctgagctcagcccagtggactggagcttctttaggctgccactccaggccactctggatagaggagaacaactgaagcagaggaaaggggtgtttccttataccaggcatttcctttattcttccttccatcagtagagagaagagtcagctttcacctgtataggatctaggaatctctctaggggcattctgattacctcctagtaacataagttggagagggaaggagaatagtctactcaatttggtggtaaagacttccctttttttcccctcaagatggtggattggaggcattgttagcatgcctgtcccacttagaaagacaaaatagtatatagagattcacagtgtgaactttattccaagaagcaacacacaaacttaacaagaaaactgaaagaaaccacagatcctttgaatgaagtgacagactacagcctacaccatgagccacgtggaaaactgcagaagaccacagtgcccaggaaggagaaaccttgtatgtgacctcagctatcaccattgcctgaatcaccctggctagataaccagaaggtcctaagtctgtcacatgaccagttcattactactatagctggaatttgagagccaacactgtaaggttatttataaccaaggaatctcacagagtctatatcactcccctgctgtccctatcagagctggtgctggtacctgctgctaggagacttgaggagagttcacacgtct

SEQ ID NO: 23834 - DNA, 1133 bp, Homo sapiens
ttctttctcttccagagttgcactcatcctcccatccctatagggttcaaatatactcggctgaggcagtattattcgttctgaatgctgggctgtacctgctgcaagggaaggagaagtacagagcattatgggccttcctgctttgaaatcaggtaccacagggccttgggatatccctggggaccctgcctcccctagatctgccagaatcctgtctctgtgatggtctttactatcatctgagacttgtggccccttctccagatctgtctctttcccttcatgcacagcagaagaacctcacacccaccctttttcaattcctgggaggctgggatggatgagggggtacacgggggccatggctactagtagtttctctctccatttctgctgagctcagcccagtggactggagcttctttaggctgccactccaggccactctggatagaggagaacaactgaagcagaggaaaggggtgtttccttataccaggcatttcctttattcttccttccatcagtagagagaagagtcagctttcacctgtataggatctaggaatctctctaggggcattctgattacctcctagtaacataagttggagagggaaggagaatagtctactcaatttggtggtaaagacttccctttttttcccctcaagatggtggattggaggcattgttagcatgcctgtcccacttagaaagacaaaatagtatatagagattcacagtgtgaactttattccaagaagcaacacacaaacttaacaagaaaactgaaagaaaccacagatcctttgaatgaagtgacagactacagcctacaccatgagccacgtggaaaactgcagaagaccacagtgcccaggaaggagaaaccttgtatgtgacctcagctatcaccattgcctgaatcaccctggctagataaccagaaggtcctaagtctgtcacatgaccagttcattactactatagctggaatttgagagccaacactgtaaggttatttataaccaaggaatctcacagagtctatatcactcccctgctgtccctatcagagctggtgctggtacctgctgctaggagacttgaggasagttcacacgtct

SEQ ID NO: 23835 - DNA, 501 bp, Homo sapiens
ggtggaaggcaaaggggaagcaaggcatgtcatcacatggccagagcaggaagaagagagggcaaaggaggaggtgctacatacttccaaaccatcagatctttcaaggggatggtgctaaaccggtagaatacacccccattatctaatcacctcccaccaggcctcaccttcaatatttgggttattattttttttcatggctaaagttcattctcaccgagtatttgcaatgtaataaaattaagccaagcttatgtgaaccaagagctctgggtgacaaacaaaaagaatgtgcacaccggcaatattcatttaaggttaaaagatttttagtattattaatcaagaatttaaatgtcccaaatatataatacttatttgcttaggacaagatgtcctatccataactcagatgaaaactatataaaaaggaggaaagaagaaagtggtccctagaatgcattaatctagagtaatggttccagtcagccatgytgt

SEQ ID NO: 23836 - DNA, 546 bp, Homo sapiens
tatactatttgttcatggaacccttgtttcctgggacatgttttatcttgagaaaacccaatatttcaaagaccatagtttggaagataagagtctaatgtcatatgtgggttggttttattaggggggaggggagcagagtaattattttacacatactgcattaaaattatagatttatagtccatttatatcattttctatgaaggcagattttcttcatccttatttgaattttgggttttctgctcatccccaaacttaagtactggagaggagtgttatctaataaatagagccttagactcaggtcactaacttactgtgtggtccagaaaaagctgcattctctttctgaattacatttttttcatcagcaaagtgaagtggttgatcagggatattatctaaggttcyctctaaagctaacattcaatggactttctccgtagctttctttgacttcatctagatcattctatgacttttgctaatctcagggacagagctatcaactagaaagcagttctaaacagaagcatagca

SEQ ID NO: 23837 - DNA, 892 bp, Homo sapiens
tttcatcataactttaaacaatgtttatatgactttaaatatctacagctgatggctcctgaatttacatcatcctcttgaagattctgtgtgcataaggcccagtggatttgttttgatttcctgctctagttttcttcacgtgccttgcctcatattccactctctccatctagtttccaatgccattaatcttctagacttcttgtgttttttgtgagggagggataacacctcaaatagtgttttcaaattactgcatgggggaaggggtagacttcacaagtgctttcatgttaaaacatgcacaccttcccatccagctcatatacacacactcttgattgatactttggccgggcataaaactctaggactaaattcatttttcctcaggactctaaagacagtcttgtaaagacacatctaacattggtgctgaaaactgacctaacagtctgactcttttttcttaagatccaagagactcacttgacagcagagtttcttaagcttagcattattgacattttgggcccaatggttctttgttgtgggagtctgtcccacacattgtgggatgtttaccaccaccctgtcctcagcccaytagaggccaagagcacctcttccactgtgacaaccaaaatgtctccagacgttgtcagatcatccctggggggtaaaattgccctcagttgagaaccactgctgtatagcaaagggaaaccagctggggctatggtaggctcaataatggtcccccaaacatggccacaccctaatccctggggcctgtaatatgttaccttaagttaaggattatgagatgggaagattattctggattatgcagtgggcccagtgtaactacagggctccttataagagg

SEQ ID NO: 23838 - DNA, 892 bp, Homo sapiens
tttcatcataactttaaacaatgtttatatgactttaaatatctacagctgatggctcctgaatttacatcatcctcttgaagattctgtgtgcataaggcccagtggatttgttttgatttcctgctctagttttcttcacgtgccttgcctcatattccactctctccatctagtttccaatgccattaatcttctagacttcttgtgttttttgtgagggagggataacacctcaaatagtgttttcaaattactgcatgggggaaggggtagacttcacaagtgctttcatgttaaaacatgcacaccttcccatccagctcatatacacacactcttgattgatactttggccgggcataaaactctaggactaaattcatttttcctcaggactctaaagacagtcttgtaaagacacatctaacattggtgctgaaaactgacctaacagtctgactcttttttcttaagatccaagagactcacttgacagcagagtttcttaagcttagcattattgacattttgggcccaatggttctttgttgtgggagtctgtcccacacattgtgggatgtttaccaccaccctgtcctcagcccattagaggccaagagcacctcttccactgtgacaaccaaaatgtctccagacgttgtcagatcatccctggggggtaaaattgccctcagttgagaaccactgctgtatagcaaagggaaaccagctggggctatggtaggctcaataatggtcccccaaacatggccacaccctaatcccyggggcctgtaatatgttaccttaagttaaggattatgagatgggaagattattctggattatgcagtgggcccagtgtaactacagggctccttataagagg

SEQ ID NO: 23839 - DNA, 530 bp, Homo sapiens
tttttaaataaaaattttattatgttttgattgaccatgggaaatatagccttcctttagtccttccattacatcttctggaaaatgtattcacttgggatatttgctgagggcctatttataccaggtactctttattcattaaaatatttattaatacaaagaaatgataaatgcttgaggtgatggatactctacttactctgatgtgattattatacactgcatgcctgtatcaaagtatctcatgtacccccataaatatatccacctactatgtacacataaaartaaaaaataaaaaaattaataaaataaaaatagacaaaaaataaaatatttattaagtgtctaattgatgccacgtcttttaggcactggagacatgaggtttatgttttagggacatgaaaaacaaataattaaacaatatgataatgcatactgtaaagaaaatcaaagcaaaataagggagaccaagaagagggtgctcttttccatagggaggccaaggaagtctagtctaatca

SEQ ID NO: 23840 - DNA, 530 bp, Homo sapiens
tttttaaataaaaattttattatgttttgattgaccatgggaaatatagccttcctttagtccttccattacatcttctggaaaatgtattcacttgggatatttgctgagggcctatttataccaggtactctttattcattaaaatatttattaatacaaagaaatgataaatgcttgaggtgatggatactctacttactctgatgtgattattatacactgcatgcctgtatcaaagtatctcatgtacccccataaatatatccacctactatgtacacataaaaataaaaaataaaaaaattaataaaataaaaatagacaaaaaataaaatatwtattaagtgtctaattgatgccacgtcttttaggcactggagacatgaggtttatgttttagggacatgaaaaacaaataattaaacaatatgataatgcatactgtaaagaaaatcaaagcaaaataagggagaccaagaagagggtgctcttttccatagggaggccaaggaagtctagtctaatca

SEQ ID NO: 23841 - DNA, 1170 bp, Homo sapiens
agggtacaccactggtcaccctagactggctgaagccacttcgcccgatgcaatcagagtgaaagcgaaaaatgctggaggcttaaaaaaaaatcacaacatgagccacagctcactagcagccaggggaagacatcctacaagcctcctgcagactagaaatggtgtctcaattcaggaccactgaacaggaagcttttcatttggcacaggaaaattacaagtcatgaaaaccattgcactaagtttctactacaaggtgtaaggtttcattctgagagatcatcgcagatgcagaggaacaatttttattagaggcactccaaagaataaggtatttcttggttgttatttaaagagcaccagagagccacaggcaaaggccttctttcttctctccaaaacctcattatctctgcagacaaaaagatttgacatctttttactgttctcttttcctctgacccatatgtccctgtttgccccatgcagtttccatcactagaarcacttctctgctttagttctgagtctcagacacatgtcacaaagtgctctaataggtttcctatgaggtccaggggcacagctctaagtattttatagtcataaaaatatttgtaattatcatgttttatcttaaattattaggtgaattttgtagtctactccatattatgtctggatttgacttaatgacaatatgatgtatttgaaatttaattttcaggtaagttgaagctccaggcataggtatcatgtgtatcttttgaatagcctccagttagtctataaaaatacccatggggctatggttctggagcaaaggctttctctagccatctgtattgctactctctaggacatacacaggacatctcagtcagatggtctatttgttgtcctttgagcttgctacactatttattatgtgaagatgtttattgacactattttccagaatacttataccttctcttcatgtctctgagaacttgaagaccctgcttctgtgataagatttcttaaactcatggaactcattccttcttctatgctcaaagtattttataccttctttggctgagaatttagagcatcctgtcttatattgttggtacctatactgtatacatttatcacttactagacagcactttcctcaaggtt

SEQ ID NO: 23842 - DNA, 2777 bp, Homo sapiens
  misc_feature (1)...(2777): n = A,T,C or G
atatagttatgatcatcatttttctgtaccatataatctaatctcttaagtagacaaaaagttccttgaggacaggagctggcatttctctatagaagcttagtacaatgcttgtgaaaataagacaaaatcaacatattttcaaaaatcaaattgaattggataggcagcagatttggtggaaagaccaggagcttagcgccaaggagatctggattcaaaaatctgtattcaggcccaggtgcagtggctcacacctgtaatcccagcactttgggaggctgaggtgggaggatcagttgagcctatgagtttgacacctacntgagctacatagtgagaccccatctgtacaaaatataaagataacaaaattagcttggcatggtggtacacaactgtggtgctagctactcaggaggctgaggtgggaaggataacttgagcccaggaggtcaatctgcagtgagccatgattgcaccactgcactctatcctgggtgacagagtgtgaccctgtctccaagaaaaaaaaaatctgtgttcaaaatgtgccctttgaaaaattacttgtctttctcataaaaaaaagacataaagacaataatacttatctcaaggattgttgtaagaactaaggatagtaaatgcaaaatgcctaacacacattcaatgctctaactaaattacagatattgtgaggtagtgtagcattgtggcaagcacctggatactccactcagacaaacctggtttcaaattccatcacttctcattgtgtgaatgtagataagtcccttcatctctttgggtctcaggatcctcatctgtaaaatgggtactatagtaactgtcttgtagggttattgtgaagatgaggaaygcttctgtctcagaccctgacacatagtagggacttaaaatggtacctatattagccacagttaacaatttgtgttcttttgtttgtatattgatttgtccatgaatttatgcactgaacaatgactcatgcaatgctaataactcacaatggcttcatttttcaagtttctgcatggtagtgtctgctgatgcctagatctgggaagataccctcatgggatagagaactagccctttggaaaggagctcagggtcccaggtaagctgcccgggacagtacactattttgacacatccacagctgagttttaattgtccctgttggcttttgaccctagagatcccctggcttcctccagttataatcgttttgctcagaggttcacattttctttcctcaccggatagatcctgtcccttgctgctgtgcagccgtgggcaaacatgttagctcttaccttgtgtctgttttttgtcagtgccttttttttacagcattgttttattggctgaaattcagcaaactataccagccttgtctttgtggtgtcaagccaggtcacgggggttcactttcccgggtagttcctgggacctgaagctctcttaggaaccatgactacgagcttctccttttcttccctaagacctcccaggagccccaaccttaccttttctgttttttaagagtctaaataatcggataaaagacatttaccttgtctttagaaaaatgcacagacctcacaacatttcgcaaatgattttgaggccattcagtggccacttctccggtggcatatttcttctgaatgatcctgtctgtattagtgattttgattggatgaacctttggatttttgctgagtttgactttgggatcatcatgtggctgtgaaattgtcataagtccctcagtcccctccattgtagtagacatgcattgttttctggctgcctaagacccattcactctttcttcctagcagcagcctttctttcattattgggatgtcatcttctgcacccatgggatacagcctggtagatttttgatcagggctcttggcctctcctagtcaaaggctaagtttatgacccaagtcaggtcaattggatcctttctttctggaactggaatcttgaccagaggaacaaggagattggacataatggttttccatttcatctaagcactttcaaaagcatagaccagactatgcctgcttccctcccaccccgccaagacctgttcttaagatgctcattgaatccaggagttcttgatagctttctagagaattccctttcactcaagttcataagattgcaaccaaatttccaaatgagtgagaaagccacaaacaacaaacttctggggagaaaatggcacaatgagaaagattatgcgtggcctttggagaaaggcagaccaggtttgaatcacagttttaccattcaccagctgggtgcccttaggcaagttcatttttcccttaggatgtcagcatcattgtaaaataaggataatgagtcctgaagccctggttctcaaacttgcctgcatattgcaatcatctggggagacttaaaaaattactgatgcccgggccaatccccagagagtgtgatttaatgatttgggggtgctttttggatgttgggattttgtaaaccttgcaggtgtttctgatgtacagcagtgtttgagaaaattgacctcaagaaattcttcaaattatagggaagaataaatgaggtaagatatgtaaaacattcagcataatgtaaggatgataaaagtcactctgttctcctttcctgtcctttcttaaggtgaaccagaatcgcttgctgttgcttctagcacagttttctttgtttggagtagt

SEQ ID NO: 23843 - DNA, 2777 bp, Homo sapiens
  misc_feature (1)...(2777): n = A,T,C or G
atatagttatgatcatcatttttctgtaccatataatctaatctcttaagtagacaaaaagttccttgaggacaggagctggcatttctctatagaagcttagtacaatgcttgtgaaaataagacaaaatcaacatattttcaaaaatcaaattgaattggataggcagcagatttggtggaaagaccaggagcttagcgccaaggagatctggattcaaaaatctgtattcaggcccaggtgcagtggctcacacctgtaatcccagcactttgggaggctgaggtgggaggatcagttgagcctatgagtttgacacctacntgagctacatagtgagaccccatctgtacaaaatataaagataacaaaattagcttggcatggtggtacacaactgtggtgctagctactcaggaggctgaggtgggaaggataacttgagcccaggaggtcaatctgcagtgagccatgattgcaccactgcactctatcctgggtgacagagtgtgaccctgtctccaagaaaaaaaaaatctgtgttcaaaatgtgccctttgaaaaattacttgtctttctcataaaaaaaagacataaagacaataatacttatctcaaggattgttgtaagaactaaggatagtaaatgcaaaatgcctaacacacattcaatgctctaactaaattacagatattgtgaggtagtgtagcattgtggcaagcacctggatactccactcagacaaacctggtttcaaattccatcacttctcattgtgtgaatgtagataagtcccttcatctctttgggtctcaggatcctcatctgtaaaatgggtactatagtaactgtcttgtagggttattgtgaagatgaggaatgcttctgtctcagaccctgacacatagtagggacttaaaatggtacctatattagccacagttaacaatttgtgttcttttgtttgtatattgatttgtccatgaatttatgcactgaacaatgactcatgcaatgctaataactcacaatggcttcatttttcaagtttctgcatggtagtgtctgctgatgcctagatctgggaagataccctcatgggatagagaactagccctttggaaaggagctcagggtcccaggtaagctgcccgggacagtacactattttgacacatccacagctgagttttaattgtccctgttggcttttgaccctagagatcccctggcttcctccagttataatcgttttgctcagaggttcacattttctttcctcaccggatagatcctgtcccttgctgctgtgcagccgtgggcaaacatgttagctcttaccttgtgtctgttttttgtcagtgccttttttttacagcattgttttattggctgaaattcagcaaactataccagccttgtctttgtggtgtcaagccaggtcacgggggttcactttcccgggtagttcctgggacctgaagctctcttaggaaccatgactacgagcttctccttttcttccctaagacctcccaggagccccaaccttaccttttctgttttttaagagtctaaataatcggataaaagacatttaccttgtctttagaaaaatgcacagacctcacaacatttcgcaaatgattttgaggccattcagtggccacttctccggtggcatatttcttctgaatgatcctgtctgtattagtgattttgattggatgaacctttggatttttgctgagtttgactttgggatcatcatgtggctgtgaaattgtcataagtccctcagtcccctccattgtagtagacatgcattgttttctggctgcctaagacccattcactctttcttcctagcagcagcctttctttcattattgggatgtcatcttctgcacccatgggatacagcctggtagatttttgatcagggctcttggcctctcctagtcaaaggctaagtttatgayccaagtcaggtcaattggatcctttctttctggaactggaatcttgaccagaggaacaaggagattggacataatggttttccatttcatctaagcactttcaaaagcatagaccagactatgcctgcttccctcccaccccgccaagacctgttcttaagatgctcattgaatccaggagttcttgatagctttctagagaattccctttcactcaagttcataagattgcaaccaaatttccaaatgagtgagaaagccacaaacaacaaacttctggggagaaaatggcacaatgagaaagattatgcgtggcctttggagaaaggcagaccaggtttgaatcacagttttaccattcaccagctgggtgcccttaggcaagttcatttttcccttaggatgtcagcatcattgtaaaataaggataatgagtcctgaagccctggttctcaaacttgcctgcatattgcaatcatctggggagacttaaaaaattactgatgcccgggccaatccccagagagtgtgatttaatgatttgggggtgctttttggatgttgggattttgtaaaccttgcaggtgtttctgatgtacagcagtgtttgagaaaattgacctcaagaaattcttcaaattatagggaagaataaatgaggtaagatatgtaaaacattcagcataatgtaaggatgataaaagtcactctgttctcctttcctgtcctttcttaaggtgaaccagaatcgcttgctgttgcttctagcacagttttctttgtttggagtagt

SEQ ID NO: 23844 - DNA, 539 bp, Homo sapiens
ttttcttgaaaaatgtactcctctagaatgggtatgtgatcaccatttataaaaattctctcttgtttttgaataatattcaccatatgaaatatatcaatatctaaagaaaatggaactggaggtcattattctaagtgaagtaactcaggaatcaaaaaccaaataccatatgtctcacttacgagtgggcrttgaactactggtgcgcaaaggcatatagagtggtataatggacatgggaactccaagtgaggaggctcggagggggcgagggataaaaactgcctatggggtacaatgtgcactattcaggggatgggcgcaccaaaatcctatacctcaccactgtagaattcatccatgtaaccaaaactacttgtgcccctaagttactgaaattgaaacatttaagaaaaagaaaattcaaataaattaactttcctgaaaacaaagtttacaaagtaaaattcttctctataatcaacatcctatatagaaaatttaaagtaatctttaaaaagctattcataacaaat

SEQ ID NO: 23845 - DNA, 539 bp, Homo sapiens
ttttcttgaaaaatgtactcctctagaatgggtatgtgatcaccatttataaaaattctctcttgtttttgaataatattcaccatatgaaatatatcaatatctaaagaaaatggaactggaggtcattattctaagtgaagtaactcaggaatcaaaaaccaaataccatatgtctcacttacgagtgggcattgaactactggtgcgcaawggcatatagagtggtataatggacatgggaactccaagtgaggaggctcggagggggcgagggataaaaactgcctatggggtacaatgtgcactattcaggggatgggcgcaccaaaatcctatacctcaccactgtagaattcatccatgtaaccaaaactacttgtgcccctaagttactgaaattgaaacatttaagaaaaagaaaattcaaataaattaactttcctgaaaacaaagtttacaaagtaaaattcttctctataatcaacatcctatatagaaaatttaaagtaatctttaaaaagctattcataacaaat

SEQ ID NO: 23846 - DNA, 520 bp, Homo sapiens
tttggggaatcatcctctgtggaaaacaggtttcgctttattcaacatatgttccagaacttcttatctagcaaatgtctgtggcacttactgtggccaggcatggttcaagtgctttgcatacatcatctcatagaaactatgagatagsgatgattattatccacaacaaaggaggaaactgggacacaaaccttcaataatcttagataaccgagaaggctatggagatagcccaagtgggagaagacagtaggtagtttcttcagatcttcaatcctgtgaccataaaaggggtaaggaggggtagaagggtcgctgtcccactctaggcagaacaaaacatccaaactttatgcatccgacttcaggagttcagatgtcgtcacagacaccaacatattaacgttctcttgcaattattcatagctaaactcatcatgttcttgcttttggtagaaatataatcataagccttaaatttctttgatttcaccttagttaaaatttgatagaaacc

SEQ ID NO: 23847 - DNA, 646 bp, Homo sapiens
tcgcaaggacagaaaaccagacaccgcatgttctcactcataggtgggaattgaacaatgagaacacttggacacaggggaacatcacacactggggcctgttgtggggtggggggagggagaagggatagcattaggagatatacctaatgtaaatgatgagttaacgagtgcagcacaccaacatggcacatgtatacatatgtaagaaacctgcacgttgtgctcatgtacactagtacttaaagtwtaataataataaaaatttctagtcaacagcatgctgttagtacttaaacttttcgagaatcaacagttatatattggttttcgactgtgcagggaattggtgcccctaactgccatgtcgttcaagggtcaactgtatatgagtatgtgttttgagcatgatccaaagtaggcaaaatccattgggaacaacccattgtaatgaagtcacatgatggaaattttatgcaggtattaaaataatgaatatgaagactaagggaaaaatgtacatagtgttaaatagagcaggagataaaattaggaataattcaaatgcatatgcagttatttttaaggtatgtgcacaaaaggacaaataaaaaatttaatatactattattctaggaaggtaggg

SEQ ID NO: 23848 - DNA, 656 bp, Homo sapiens
agtgtatgcacacagaccaatgaaaataagtaactacagctacaccaacatgtaagaaccaccaaaacatgttgactgaaaaaaaaattcacaagagaattatatatattaattatgttgttaattatctctatgtgtacacatatataaacttctttgcaaattgtattgattgcttatttcatgcttatgaatttcaaaaacataaaatgactatattttgtttacaaatacatacaaatgtggaaaccctataarggaatgataataaagttcaggatgtcatttacctctgaggaaaggaggagtgcacgactaagaagtggcagggccttctgaggttctagcaatattccatttcttaagctgggaggtttttataagaattcactttttgatttatatactatattaaatacagtatatatgtttaatacaatatactatattatattatatttaatatatatttaatatacactatatttaatataaatatacacaatatatactatatatttaacatatatatttatataacataggtacttttatataccctttagtagttgtgatatatttcaccagttaaaatgtttaaaacaaataataaagacttgacctagaattataactgtggacacataagggaatgc

SEQ ID NO: 23849 - DNA, 656 bp, Homo sapiens
agtgtatgcacacagaccaatgaaaataagtaactacagctacaccaacatgtaagaaccaccaaaacatgttgactgaaaaaaaaattcacaagagaattatatatattaattatgttgttaattatctctatgtgtacacatatataaacttctttgcaaattgtattgattgcttatttcatgcttatgaatttcaaaaacataaaatgactatattttgtttacaaatacatacaaatgtggaaaccctataagggaatgataataaagttcaggatgtcatttacctctgaggaaaggaggagtgcacgactaagaagtggcagggccttctgaggttctagcaatattccatttcttaagctgggaggtttttataagaattcactttttgatttatatactatattaaatacagtatatatgtttaatacaatatactatwttatattatatttaatatatatttaatatacactatatttaatataaatatacacaatatatactatatatttaacatatatatttatataacataggtacttttatataccctttagtagttgtgatatatttcaccagttaaaatgtttaaaacaaataataaagacttgacctagaattataactgtggacacataagggaatgc

SEQ ID NO: 23850 - DNA, 656 bp, Homo sapiens
agtgtatgcacacagaccaatgaaaataagtaactacagctacaccaacatgtaagaaccaccaaaacatgttgactgaaaaaaaaattcacaagagaattatatatattaattatgttgttaattatctctatgtgtacacatatataaacttctttgcaaattgtattgattgcttatttcatgcttatgaatttcaaaaacataaaatgactatattttgtttacaaatacatacaaatgtggaaaccctataagggaatgataataaagttcaggatgtcatttacctctgaggaaaggaggagtgcacgactaagaagtggcagggccttctgaggttctagcaatattccatttcttaagctgggaggtttttataagaattcactttttgatttatatactatattaaatacagtatatatgtttaatacaatatactatattatattatatttaatatatatttaatatayactatatttaatataaatatacacaatatatactatatatttaacatatatatttatataacataggtacttttatataccctttagtagttgtgatatatttcaccagttaaaatgtttaaaacaaataataaagacttgacctagaattataactgtggacacataagggaatgc

SEQ ID NO: 23851 - DNA, 656 bp, Homo sapiens
agtgtatgcacacagaccaatgaaaataagtaactacagctacaccaacatgtaagaaccaccaaaacatgttgactgaaaaaaaaattcacaagagaattatatatattaattatgttgttaattatctctatgtgtacacatatataaacttctttgcaaattgtattgattgcttatttcatgcttatgaatttcaaaaacataaaatgactatattttgtttacaaatacatacaaatgtggaaaccctataagggaatgataataaagttcaggatgtcatttacctctgaggaaaggaggagtgcacgactaagaagtggcagggccttctgaggttctagcaatattccatttcttaagctgggaggtttttataagaattcactttttgatttatatactatattaaatacagtatatatgtttaatacaatatactatattatattatatttaatatatatttaatatacactatatttaatataaatatacacaatatatactatatatttaacatatatatttatataacataggtacttttatataccctttagtagttgtgatatatttcaccagttaaaatgtttraaacaaataataaagacttgacctagaattataactgtggacacataagggaatgc

SEQ ID NO: 23852 - DNA, 585 bp, Homo sapiens
ccctttgcgccttctgaaatggcctgggagttagcagaggtcgggaagctgctgtaagagcgaaacgttgccccacttggcggtgtccaggtctcgcagtaggctcgggtcacaggagggagggggtaggggttcagctccgccgaaagagttagctaccgtcccctcctttctcggccggagacgttaagagttcccggtgaatgacaccgtccagggtcagaagtcagtggtggctatactcggaataaggctgacagttcgcagtgagggaaaacgtgtaacctggcaggatgaggaacacgcaatgaaaatgaacccagggaaaccaaagatttctaagagctgtattttattgtggtccaaagaaaggactgagagctgcttaagggaaacagcatttataaagcccaaacattaaatatatattgcaacagaaatacaatcttaatggagataactgaattgtaatagtttaagaaacggtcttttcagaaaactaaacagygagcaaaacaatgttcaattttaaaacgcccagacgtgactcacacacagcaaccgcctatgggagagcagtagttt

SEQ ID NO: 23853 - DNA, 639 bp, Homo sapiens
catattttattagatctgtatgagactaaattgctttatgtactaaaatattattcattttatacttatattatttttatatattataatgtatttttacaaatatatttatatatttactacataagatatatatttatattatttatttattttatcatttatatattcattcaacaagtatctcctgagcacaagtactgtctaggtgtggtaaaaatattcaacagtgagaagtcagataaggtcctcgttttcatgtaccagtaagggagaaacaggaaatataaaattaaaataaatgatagtgataaaagtcacaaaaatagaacagggcaatctgttcatgaaggcctccgaagatgagtagtctatcttagagttggtcagggaaacttttgagaaggctacagttgagctaagaccctggtgatgagatgcaacaagcaacatgaaaccatggggcagaatgttccaggaaaggggaacrgagaggcagggcattatggatcatgcctgtaatctcagcatttcgggaggctaaggcaggagtatcacttgagcccaagaatttgaaatcagcatgagcaacatagtgagaccctgtccctacaaaaaagaaaaaaaaaattccaggtg

SEQ ID NO: 23854 - DNA, 525 bp, Homo sapiens
aaagcatttgtaattgattgtagagaccattttctattttatgctagatgctttacatatcgctttacagctgtatcatctattattttcacaagaattccaagttagatatkatattttcccatttcatctaaggcaggaaactgcagcacaccaatttaaaataacaaaccaaggtcacacagccagtaaagagtggagccaagttttgaacccaggtcaggctctcctttgatgcatttcacaatgaatatttccgacatgatcttctagggcacttgcgcatgcctccctagtcgtcatttggaagtagggcaggtgtcaagaacatgagccctggcaccacactgcttgtttgaatcctgcctctactattaacacctatatgaagttgagcaagttacttaataatatctctgggcctcaattttctcattttaatatggaaatattaaaagtacccatctcattgggttactgtgagggattaaataagttagtatccggcacattgtttgaactata

SEQ ID NO: 23855 - DNA, 779 bp, Homo sapiens
cgctgacacaggtgctttctctccgagccaatcagggagcagaaaggctcagctcagctaacagaggcattgctcaccgcagctgtgagttagaactcaggctttctaaatcgggaggatcaggcatgacttgaggttgggctgagaaagcctcgcctgccccccagctcgactacccagtgaaacctttggcttctgcctygggcgaggcatctcttaccatgccaagaactcagcagcccatctttctttcatctgggcaccaagtacatcattgcatatttcagggggtttcattgtgtccttaacatgctcatggagacttggcttgagatgaagtcggggtttctaggcagcaggacccatgtccccttccttcatttcctccaccggtgatttttgttttgttttgttttgttttgttttgttttgttttgtttttgagacggagtctcgttctgttgtccaggctggagtgcagtggcgttatctcggctcactgcaaactctgcttcccgggttcaggtgattctcctgcctcagcctcccaagtagctgagattacaggcgtctgccactatgcccagctaatttttgtatttttagtagagacggggtttcaccatgttggccaggctggtctcgaactcctgacctctggtgatccacccgcctcggcctcccaaagtgctgggattacaggtgtgagccaccgcaccaggcccttccactggtgttttttgagcatctactatatagagaatgctctcctgggcaca

SEQ ID NO: 23856 - DNA, 1207 bp, Homo sapiens
aagmgccaggctcgattttgaacccccctgaagtgagtccctctaccacccgccatgctcctcaaacagcaacccccggagaccacacagggcccagccccgtttagtctataactgcaaaaccacatacaaaagggataggggactcatcgctgagccccagggacccatccagcccgttcatttttacacagagggcagctggttggaactgtgcggagaagcggcacatctgggcatggcacagtggccagccagcctgggcagcagggtgtgtcccccctcctggaatctgggtcatgcttagataactgctagaaagcccgactaattacccacccttgcctgcctacatctcgatagatgttaagccctcctcaaggtttatttcaagcaggcagggatttaaagaaacacagaagatctgcattttgatagcatctccacagaagaaaatgtgggcttcacctttttcctctggatctttgattaaaaaaaaaaaaatttaaaaggcatttacctacctaagatgtccacatgggtgctgattctcctggtgttccctctcggctactcggggtaggaaaagctggacatggtgctctaaaatggacccaccacctcatttgctgttgccctgtctttcttactgaaagtgtccagatcaggtcttcccaggccaggggcccagataaagcaagtgggatctctttctcgacacccccaaagatgatgaggttccccaatcagcggttaaaggcaatgggacctgcacacatgagggaaacataagcgccccccagcccatcactatcctctccagataggaacagcggcccaccctggggtactcacttcggccagtgctggcttctcagtgtgaaggccacatggactccctcttgctcttagccctgggagcccccaagcgccctgccctaaaagtgcggcggccccccaccttggggaaagcagtagtggagaggctgtccagcttcccctgcgtggactccagtgagcgacggccaagaaaacccaaccaaggcccccatagttcccctgccctggccagaagcgcccaggcccgagcccgctccaagctcactccgtagaactccaaaccctccggacttggctcgaaagcccccaccaaggctcctgcacgaccccaggccccagatctcattctagagtcggtccttgggaa

SEQ ID NO: 23857 - DNA, 1207 bp, Homo sapiens
aagcgccaggctcgattytgaacccccctgaagtgagtccctctaccacccgccatgctcctcaaacagcaacccccggagaccacacagggcccagccccgtttagtctataactgcaaaaccacatacaaaagggataggggactcatcgctgagccccagggacccatccagcccgttcatttttacacagagggcagctggttggaactgtgcggagaagcggcacatctgggcatggcacagtggccagccagcctgggcagcagggtgtgtcccccctcctggaatctgggtcatgcttagataactgctagaaagcccgactaattacccacccttgcctgcctacatctcgatagatgttaagccctcctcaaggtttatttcaagcaggcagggatttaaagaaacacagaagatctgcattttgatagcatctccacagaagaaaatgtgggcttcacctttttcctctggatctttgattaaaaaaaaaaaaatttaaaaggcatttacctacctaagatgtccacatgggtgctgattctcctggtgttccctctcggctactcggggtaggaaaagctggacatggtgctctaaaatggacccaccacctcatttgctgttgccctgtctttcttactgaaagtgtccagatcaggtcttcccaggccaggggcccagataaagcaagtgggatctctttctcgacacccccaaagatgatgaggttccccaatcagcggttaaaggcaatgggacctgcacacatgagggaaacataagcgccccccagcccatcactatcctctccagataggaacagcggcccaccctggggtactcacttcggccagtgctggcttctcagtgtgaaggccacatggactccctcttgctcttagccctgggagcccccaagcgccctgccctaaaagtgcggcggccccccaccttggggaaagcagtagtggagaggctgtccagcttcccctgcgtggactccagtgagcgacggccaagaaaacccaaccaaggcccccatagttcccctgccctggccagaagcgcccaggcccgagcccgctccaagctcactccgtagaactccaaaccctccggacttggctcgaaagcccccaccaaggctcctgcacgaccccaggccccagatctcattctagagtcggtccttgggaa

SEQ ID NO: 23858 - DNA, 1207 bp, Homo sapiens
aagcgccaggctcgattttgaacccccctgaagtgagtccctctaccacccgccatgctcctcaaacagcaacccccggagaccacacagggcccagccccgtttagtctataactgcaaaaccacatacaaaagggataggggactcatcgctgagccccagggacccatccagcccgttcatttttacacagagggcagctggttggaactgtgcggagaagcggcacatctgggcatggcacagtggccagccagcctgggcagcagggtgtgtcccccctcctggaatctgggtcatgcttagataactgctagaaagcccgactaattacccacccttgcctgcctacatctcgatagatgttaagccctcctcaaggtttatttcaagcaggcagggatttaaagaaacacagaagatctgcattttgatagcatctccacagaagaaaatgtgggcttcacctttttcctctggatctttgattaaaaaaaaaaaaatttaaaaggcatttacctacctaagatgtccacatgggtgctgattctcctggtgttccctctcggctactcggggtaggaaaagctggacatggtgctctaaaatggacccaccacctcatttgctgttgccctgtctttcttactgaaagtgtccagatcaggtcttcccaggccaggggcccagataaagcaagtgggatctctttctcgacacccccaaagatgatgaggttccccaatcagcggttaaaggcaatgggacctrcacacatgagggaaacataagcgccccccagcccatcactatcctctccagataggaacagcggcccaccctggggtactcacttcggccagtgctggcttctcagtgtgaaggccacatggactccctcttgctcttagccctgggagcccccaagcgccctgccctaaaagtgcggcggccccccaccttggggaaagcagtagtggagaggctgtccagcttcccctgcgtggactccagtgagcgacggccaagaaaacccaaccaaggcccccatagttcccctgccctggccagaagcgcccaggcccgagcccgctccaagctcactccgtagaactccaaaccctccggacttggctcgaaagcccccaccaaggctcctgcacgaccccaggccccagatctcattctagagtcggtccttgggaa

SEQ ID NO: 23859 - DNA, 582 bp, Homo sapiens
attctacagtttcttgtttcttcggttcaacattatgtctttaagattcatctggcagggcacggtgtctgcrcctgtaatcccagcactttgggaggcagagcatgaggattgcttgaggccaggggtttgagacaagcctgggcaatatagcaagaccctgtctctccaaaaaccttttttaaaataaaaattaaccaggcatggtgatgtgaacctagtcccagctacttaggaggctgagatgggaagatcccttgagtccaggatgttgcagtgagccaagatcaaaccactgccctccagcctgggcaacaaagtgagactctgtcaaacaaaacaaaacaaaacaaaaacaaacaaacaaaaaaaacaagattcatacatcctaatctgtttcgaattttagaaaaattcacctgtttgttgtcacacatggctgtgattcattcactttcactgctgtatagtatttcatcaagagaatatgccacaatttgtttatccatcatcttgttgatgggtatctgttttttttccagttggggctattaaacattactgcctcaggtacctttggtg

SEQ ID NO: 23860 - DNA, 582 bp, Homo sapiens
attctacagtttcttgtttcttcggttcaacattatgtctttaagattcatctggcagggcacggtgtctgcgcctgtaatcccagcactttgggaggcagagcatgaggattgcttgaggccaggggtttgagacaagcctgggcaatatagcaagaccctgtctctccaaaaaccttttttaaaataaaaattaaccaggcatggtgatgtgaacctagtcccagctacttaggaggctgagatgggaagatcccttgagtccaggatgttgcagtgagccaagatcaaaccactgccctccagcctgggcaacaaagtgagactctgtcaaacaaaacaaaacaaaacaaaaacaaacaaacaaaaaaaacaagattcatacatcctaatctgtttcgaattttagaaaaattcacctgtttgttgtcacacatggctgtgattcattcactttcactgctgtatagtatttyatcaagagaatatgccacaatttgtttatccatcatcttgttgatgggtatctgttttttttccagttggggctattaaacattactgcctcaggtacctttggtg

SEQ ID NO: 23861 - DNA, 1126 bp, Homo sapiens
aaactaaaaagtcatgacaatccactttatttcaaatttaaaaattaatataagactttacctccagatcctaactgcttatagaatctgtattccaaatgtagctgtggtgctctgatttcatgggctcctaattgaaaaacaaacaaaaaaagacatttaagttattaaaagagcactaggtcccaacacaaatgttataaattttggtgtcaatgcctatattatgtaatagtctaccaggcatcttgtctaagattagattcatataaaaatcaactttctgttcaatgtaaaataaaatgatactacaaatgtacataaactaagtagccattagatcaggcaggagaaaaatcccttaagtttgactctttgaccctgagaaaaatatgttctgaacattcatcactagagaaatgatggctcttatgctatttctcctgttctccaaattcacctctgaactgtgtatttcttacataaaggttctagattaaagttaagtcataggatagtaagaacaaagatggtaatttgaaaattttgatagtagcaacaatgtcttaattttttttcactaaagtataacttatatgcaataaaacacacagttcataagcgttaaatacatattaactccatatatccctataaccaccacaccaatctatagaacatttccatcataccttttttacttctatcacctttggattagttttgcctgttgctggatttcacctaaatgatattatacagtatatgctttctgttgtgtccagcttttatcattcgacatamatgtttttgagattcatatacacacaccacacacacacacacacacacacacacaaacatgtacagaggaaacatgggttttagacgttagaaataatattaaatatgaaaatacaagaagtagaaaactgtaacagggtaacaggaaattttaaaaagaaccaacagaaaagtataacaaggtaatagaaaatttcaaaaagaatcaatagaactttgaaaaataagagaatacaataactaaatttaaaactcattttgccagcagattaacagaagagagaatttggaaactgtaaggcagacagaaaaactatataga

SEQ ID NO: 23862 - DNA, 1172 bp, Homo sapiens
ggatcctgggggcaaataactggaggaaaaaacgtgtcatggcctgagaagttgcttgctggattcctccaagctgaggacttgcttcagtcagtcatttattcattcagcaaacacttctacaaatactggcagccaaagtgtgacacagttaagttctcacccagaagaagctgtccagtggggagactgacacaaaactggacaagcatattagcatgtgacaagtactgggatgagggaagtcccccatcctgcctggaaatggctttacaagaggctgactgtgagtacagactcctcaggagggccctcctggcagcaggcacggcacattccacagcagcttgacagccaaaactgagcagaagagaggcaggatggacagtgttgttgagggagggcctctgaggccctgcggaagagctgtggctttatcctaccggtgagagaagtcactgagggttttaatcaaagcatgcacttggtcacacctgcatcctaagattatgccgtggccaaatggaaggtagcttggaggattccaggcaggaagacctcgagttcgatgcctcaggcaggaaacgcaggccaagggagagatgattgattgtggggccagagaagaagagagggattttcagaggaagctgaagtgatgggcctttgatctgatggcaggagagggagatggaggcagggatgtctcccaggtgtttgcttggtgaccagcaagatggtggtgcctttcactgagccaggatgggatttgcagaagacagtgaattcagttgaggcatgttgactcgaaggttcccgtgagacatctaagtggagaagtgcagggctagcatttaccagcgcagagatgtaattgaagccaggggaatgaaccaggcctcgggactgaggacagaacctggtgatctattcctcggcagccctcctgccagatgagccccagagcttgatggcttgtcccttgtggcttctttrcctcttcacctgcctactcccaactgcatctgcacagtgacacgtttaggagcccagcatccgaagagatttgggtgtaacaaccagctagttccagttcctgggtggtcaaacagccctagtgctttggaaagcagaagtgattcaccatcctttttcagccccaaggacaacca

SEQ ID NO: 23863 - DNA, 1033 bp, Homo sapiens
tgttggttccacccagcccctcttccacgtatctggacgctaggccgggcactttaccatttccctgcttcttggtgtcccggcgtcctctttatgactccggagcaggtcacagcgcaggtgacagcgtcacaggagccgtggcggaggcacctggggcctctcggagcagcaaggactggatgcagaacgcaacggaccccagcaacaaaggagtgcagagactctgagtgcggccttctgcttccccggattgacagttggcagggccccgtcccagggcccctgattggatggggttccaggctccgcccctcagccctgagtgacagggtaagccctgggtaacggagccctgcagagcccggctgattaatcctagctacagcctttctaaggctaagctcactccctgcgccctggtcgttggctatctgcatttcagccaaacttgctacttattgttagaaggggcactgttagcttcctcgatctttcagaaatgtgtgctgggaattccagactcggtgttcaatggagtcattcctttgcctcatagcaggaaggaaatccaggccaggccaggccaggcaagactgcaccaggagggagaggcaggtgtcctctacagggcgggaattggggatgagacttcctcacactccccccgtcccacccctgaatatggaaccgcttcctccccctagacttcattttcaccagcagaagttctcacctggggtcagtttaagcttctaacctaagtaaactattaccttcacaaaccctttctccaggtgacatgtcagacaaatcttactgagcctgatcttcacagattatctttgtatgtacaaattacagtctgtcgccgggaccctttgcacgtaaaaaccaaacactgcccccgcaaaacgtccmtaggctctaggtacagccccagtaaggacagaacctccccccaacccccctacacaaagtgcacctgcacgtgagtctcctgctttccagggctctgtagcttctcaggatc

SEQ ID NO: 23864 - DNA, 868 bp, Homo sapiens
gatccatcaggagggtggccagaggagcagggggtaaaactccacagggagaaggaaatctctagctgaactttgtaacaatttgaatggggtgagaagtcactggccagaactcaggggagggcgcaaatccagtgtgcacactccacaggtgggggaagaaccaagtgctttttttcccccgcagctgggaggcggtcagcctggggcaacttttcaagtccgtctcaccctctacctggaaacagactcggggctactggcgggggcagggcacagtgggagtgagaccggcccttcagttttttatgggagctgkgtgaggcctgtgactgctggctttctcccacttccctgaaagtctgttgactcagcagaggcagccataatcctcctaggtacacaactccagtgacctgggaatcgcaccccaatcccccacagcagccgcagcaggacctgcccaaggaaagtcagagctcagacatgcatagccctgcctccacctgatggtccttacctacccatcctggtagcggaagaaaaagggcatataatcttgggagttctagggctccgcccactgccagtccctctccatactactacagctgatactctctggaaaatgccacctcctgtcaggaggacaaccggcacaaaactagagcattaaatcactaatgctaagaaccctcacagagtccattgcacccccccacaccacctccaccagaacaggtgctggtatccacggctgacagacccatagatggttcacatcacaggattctatgcagacaacccccagtaccagtctgaagctgggtagacacactgggtggctagacccagaagagagacaaca

SEQ ID NO: 23865 - DNA, 770 bp, Homo sapiens
tcctcaaaagcaaatgctaagacaaaaaattaagtgcaattatttaatttaggagttgcagagaaaggagacaacctataaaagatcagatattaaattggctaatacagtgggaaagcctgggaactgtgtaaaatacatgcttcaaaacgttctgccaaaggaaccagaaagttgatgtacttatacagcaatgtctgagagtcactggtagggagatactctcagggagtatcaatttcttgccacttataagagttagacggaagcttgtaaaattccaagaaaagccctcaagcacacagatatcctaatactgcacacgggaggttggtggaatatactggaatgtaagtctgagagatatggcagggcattgaaagcatctactccattacaaaagttcagactgcctttacttttgatctatcaccatcatagagtaggcagttctattttattaattacaaattatttttccagcaagtgacaaggaacctcactaacaatggcagtccagagcttcgttagcagcctactaacattaacatcatcaacgatccaggcttttttcatccttctctactatccctaacatartaaagcacaccaacactgctggaaccacagcaaactgaggtctttggttcttattcatccagtcatctcatggttgcaggatggctgttataactctaaaacttctaacaaagatcaaagggaggaaagaagaggagaaggaaggagcagggcagtttaagctactattt

SEQ ID NO: 23866 - DNA, 760 bp, Homo sapiens
cctgaggtcaggagttcaagatcagcctggctaacatggtgaaatcccgtctctgctaaaaatacaaaaattaaccaggtgtggtggtacatgcctgtaatcccagctactcgggaggctgaggyaggagaaccacttgaacccgggacgcagaggttgcagtgagctgagatcatgccactgcactccagcctgggtgacagagcgagactctgtttaaaaaaaaaaaagagagagcaaaagagagaaaggaaaagagaggaaagaaacccctgctctagaggtacaggaaccaaatactcccttcctgaagcctcacaacactgtattagaggcaggcactaatatatacccatttcacagaagggaaaactgaggctccaggagggaaagtgacagggccaagctcagacagctgagctgggtgctcacactgctcttgagcacacaagacttagtgtttgatagatcagtagggtgactacagtaaacagtaatccattatacatttcaaaatagctaggagaggccagacatggtggctcatgcctgtaatcccagcgctttgggaggcaaaggcagtcggatcacctgaggtcaggagttcgagaccagcctggccaacatggtgaaaccctgtctctactaaaaatacaaaaattagccaggcgtggtgatgcttgcctgtaatcccaactactcgggaggctgaggcaggagaatggctggaacccgggaggtggaggttgcagtgagctga

SEQ ID NO: 23867 - DNA, 760 bp, Homo sapiens
cctgaggtcaggagttcaagatcagcctggctaacatggtgaaatcccgtctctgctaaaaatacaaaaattaaccaggtgtggtggtacatgcctgtaatcccagctactcgggaggctgaggtaggagaaccacttgaacccgggacgcagaggttgcagtgagctgagatcatgccactgcaytccagcctgggtgacagagcgagactctgtttaaaaaaaaaaaagagagagcaaaagagagaaaggaaaagagaggaaagaaacccctgctctagaggtacaggaaccaaatactcccttcctgaagcctcacaacactgtattagaggcaggcactaatatatacccatttcacagaagggaaaactgaggctccaggagggaaagtgacagggccaagctcagacagctgagctgggtgctcacactgctcttgagcacacaagacttagtgtttgatagatcagtagggtgactacagtaaacagtaatccattatacatttcaaaatagctaggagaggccagacatggtggctcatgcctgtaatcccagcgctttgggaggcaaaggcagtcggatcacctgaggtcaggagttcgagaccagcctggccaacatggtgaaaccctgtctctactaaaaatacaaaaattagccaggcgtggtgatgcttgcctgtaatcccaactactcgggaggctgaggcaggagaatggctggaacccgggaggtggaggttgcagtgagctga

SEQ ID NO: 23868 - DNA, 760 bp, Homo sapiens
cctgaggtcaggagttcaagatcagcctggctaacatggtgaaatcccgtctctgctaaaaatacaaaaattaaccaggtgtggtggtacatgcctgtaatcccagctactcgggaggctgaggtaggagaaccacttgaacccgggacgcagaggttgcagtgagctgagatcatgccactgcactccagcctgggtgacagagcgagactctgtttaaaaaaaaaaaagagagagcaaaagagagaaaggaaaagagaggaaagaaacccctgctctagaggtacaggaaccaaatactcccttcctgaagcctcacaacactgtattagaggcaggcactaatatatacccatttcacagaagggaaaactgaggctccaggagggaaagtgacagggccaagctcagacagctgagctgggtgctcacactgctcttgagcacacaagacttagtgtttgatagatcagtagggtgactacagtaaacagtaatccattatacatttcaaaatagctaggagaggccagacatggtggctcatgcctgtaatcccagcgctttgggaggcaaaggcagkcggatcacctgaggtcaggagttcgagaccagcctggccaacatggtgaaaccctgtctctactaaaaatacaaaaattagccaggcgtggtgatgcttgcctgtaatcccaactactcgggaggctgaggcaggagaatggctggaacccgggaggtggaggttgcagtgagctga

SEQ ID NO: 23869 - DNA, 2022 bp, Homo sapiens
gcaggagaacctgggcctggggctagggggctcagaggctgaggctgtttccaccagcagatcttcccaccctctctgtccacagacacccagtagagggggaaccgagagagaggktccgggtggtgcagcaggggaccggacgggagaaccctctgaccctctgcactggcggttcccaagcctggctgcacctgaaagtcaccctggggagctttaaaatgtttctggcagggtgcggtggctcacgcctgtaatcccagcactttgggaggccaaggtgggcagatcacctgaggctgggagttcgagaccagcctggccaacatgctgaaaccccatctctactaaaaatacaaaaattagctgggtgcggtggtgtgcgcctgtaatcccagctactcgggaggctgaggaaggagaatggcttgaactgggaggaggaggttgcagtgagccgagatcgtaccactgcactccagcctgggtgacagagtgagactccgtctcaaaaaaataagtagctgggcgcggtggctcacgcctgtaatcccagcactttgggaggccaagatgggcggatcacaaggtcaggagatcgagaccatcctggctaacacagtgaaaccccgtctctactaaaaatacaaaaaaaaaaaattagccaggcatagtggtgggcgcctgcagtcccagctactcgggaggctgaggcaggagaatggcttgaacccaggaggcagagcttgcagtgagccaagatcgtgccactgcactccagcctggacgacagagcaagactctgtctccaataaataaataaataaataaataaaaagtaaacaaacaaataaaaagtaaacaaataaataaataagatgtttctgatgtcctggcacccctgcccccaccccggctgcggctcctgtccgaggcagagcctaggcactagggaaatttggaaccagaccattcactgtctgttttgggagctatcgtaggatccccggcctccaccccgagatgccagtaacaatccccgcctccagttgtgaccactaagtacgtctctagatggtccccatgggagacagaatcatcccgggtgacaatttctgggctagacggagaagtgagccaccaatgggccccataatatagcccattacacggcctcccaatccccaggaagctctggtctctgggggactttctttctttcttcagttggggtcttgctctgttgcccaggctggtctcgaactcctgggctcaagagatcttcccaagtagctgggattataggagcgcaccaacacgccaggctccttggggagacattcttttttcttttttttttttttttgagacagactctcgctctgtctctcaggctggagtgcagtggcgcaatctcagctcactgcagcctccgtctcccaggttcaagtgattctcctgcctcagcctcccatgtagctgggactacaggcgcccaccaccacacccggctaattttttgtatttttagtagagacggagtctcaccgtgttagccgggatggtctccatctcctgacctcgtgatccgcccgcctcggcatcccaaagtgctaggattacaggcgtgagccaccgcgcctggctccaactcctatttctaatcatatcacactcctgtcccccgctccagcctctctaaattctctcctcccctctacagccaagatgatcctattcacttttttttgtttgtttaattttagagacagaatcttgttctgtcacccaggctggagtgcagtgaggcaagcatagctggagtgcagtggtgcaatcatagctcactgtagcctcaacctcctgggctcaagtgatcctcctgcctcagcctcctgagtagctgggaccacaggtacacgccaccacacaccacacccagctaattatttttattttttgtagaaatggggtcttgctatgttgcccaggctggtctcaaactcctgggctcaagggatc

SEQ ID NO: 23870 - DNA, 1237 bp, Homo sapiens
gtgcaaggctgatctgtgcatggcaaatggtccatttctgaaaactgccaatagatattctctcaaaatagaaatgatattctatccattcctgttcttatattgaaatgtaaaattgattttgatacaagaataatttmgctattttgatagttgcttttgaatagtattttcaccacaccacactgggactccagatgttttccaaaatatcttttgggattggaagagattttagagacaagctctgggtcaccacagaacagttgcctcctgcgccctgtggggccaaacccccaaatcagcagggaccacgctgtctctagctgagagcagacgtgggctgcaccttctcttttcttctttgttttcctctacttctaaagaaagcttcaggtgaggaacagtaatggggtttggctgtgattgtgactttgcccagtcctgtctgaccttgtatacacaccagttcaactcaatagcatttcaagtggaaaaaaaacttgaccatttgggtcatcccctcagcctctctctgctccctttggcccactatgcagcaaaatgttctacactcaggctggtgcttttgtgatttccttgctttctctgtgggaatcagcagaataagacagaagggaatagtcagagatgggagggagacctgcagttggcagaatttctcaggcctcatgctctctgcctctgggcttttcaaggaagatagagcattttagagtgtatttatacctattatttatctgacattttcactttccttgacttcaactttttcctgctgagcatttgccaggaatgaggaagaacaatatggaatttgccatgagaggatctttgtataacttggatgacttggataactttgtataacttggatgacttggataacttggatgattagcctatggaactgtgttgtgggactatccaggtggtatattatttaggtcttggctcttccttctctgccctctggcttacctttcagctataatgtcagttttctttctttgcttggaaagtgagcagggaaaataaagaaaggacaatcaggcaatttttttattagtagcttttataatatattttttcatggcaaaatttaaataattgactcctatgatgtttgtgacattttgtgttgctttgacatatgccttatacacacgtatgcacacacagagaggatacctttaccaggcatggtttatgcaca

SEQ ID NO: 23871 - DNA, 1237 bp, Homo sapiens
gtgcaaggctgatctgtgcatggcaaatggtccatttctgaaaactgccaatagatattctctcaaaatagaaatgatattctatccattcctgttcttatattgaaatgtaaaattgattttgatacaagaataatttcgctattttgatagttgcttttgaatagtattttcaccacaccacactgggactccagatgttttccaaaatatcttttgggattggaagagattttagagacaagctctgggtcaccacagaacagttgcctcctgcgccctgtggggccaaacccccaaatcagcagggaccacgctgtctctagctgagagcagacgtgggctgcaccttctcttttcttctttgytttcctctacttctaaagaaagcttcaggtgaggaacagtaatggggtttggctgtgattgtgactttgcccagtcctgtctgaccttgtatacacaccagttcaactcaatagcatttcaagtggaaaaaaaacttgaccatttgggtcatcccctcagcctctctctgctccctttggcccactatgcagcaaaatgttctacactcaggctggtgcttttgtgatttccttgctttctctgtgggaatcagcagaataagacagaagggaatagtcagagatgggagggagacctgcagttggcagaatttctcaggcctcatgctctctgcctctgggcttttcaaggaagatagagcattttagagtgtatttatacctattatttatctgacattttcactttccttgacttcaactttttcctgctgagcatttgccaggaatgaggaagaacaatatggaatttgccatgagaggatctttgtataacttggatgacttggataactttgtataacttggatgacttggataacttggatgattagcctatggaactgtgttgtgggactatccaggtggtatattatttaggtcttggctcttccttctctgccctctggcttacctttcagctataatgtcagttttctttctttgcttggaaagtgagcagggaaaataaagaaaggacaatcaggcaatttttttattagtagcttttataatatattttttcatggcaaaatttaaataattgactcctatgatgtttgtgacattttgtgttgctttgacatatgccttatacacacgtatgcacacacagagaggatacctttaccaggcatggtttatgcaca

SEQ ID NO: 23872 - DNA, 1237 bp, Homo sapiens
gtgcaaggctgatctgtgcatggcaaatggtccatttctgaaaactgccaatagatattctctcaaaatagaaatgatattctatccattcctgttcttatattgaaatgtaaaattgattttgatacaagaataatttcgctattttgatagttgcttttgaatagtattttcaccacaccacactgggactccagatgttttccaaaatatcttttgggattggaagagattttagagacaagctctgggtcaccacagaacagttgcctcctgcgccctgtggggccaaacccccaaatcagcagggaccacgctgtctctagctgagagcagacgtgggctgcaccttctcttttcttctttgttttcctctacttytaaagaaagcttcaggtgaggaacagtaatggggtttggctgtgattgtgactttgcccagtcctgtctgaccttgtatacacaccagttcaactcaatagcatttcaagtggaaaaaaaacttgaccatttgggtcatcccctcagcctctctctgctccctttggcccactatgcagcaaaatgttctacactcaggctggtgcttttgtgatttccttgctttctctgtgggaatcagcagaataagacagaagggaatagtcagagatgggagggagacctgcagttggcagaatttctcaggcctcatgctctctgcctctgggcttttcaaggaagatagagcattttagagtgtatttatacctattatttatctgacattttcactttccttgacttcaactttttcctgctgagcatttgccaggaatgaggaagaacaatatggaatttgccatgagaggatctttgtataacttggatgacttggataactttgtataacttggatgacttggataacttggatgattagcctatggaactgtgttgtgggactatccaggtggtatattatttaggtcttggctcttccttctctgccctctggcttacctttcagctataatgtcagttttctttctttgcttggaaagtgagcagggaaaataaagaaaggacaatcaggcaatttttttattagtagcttttataatatattttttcatggcaaaatttaaataattgactcctatgatgtttgtgacattttgtgttgctttgacatatgccttatacacacgtatgcacacacagagaggatacctttaccaggcatggtttatgcaca

SEQ ID NO: 23873 - DNA, 1237 bp, Homo sapiens
gtgcaaggctgatctgtgcatggcaaatggtccatttctgaaaactgccaatagatattctctcaaaatagaaatgatattctatccattcctgttcttatattgaaatgtaaaattgattttgatacaagaataatttcgctattttgatagttgcttttgaatagtattttcaccacaccacactgggactccagatgttttccaaaatatcttttgggattggaagagattttagagacaagctctgggtcaccacagaacagttgcctcctgcgccctgtggggccaaacccccaaatcagcagggaccacgctgtctctagctgagagcagacgtgggctgcaccttctcttttcttctttgttttcctctacttctaaagaaagcttcaggtgaggaacagtaatggggtttggctgtrattgtgactttgcccagtcctgtctgaccttgtatacacaccagttcaactcaatagcatttcaagtggaaaaaaaacttgaccatttgggtcatcccctcagcctctctctgctccctttggcccactatgcagcaaaatgttctacactcaggctggtgcttttgtgatttccttgctttctctgtgggaatcagcagaataagacagaagggaatagtcagagatgggagggagacctgcagttggcagaatttctcaggcctcatgctctctgcctctgggcttttcaaggaagatagagcattttagagtgtatttatacctattatttatctgacattttcactttccttgacttcaactttttcctgctgagcatttgccaggaatgaggaagaacaatatggaatttgccatgagaggatctttgtataacttggatgacttggataactttgtataacttggatgacttggataacttggatgattagcctatggaactgtgttgtgggactatccaggtggtatattatttaggtcttggctcttccttctctgccctctggcttacctttcagctataatgtcagttttctttctttgcttggaaagtgagcagggaaaataaagaaaggacaatcaggcaatttttttattagtagcttttataatatattttttcatggcaaaatttaaataattgactcctatgatgtttgtgacattttgtgttgctttgacatatgccttatacacacgtatgcacacacagagaggatacctttaccaggcatggtttatgcaca

SEQ ID NO: 23874 - DNA, 535 bp, Homo sapiens
cagccccctttataattgtatggtcaatagatactattaagcttccattttacagatgaggaaaccaaggcatgaaagtgtgaagtttttgcccaaagttacatggccagtatggagtggagaggagattagaactccagaatccattgtatatgccacaactctatgctgcctaccccttggacacatacaagaaataattagaaggtccaggtatggtggctcatgcctgtaatcccagggctttggggaggccgagttgggaggactgcttgagcccaggagtctgagactacagtgagttatgatcatgccactgcactccagcctgagtgacagagtgggaccatgtttcttaaaaaaactgttttaattttttaaaaaagaaataattagaatggattttaaggatgaacamcttgcaccagtaaaaaaaaaaaaaaaaaaaaaaaattctgacaggtgtttacaacaataattgtggaagctacagattatagtagagatgttctactccaaagggactattcactga

SEQ ID NO: 23875 - DNA, 1781 bp, Homo sapiens
aggggatgactgactagttgatccctggactagggagtgaaactaggatacagctaacccagcctggggcctgggagaaagggctcatttccatggaaaagccaagtcatgccatccctctacccacacatccaagcccccagcacacgccctgcagtaaagaccagagcttgctctaaacacaacggaaaagtgttgaggggtgggtcgggcttgttactggacaactaaatccgtgaaatcacagacaaggcaacaggagcagcaggcagagtggccttggcatggttcttggtcagctcaatccctggcactgttcttctagagtcctgcctgaggctggggtgggggtgcacagtgggttggcagatggaacccgtaataaacaaaatccttgactttcaacacaatgaacaaggctgtggaatctcttgacccagtataaaaggaaagctcaggaacagttgaggtccaggatcaaggagcagctggcgctcaccatttttaccttggttttcctcttctctgtgggagaaaagccacagaggtgtgtgctgggagtaaatgtgggtccccagtgaagcctcaagaggatgatgaggggtctgggagttgggctgccatgacgtcctggcattaggggctagctactgctagcaatgcacaggtgccgaggccacctcccagtggcattgggttttgcaggatagatggcacatgtgtgagatgcctggcacacgctgggaggccaagaacgcatcaagcatggaggcaggcagaggatccagaaggtggggctggagtccccacaagctgtatttcagcaccttgggtgctggttaaaaatgtaagaacctgggctgcatctcaggccggaagaatcggtccctggggtgggccagggagcctgtgcgctagcragtatcctgcatgactgcacaccagctctggggagcagtggggaaggccctcgggaaggagggggaggcagagggtaggatgaggtttgtttggatgcctgtgagtctgactgatttgtgagcggggtttggcaggtcctgcagtcggcctctcctggatgtgtctattcctgtcctcaaaggcaccttgaatgtgaggctgttgtgtgaagatgaggagcataataatcccattttgagagacagagaatagagaaagaggagcgaggggagacagagagaaagaaacagagacactaaaaataaagatacacacacatgagaaacaaagacagaagggaaacagaatatgagtcagaaggatgaacacagacagactgacatggagctggaaggaaacagctgcagacacaaagacagctggggcggctttcccgtctccccactgtgggagacccacagccatgagcatggtaccccattcctgtgggcttcctccttagactcctcttagggcatacatggctgcctgcctgcatgccctccagtttccctaccactgcatttgccccaagcaccctcctaccaggccctccgagctgcccgctcagcagctgcagaggagtggaggttctggcctccctgtactagctatgtgaactcactgctcctgaggagccagcagacctttgaaagatggggttgaaggcaataacagaaggccttctgagtggcgagcatcctaaagggagcacagcctctggggttagcaaacttgtggtcttctaatcccagctctggcacttagggatctcgggtgagcctcagtttcctcatttttaaaatggggattaacctcag

SEQ ID NO: 23876 - DNA, 1781 bp, Homo sapiens
aggggatgactgactagttgatccctggactagggagtgaaactaggatacagctaacccagcctggggcctgggagaaagggctcatttccatggaaaagccaagtcatgccatccctctacccacacatccaagcccccagcacacgccctgcagtaaagaccagagcttgctctaaacacaacggaaaagtgttgaggggtgggtcgggcttgttactggacaactaaatccgtgaaatcacagacaaggcaacaggagcagcaggcagagtggccttggcatggttcttggtcagctcaatccctggcactgttcttctagagtcctgcctgaggctggggtgggggtgcacagtgggttggcagatggaacccgtaataaacaaaatccttgactttcaacacaatgaacaaggctgtggaatctcttgacccagtataaaaggaaagctcaggaacagttgaggtccaggatcaaggagcagctggcgctcaccatttttaccttggttttcctcttctctgtgggagaaaagccacagaggtgtgtgctgggagtaaatgtgggtccccagtgaagcctcaagaggatgatgaggggtctgggagttgggctgccatgacgtcctggcattaggggctagctactgctagcaatgcacaggtgccgaggccacctcccagtggcattgggttttgcaggatagatggcacatgtgtgagatgcctggcacacgctgggaggccaagaacgcatcaagcatggaggcaggcagaggatccagaaggtggggctggagtccccacaagctgtatttcagcaccttgggtgctggttaaaaatgtaagaacctgggctgcatctcaggccggaagaatcggtccctggggtgggccagggagcctgtgcgctagcaagtatcctgcatgactgcacaccagctctggggagcagtggggaaggccctcgggaaggasggggaggcagagggtaggatgaggtttgtttggatgcctgtgagtctgactgatttgtgagcggggtttggcaggtcctgcagtcggcctctcctggatgtgtctattcctgtcctcaaaggcaccttgaatgtgaggctgttgtgtgaagatgaggagcataataatcccattttgagagacagagaatagagaaagaggagcgaggggagacagagagaaagaaacagagacactaaaaataaagatacacacacatgagaaacaaagacagaagggaaacagaatatgagtcagaaggatgaacacagacagactgacatggagctggaaggaaacagctgcagacacaaagacagctggggcggctttcccgtctccccactgtgggagacccacagccatgagcatggtaccccattcctgtgggcttcctccttagactcctcttagggcatacatggctgcctgcctgcatgccctccagtttccctaccactgcatttgccccaagcaccctcctaccaggccctccgagctgcccgctcagcagctgcagaggagtggaggttctggcctccctgtactagctatgtgaactcactgctcctgaggagccagcagacctttgaaagatggggttgaaggcaataacagaaggccttctgagtggcgagcatcctaaagggagcacagcctctggggttagcaaacttgtggtcttctaatcccagctctggcacttagggatctcgggtgagcctcagtttcctcatttttaaaatggggattaacctcag

SEQ ID NO: 23877 - DNA, 1781 bp, Homo sapiens
aggggatgactgactagttgatccctggactagggagtgaaactaggatacagctaacccagcctggggcctgggagaaagggctcatttccatggaaaagccaagtcatgccatccctctacccacacatccaagcccccagcacacgccctgcagtaaagaccagagcttgctctaaacacaacggaaaagtgttgaggggtgggtcgggcttgttactggacaactaaatccgtgaaatcacagacaaggcaacaggagcagcaggcagagtggccttggcatggttcttggtcagctcaatccctggcactgttcttctagagtcctgcctgaggctggggtgggggtgcacagtgggttggcagatggaacccgtaataaacaaaatccttgactttcaacacaatgaacaaggctgtggaatctcttgacccagtataaaaggaaagctcaggaacagttgaggtccaggatcaaggagcagctggcgctcaccatttttaccttggttttcctcttctctgtgggagaaaagccacagaggtgtgtgctgggagtaaatgtgggtccccagtgaagcctcaagaggatgatgaggggtctgggagttgggctgccatgacgtcctggcattaggggctagctactgctagcaatgcacaggtgccgaggccacctcccagtggcattgggttttgcaggatagatggcacatgtgtgagatgcctggcacacgctgggaggccaagaacgcatcaagcatggaggcaggcagaggatccagaaggtggggctggagtccccacaagctgtatttcagcaccttgggtgctggttaaaaatgtaagaacctgggctgcatctcaggccggaagaatcggtccctggggtgggccagggagcctgtgcgctagcaagtatcctgcatgactgcacaccagctctggggagcagtggggaaggccctcgggaaggagggggaggcagagggtaggatgaggtttgtttggatgcctgtgagtctgactgatttgtgagcggggtttggcaggtcctgcagtcrgcctctcctggatgtgtctattcctgtcctcaaaggcaccttgaatgtgaggctgttgtgtgaagatgaggagcataataatcccattttgagagacagagaatagagaaagaggagcgaggggagacagagagaaagaaacagagacactaaaaataaagatacacacacatgagaaacaaagacagaagggaaacagaatatgagtcagaaggatgaacacagacagactgacatggagctggaaggaaacagctgcagacacaaagacagctggggcggctttcccgtctccccactgtgggagacccacagccatgagcatggtaccccattcctgtgggcttcctccttagactcctcttagggcatacatggctgcctgcctgcatgccctccagtttccctaccactgcatttgccccaagcaccctcctaccaggccctccgagctgcccgctcagcagctgcagaggagtggaggttctggcctccctgtactagctatgtgaactcactgctcctgaggagccagcagacctttgaaagatggggttgaaggcaataacagaaggccttctgagtggcgagcatcctaaagggagcacagcctctggggttagcaaacttgtggtcttctaatcccagctctggcacttagggatctcgggtgagcctcagtttcctcatttttaaaatggggattaacctcag

SEQ ID NO: 23878 - DNA, 1781 bp, Homo sapiens
aggggatgactgactagttgatccctggactagggagtgaaactaggatacagctaacccagcctggggcctgggagaaagggctcatttccatggaaaagccaagtcatgccatccctctacccacacatccaagcccccagcacacgccctgcagtaaagaccagagcttgctctaaacacaacggaaaagtgttgaggggtgggtcgggcttgttactggacaactaaatccgtgaaatcacagacaaggcaacaggagcagcaggcagagtggccttggcatggttcttggtcagctcaatccctggcactgttcttctagagtcctgcctgaggctggggtgggggtgcacagtgggttggcagatggaacccgtaataaacaaaatccttgactttcaacacaatgaacaaggctgtggaatctcttgacccagtataaaaggaaagctcaggaacagttgaggtccaggatcaaggagcagctggcgctcaccatttttaccttggttttcctcttctctgtgggagaaaagccacagaggtgtgtgctgggagtaaatgtgggtccccagtgaagcctcaagaggatgatgaggggtctgggagttgggctgccatgacgtcctggcattaggggctagctactgctagcaatgcacaggtgccgaggccacctcccagtggcattgggttttgcaggatagatggcacatgtgtgagatgcctggcacacgctgggaggccaagaacgcatcaagcatggaggcaggcagaggatccagaaggtggggctggagtccccacaagctgtatttcagcaccttgggtgctggttaaaaatgtaagaacctgggctgcatctcaggccggaagaatcggtccctggggtgggccagggagcctgtgcgctagcaagtatcctgcatgactgcacaccagctctggggagcagtggggaaggccctcgggaaggagggggaggcagagggtaggatgaggtttgtttggatgcctgtgagtctgactgatttgtgagcggggtttggcaggtcctgcagtcggcctctcctggatgtgtctattcctgtcctcaaaggcaccttgaatgtgaggctgttgtgtgaagatgaggagcataataatcccattttgagagacagagaatagagaaagaggagcgaggggagacagagagaaagaaacagagacactaaaaataaagatacacacacatgagaaacaaagacagaagggaaacagaatatgagtcagaaggatgaacacagacagactgacatggagctggaaggaaacagctgcagacacaaagacagctggggcggctttcccgtctccccactgtgggagacccacagccatgagcatggtaccccattcctgtgggcttcctccttagactcctcttagggcatacatggctgcctgcctgcatgccctccagtttccctaccactgcatttgccccaagcaccctcctaccaggccctccgagctgcccgctcagcagctgcagaggagtggaggttctggcctccctgtactagctatgtgaactcactgctcctgaggagccagcagacctttgaaagatggggttgaaggcaataacagaaggccttctgagtggcgagcatcctaaagggagcacagcctctggggytagcaaacttgtggtcttctaatcccagctctggcacttagggatctcgggtgagcctcagtttcctcatttttaaaatggggattaacctcag

SEQ ID NO: 23879 - DNA, 523 bp, Homo sapiens
aaggttgtttagctcagtgccagtttctcactgcggtcatggtacattaaaaacagctgatgctttgcaatcaagattcgtaatatcagctcacatatgttgagcacatacaccatctagcttaaaagcaggatctgaagtcggcgtcaccactttctccacatgcaataggaactaaagcacagacagggtaggcatcttgctacagtcacacactatagaccacaggtgcagtgattccaaccaattccgtttaactctaactgtcctgtattaactactaatgtatctgaatttcccagtgagtgacaataccaagcacacaagtaaaatgacgaatttcgtctttcttccctacrgtggagtcagtgttaaacatacaacaaggagttctggggcacaggctcagatcctcctggccggggtcctgaggaggatggagatcacaaggtattgttttttttttttttttttttttttgagacagagtctggctctgttgcccaggctggagtgcaatggc

SEQ ID NO: 23880 - DNA, 1851 bp, Homo sapiens
aaaatgagagaagcaaagcaaggtaattgaattagaagcagggaaaaaaagaatttcacaaggctgtcatctgtcccagtcccacccaacatagcctgacattcctctaccctcttcattctctgcacgaaaacattctcgacacatcccctcatccctcatggccgggcactgatggtcaacagatcactttggtgatgaacacaggaactcacctatggtcagcaccctcagggccaaaaatggaggaagaactgtgaaaaatgccatcttccctgcaaaaagtgccacaaacactcaccagttcaacaaagagctagtgtgtttcaactccttagcctcaggcctcactagcctgtgaataggggcactgatggggcagagatgcgataaaatcccagcttcccttgtttcagtcccaagttgtggtttttccgtttcctcccactggacagcttcagtatgaattgctcccaaaaccaacagtaaaatttaacctccactccttgcaggaaaagaagatcctcatctctttggggaatttgcttttggtgcaagtcttgctgaccttggcatgcctctcatacacacaaaagctgtggggctttccagaggatgctctcatatacaccacaggctcccaacaaagtggatccctggacaagaagcatcagctgcacctgagaagtcattagaaatgcaaattctcagtctcacacagccctactaaatccgaaccctaagagatttggcccagcaacctgtgtttataacaagcctccaagcgattccagtgcactcttagtttaacactgatacacgctgatcatttctccagtgtgcctcacactttctttcttgtgtatttggtctttctgttctttccattcagcatccttcctccttctgtaactgaccgactcctgttcagtctttaaagccttccaaaaaacaccctcctatttgtaagcctcctctgacaccatcctctccacttaagcagaattaactgcccctttatttctcctctgacaatactttgggcatccattgatacattatgttataatcatcatgtatgtatctgttttccatacgaggctgagagggtgagaaaatacctgattcagcaaatattttatacaaaatatcacaggcctaccattgggttaattctggtgatgccaaaatagaataataaactctgattaaaaagtgggacagtgccgtatttgcctaattcatcattgcatgccaagtgagatttcaaatccctggcttaaagcctcccccactgacatatactagctgtgtaaccttgggcaaattattgaacctcttcaaatctcaygcatcgcagggaaatgctaataacatttacctccatgtttcatcatcatcatcatcatcgcatccttagcaacttgtattgtgcctgatacagagaacatgggtataagtgtaaaaacttttttaaaaggtcagagttctggacagatatactataattcttgtagaacttgacactcaccctatgcaaacctgactttacataaaatgtttcataaaacatgcaaaaagacacagacaactttcgtattgcctcactaatttgcccagtaagagggtgatcaatattgagaatgctgcctgagttatttcgtggttgtattaggtctgttcactcccccatccactctcaccacctttaaactatgactctggtttgcaaacttggtttcacacgagaatcacctgggaagctttaaaaacaaatcctgatgcctgtgtcttgccctgaaagagtcagatatattaataattaacacggggaatggcttgggcatggga

SEQ ID NO: 23881 - DNA, 1178 bp, Homo sapiens
agagtgcccagccaaggcaccaatgctctgtacgacttgcaaagacaattgttccactgcagcttctgacagtggaargggagagttaattaaatctcatcataaaattaagtagcataactatatattttagagccagtgtaattatgccttatcttggagtcttgtaaattctttgtgactgcgatgtattcttatcagaaatttttatagaattctagaactaagggggttttagagatcacatagttgggtgacttcattttataatgatgaaaacaaacccagagagattatatgacagaccaaagcctacagtaagtcacctgactcaacattgagtactcttgccatttcatttgatttgtattttgcacagagctgaagtctacaccaggtgaaaatagcagagggtcaaaatagcctctgaaaatctcttaggaagtcactatgctggagatgaacacatctgtcattgagtccaacactgccaagtttgccttcagagtcaatgcaatcgttatttcttaagttgcacaccaaatgaagtggcgggttggggtttccggggcctgctgtgtggaaaatgagtctttaaagacccacaatctgtaaagttgcttctaccaggagaggcacccagaactgagatgaactcatggatcagaagagtctttaggtgaagactcgagagatagtaaattcagtttctcttcctccattacagctgaaagtggagatctggtaggtgtgttgttattctgaaggtcactgtcaatacctatctcaggagtctcccattttgcactctgccagcacctcttttcctgccctgccaatggaactgttgtccaacttttggattttgtcagtctcctagggagaaatggcatttcgtatagttttaatttgcttttttcttgtaatgagtgacactgctaatcttgatgtatgtttgacatttgtgtttctttttctactgtttgctcatgtctttggttcatttttatatttgggttgttagatgttagtcttttttcttttctaagagtactttccacagataaattagtgctttgcctgtatatgagctgcagttatttttctcttttgactttctttctacattgagaaggagtttttttaatgtaattgaatttattaatttctttttctat

SEQ ID NO: 23882 - DNA, 794 bp, Homo sapiens
accctccttggcctcccaaagtgctgggattacaggcgtgagccaccgcactcagtccaaaatctcttttatttgacttctacagttaaaattctcattacttgaaatgccactgtattgaatttatgttttcagagggcccaattaaaacayaaatgtatttattagaatgagggacacttcaatcacttatcattaaaagagtagaagggaagttccagaggggttagaacccagtacaggtagattttgatatctagagtatatttgagatggaaatggaatatcttgcatagtggaaggggttatctggtgtgtagatgactgcacaagatgcaataaatatatttatgttgggagggtgtggggaagaaagaaaataagtgtctaaaaaggaatgacaatggaagaagtttcacagtgggtttgggagtgagggaagtaattataaaacaaacaaaatcagcttacttaatgggtttttcttggggtcagaactaaattatactctcagttaatctcaatgtttctatattgagggtgtggaaattctcagagagtcttttaaaaatcaaagaacagaagtttaagatgctacaaattaactctatttcccacaattgttctttagtaacttaaaattctaggctgtaaaatttctagatcatcttcaaatttctcacttttgtaagtagtatctcactgtttagaccaactattgggctactatatttgtcattcatttttatttctctagggagaaaagatttcatggctttaaatctttttctctt

SEQ ID NO: 23883 - DNA, 934 bp, Homo sapiens
aggtctcctgcaaatttcaagacaaaacaacccctagattaagagatgcccaccaaaatctctaagtctttctgcaggaactagaacatctgtagttttcatgactgcagtagatactgtcaagcatgcagaaggctctgtgaaggcataaatcttcttgtattttcaaatgctgtatcacaagagaaataaaggtttccagtttcgacctagaaagaagccatcatcctattcatcagatctactaaagtcattagtttaataatactttaattttatctttatatttcacattatattccatattttgtcttttacatttcacattatttcattcagtgttaccacaaagattttgtgataaagggaatagatattatgtaaaatgtagtataaactaaagttcattatttagattatgtccttcagagaagattaattgttcaacaggttaaagcagtgacctagagtctagtttctctagacagsgctgatctaagcagcacagtgtctgttgtcttcaagctgtgccaatttgcaagattttaatcttaaccacagtaccacttcttattagcagtgcgatcctgggcaatgtactcattatcggttttctagttggtgaaatgggaatgataatattacttacctcattagcttgctgtaaggactgaacaagattatctatgacaaacattcaagacattgccttatacataatgagagttcaataaatgtgagaaattataattgacttagtatataaaatgtgtgtttatttgttcattttgatgcttttgctgttattttttatgccgatttccatattcttttacctaattttttaaaaaaatgtatttgaaaaatgactacttttaaaatatgagttaagaagggatggaaaaagcgctgttcccatgaagctatgatatct

SEQ ID NO: 23884 - DNA, 555 bp, Homo sapiens
ttttaaatagtgaagagctcttgattcggattttgtaaataaaggaagaaatgtcagtttagcacccttaattcagttcagcaaacatttactgaagctgtaatatttgccaggcactgcatcaggcaatggaggtttgaagataaattatgtactgtgttagtttattttaaacatctttccaaatccatccaaataaattaacatayggtttgcctcagcataagtaaaactctccccaaaatgtactgaaatatttaacaattcaatcaatctgaagctaaattatataaaaacgtatgtgtatacgtgcatattcataattgtgtgcgttcacctactttgagtcccagtgctttgcagaaagcctgagcaggtgtaaaaatcatcctgccatttgaaccaaggcattttttccattgcatttatttttcacctatgtattctatactgcaatttttaaaggattatcagaagtgattctggggtcctagtgttacaaacatgaatacttttcttaatcctagttgtgggataaggtgatatagacaggcc

SEQ ID NO: 23885 - DNA, 608 bp, Homo sapiens
gaactaccccttcttcagatatttagaaccaaaaataatttcttttccaacttttcaagtctctcctattggaagtcccccaaaaagtcaaagaaatggagaagaaagtgttccattctgaatacaaggtaacttcttccttaatcctaattccaatttcccccagccaagagtatccttgcttacattctgccttgaacctatcaagcacataggaggagtaagattggaggatgggccatgttgagcagactttgaatttctggcaaatggctcactgtatatttcatttcaaagggctaattatgtctgcataaataaactgtgctacgcagcttgatgcatggccatttgtcatattaaaacaatgggatccaaagtaaacctccattaacattgtttaacttcaatgctttggggtrtttgctactcaaatgattaaaaaatgaaatgatttatgatgccacaatttaaatgaggcaacacaacaaacagactatgagtcaccaagacttaaaatgtactataagcccagctgagttaggaacacaaagggaacccacagctgaagtccctgggatctatgcactgtggcttttttgccactc

SEQ ID NO: 23886 - DNA, 546 bp, Homo sapiens
ttaaataaaagttatataatatatacccaccacatatcttccatgatatccaatgcaataaaaaaactaygaaagaaagaaaaagcagcagctaataaagaggaaaaaaagacagtaaaattatgaccgaagatgttcaaaacactggatattgtagacaaaggcatcagcataactataatcctatgttagagacaactgagaatccatttaaaaagtcatatggacatttttgggatggcaaaatacaatatttgaacttaagaacttgggtggttttaagaggagagtggagatagaagaaaaaatgatttgaaaagtaaaagacaaattaatggaagagatccagagtagacagaaaagaacaaaaaatagtttctaagaaatgtgaactacggtcatatatataatatacatttatttttgagttcctaaaaaaaagaatgttaacactgagcataaataacatttgaaaaaatattgttcagtatttttcttaatatgatcaaaacatcaacccacagattcaaaaaatttagcaagccc

SEQ ID NO: 23887 - DNA, 565 bp, Homo sapiens
gagcagattatatctgcattgttcactactatgtttctatcatctagaaaaaaaggagaggcttagtaaatatttattgaataaatagatcagtgaacatttataagagttggagaaagaatgtgcattatattatttatagtatcaccattcaactaaatgataataataatgataaaaatatcaacatgccttctgcccaaggagttgaggaaagttatttttaaatttcatcctggccaggtgtggcggctcatgcttaaaatcccagcacttagggaggctaaggggggtggatcacttgaggccaggagttagagaccagcctagtcaacatggtgaaaccccatctctactaaaaatacaaaaatttacccaggcatggtgatacacacctgtaatcccagctactcgggarcctgaggcacaaaaattgcttgaacccaggaggtggaggttgcagcgagacaagatcataccactgcactccagtctgagccacagagcaaaattctgtctcaaaagaaataaataaataaaacaaaaataaaaaaatatatgtgtg

SEQ ID NO: 23888 - DNA, 1041 bp, Homo sapiens
tcctgcttcagcctcccacagtgctgagattacaggcatgagccactgcacctggccaagacaattttttgaaagagctcagtgctgcaagaagaattcgtctgcaatctgagtgaggataaggaacctgcctgatgagggactgagaagagagaagctggcaaaagaaatagcaagtgcaatgaaccagacgtgagaatgaacttgaagtggtcaggaatcagatggagaccaggggccatggctcacacctgtaatcccagcactttgggaggccaaggcgggtggatcatctgaggtcgggagttcaagaccagcctggccaacatagtggaaccccgtctctactaaaaatacaaaaattagctgggcatgttggcgggcgcctgtaatcccaactacttgggaggctgaggcaaaagaattgcttgaacccaggaggtggaggttgtagtgagccgagatcacgccactgcactccagcctgggcgacagagcgagattctgtctcaaaataaataaataaacaaaaatgaaaagaattagaaggaacagggtggctggattcaagggattgtggggaagtgtcatcagatgtggctgaagaggtaggttgagatgggcatcatagactctgtgaagaacttaagaacctcctcttccaggaagcccttcttgactgcatcaactaggttttcccatcccagccctgttcccactaggttgttgctcttggggcactggcctatctgctccgctggcctgtgagccctctgacggccaggccagtcaccactatgtcctcagcatcacctagcacaggcctgagcacacaggaggtggtcggtaaatgcccaggtcattctggcactgccagcaagccccaagaagcatcccttgctctgcctccccgccgcscacctctgttcctgggcgtagcaccagggattcctgagttccccgtttggccattcacactggtttcagcctagcctctttcatcccatcctcaaaggcccatgtggggaggaggccgggatc

SEQ ID NO: 23889 - DNA, 1210 bp, Homo sapiens
aggagcacaaaaggctttttctcaaagctctgcttctcccatctcactgctctacatttctctgtgtttgctcattctcaagcaaggtctctcctcatagagacaagatggcggccatccactgcagtccacatcctatcctatcctacgaataattttaccaacagaaagaatagtatatacttatatcccaatagctcaagaaaaattccccaaatgagctctgtttggccctgattcatatgatttatgcaacaggcccatcagtgaaccaatcgctatggccaagaatgcatgcataggcctaagacacacctctccctggacttggagcatggctagccacacctggacaacattgacttaaaatggaggaatgaatcacagttcccaaagaaaactgaaagtgctatcaccagaaggtaaaatcyactatataaaattctactataaatactgtcaaatggaagccctacaaaatgaaccaagagaaattagctttaaataaaattttatgtgagtgcaagtatatgcattgtggcattcctgggtcagtggcatgtataaatacctttttagtcaaaagaataaaaagaataagaaagagaaggaggaggagaaagggaaggaaaagaggaggaagaggaataggagggaaagggggaagtggggaggaagagaaatttgagatgttaaggtgagaacagtcagtttgggctatttcttaccactcctacattaagataggctagtggttcactgaattttagggctagaagaaccttaaagaccactttgtctaattaaatgggttacaaataaataaataaatttcaagatttggttcctttctacttgttcatttccatctctcaccactcgagcccttgttctactgtctaggccctgtattgtccagggtagtagccatttgactttggacacttggatgtggctagttcaaatagagctgtgctcacgtgaaaaacacacagaacttcaaagacttagtatgaaaaaaataatataggtcaggtgcagtggctcacacctgtaatcccagcactttgggaggcagaagcgggcagatcatgaggccaggagttcaataccagcctggccaacatggtgaaaccccgtctctactaaaagtacaaaagattagccgggcatggtggtgcgcacctgtaatcccagctactgggggatc

SEQ ID NO: 23890 - DNA, 515 bp, Homo sapiens
aaattagctgggcatggtggcgggaacctgtaatcccaggttctcaggaggctgaagcaggagaattgcttgaacccaggagggtggaggttgcggtgagccgagatcacaccactgcactccagcctggacgacagaccaagactcgtctcaaaaaaataataataaaataaaaattttaaaaaagatccataggaaagtatagatcttggaaaagagaaagagctataagatctgtagaaagggcagagtacctcaggaaagggtggctgtcacattgagattcaggtcaggggttgrggcgtggctggtttcaaaggtgacagaggcttcaggcttcaaggatttggggctctatcctgcaagcaacagtgagccaaggaagggttttgaacagggaaaggacagtacatgaacagagctgggaaccaaggctgagaggtaggcagcagagcaagaccttgaacccaggtcttgctggctccaaagcctgtccatgaccttagactgcagcc

SEQ ID NO: 23891 - DNA, 624 bp, Homo sapiens
tccaggacgttaattttggcactagatgcttccaggcatctgcatcatcccttccaaactaagggaatttaaataattcatgcttaatgcactgagggccatggagcccctgctttgggttggtgcttgccctggtgtgtcctttggggtgagtgacccatgttcaactactggtaacatggaacccttcagaagctgtyagggtgtggtgcttcctcctacaatggaaggaagaactagggactgcacacaggtttgggaggtctccagttgaaaccatgcaggcacttagaaagaaaatagctccaatgtgtctgagcaagtggttggagtgcctacggagaggtgaggttgaacatctgagcaggtgcacataagctgtagaacttctaaaactataccgatctcacctgtagcttcatagccacctcagactcgagtaccatgtcatagttacgtagtacaacataatcctagagttcccctagaacttggaggtaactgaccataacaggatttgcaactgacaggcttggctggtaccctaatatgcctccagtgttctgtcctgtacacctatactgacttctatttcccttctgctgtgcctctagaactccagtc

SEQ ID NO: 23892 - DNA, 624 bp, Homo sapiens
tccaggacgttaattttggcactagatgcttccaggcatctgcatcatcccttccaaactaagggaatttaaataattcatgcttaatgcactgagggccatggagcccctgctttgggttggtgcttgccctggtgtgtcctttggggtgagtgacccatgttcaactactggtaacatggaacccttcagaagctgtcaggrtgtggtgcttcctcctacaatggaaggaagaactagggactgcacacaggtttgggaggtctccagttgaaaccatgcaggcacttagaaagaaaatagctccaatgtgtctgagcaagtggttggagtgcctacggagaggtgaggttgaacatctgagcaggtgcacataagctgtagaacttctaaaactataccgatctcacctgtagcttcatagccacctcagactcgagtaccatgtcatagttacgtagtacaacataatcctagagttcccctagaacttggaggtaactgaccataacaggatttgcaactgacaggcttggctggtaccctaatatgcctccagtgttctgtcctgtacacctatactgacttctatttcccttctgctgtgcctctagaactccagtc

SEQ ID NO: 23893 - DNA, 2484 bp, Homo sapiens
gcgtagaatctttcctgactgcttaggaacaatagcttttctgagttgatgagttccagcctgctcatgatctatcagcatgtggaagtgtctgccggtgagctctggatgcccttagcaaacatgcaagagaaactgagtgtctgctcaacctaccttgtacatggctggacccactcagatccagtgttgagttcaccgtcttgccttgacaggtcaacatctgaagaaccaacctttacaaatactacaataacatgagcatgagaagctactcccccaacagctgcaactagttctgtgactaatggatattcatctccctctaacagtacaatctagattcccctccaccctcagccagtatttctgctggtccagattgctttacacagtagggccactcagacttatccaagaggtctgagcactcacttatctcagactgtctcttatgttgctgcaataactgcttttgtcatcactaatgctgcactaaggggcacccagtaaaccctacaaatccaggtgtatttccctcactttgtgtagcagagacctatttcatcataaccaggattgttgacccctgccagtaaagtaacttctgtctgcctcctggtctactggtataaaaagcctaagtgactaaattgtagcttttggttctatggaacccactctgtatctccagaggatgygttcttcaggggatcagaagctctaattctgaacatgctaaatctgtgggacaagaagcacttctacaagtgggtccacagcaggtggtggaaggggccatgttacatctaccacttggttcctggatactgtatcttagcttttggggatattatatggaagtttcttcaacttgaagtataatttgatggatatattgaagttaagggcttatctgaaagcacctgaaacataccgctaattgctttgaggcacaaaagcaccaggactctgggtattagctgaagactgggaaagctggtgttgaaggtggctgagctcaggtggctttcacttgtgcctgaggtagagcttttagaaaaggtaccttctattctggggccacttgtctgcactgtaagttggtcactttcctaaggcctctcacctccttcaggaagtagtggtgcctcaggaaatcacagggatggatgtctgcatgacttgttgagcccagggcatgtggatccagtagcatcttgttcatatcttcctccctcacatacagggtgtgacccccattcattcttggaagtgggtgcagctgtctgacttagcaacttcgggatgcctttggacctttacaactttttctgccagatctaggaaaaaagttcatgccttctagggccacatccttgtggccaaactaaaagccagcaggtgataagatataggtattcagatgaaagtagaccagatggttgactccgtcctctgcctgggtggaatgattctgctgtatacagaagtttggtcagaagcaaggtggtgtccatagaaaatgtggcttgttaggaatttggagtaggacatactttgctatctagaagcagaccttaagataatttgaattgctaccacataaccaagtaaaacaccatagagtgatagagaagtggggtggacaagaggtggtgactcgaaggtgtgttaccagagtctgatagaggtaaatacagctcagctgggcagaggccctctggagacagtatagatcatacttcagcttttaatcagctatggagcaggaggtacttacaccttctcaccccatctgacatgggctaaagccagccatcatggggatgtaaatcctcatgccctttgggctcatagggcagccttaaaagacacaggtactggcagttgcattcctattaccttaccaagagggagtaagttcgagttgggagaggggcctaaggagatgctgacagatcactgatggcctctgatggagggtcccccagaagcctggagctcaaagggaaaaaccccagtcagttcctttcactgatactaatgagcacatccacaaaatgaagtgccttaactcatgaagtgcaagcgagaccaagtactgtatttaattagggctcctcagaaacagactcgtgtggaagtaatgaaggaaatacttccaagacaaaccagtgaaggagtgaggagaggcacaactgaggctggtaagaagccaagcaaggctgcgatggcaaagtcctaggctttgtagaccccttggatcccaaaggggaacaataggctgagttgcaccttggttgtgtgcatcctcatagctgacattcacttgttaatggtggcactggttctgaggggtgtgtgtaaactctcaggtacttctggctccttgtgagtgtgcaaaagatgggtccaacactcaaaaggcagtcttccaacagcaaaagtgaaggtgctggcacttgtagacatatgaagacc

SEQ ID NO: 23894 - DNA, 525 bp, Homo sapiens
ggcaagctgctacatttatgagtcaccccatggaggataaaagtgtcacagcaagtagcagaaaccctcagtccaacagcctgtcaggagttgaagctcaccacctgtgagtgagtttggaagtagacattctgaggtgtgacagctgccatgagtatacttggaggcagatccccctgacactgagccttcaaatggaaacttatctggctaacagctggattgcaacctcatgagagaacgtgaaccagaggcatttacctaggctgtrcttgtgttcctaacccttggaaactgttttaagctgctaatttgggatcatttgtttggcagcaacagacaagcaatagcctatgtgagttggcagctgctacttagcttgacccaaccatttgctctattagaatgacaactctggctaagaaggaactcaatgaactagaaatttagatttctaaattatagggcagaggtaacatgatagtagactctggagtcttcatgtttgatcaacattacattttt

SEQ ID NO: 23895 - DNA, 826 bp, Homo sapiens
ctaatgaatggcttggtgccattcttgcaggagtaactgaattctcacttagttcccatgagaactggttgttgaaaaaaacctggcatctcttcctccctctcttgcttcctcctctcaccatgtggtctcccacatgccagctctgcttccccctccgccatgagtggaatcttcctgaagccctcaccagaagcagatgctggtgccatrctccttatacagcctgcagagctgtgagccaaatagacctcttttctttttgaattgcccagactcagttacttctttataataatacaaaaattgaccaaggtgtccttctcacctcattctggtttgagtccaacttttatatgcttccataatagtttgggctcccgaattccattgtagagttgtgtctagcatgctggaatcacttgtttacttttatctccatcactggcctgtgatggcaacgggagtagggaacactctcttagtcatcttactaattagtcacattgtaaagattaaaaagaattgtggagtaaacaagtgaatatggctcaaataaggcagtatcagcaggaatgctttgcaaacagtgttaataaatgtgagtaaggatgatgctgaggctcatgattttaaaaaaggcattcaagccgggtgtggcagctcatacttcgaatgacagtgctttgggaggttgaggcaggagtatcacttcaggccaagagttcaagacagcctgggcaacatagagagacccgtctttacagacaattttttaaaaattaggcatgatagtatgcacctgtggtcccagccactggggggc

SEQ ID NO: 23896 - DNA, 512 bp, Homo sapiens
tttaaggggtgattaggtcataagggcagaaaatgaattaatgccaatatcgagggagtgggtgagttattgtgggagtggattcctgataaaaggatgagtttgactccgttcctcttgctctgtcttgtgtttttttactcttcagtcttcctccatgggatgatataacaaaagggcccttggcagatgcaagccccttgatcttggacttcccagcctccagaactgcaagaaaaaaaatctctcttctttataaattacccagtctcagatgttctattatagcagcacaaaatggactaatacacccaccattgcttttgcactgataatacaaaagtcacatggtgaaaaaggcaaatgctatcttattattattattatgaatacagttttgatctctcagcctccctgaaaaggtttttgggacccctagrggtatgtaggccaccctttgagacccactgatctaattgattgtctcctttttttgtatcttaattctctaa

SEQ ID NO: 23897 - DNA, 936 bp, Homo sapiens
ttacaaataatttttttcaaagtgtatgcatattgtttcaaagggtgtgaaatgaccaacgatctacgctttttcaaagtgtatgcatattgtttcaaaggatgtgaaatgaccaacgatctacgttttttcaaagtgtatgcatattgtttcaaagggtgtgaaataaccaacgacctacgttttttcaaagatgactgataatgagtaaatcataatgcatgttagttttctaaattttgttttaaggccagaagcaatcagggcatcatcatcaccatcatcagtatcatcatcttcttctcatcaagaacaacttgagcaaccctgtgtttataagatagctaattgcaaagctataatctcaggcttgaagattatttaacattcttcaggggcaaatctagacaaattgtgtgtgtgtggagaggaggtatgggcagggaggtcttcatggggagaaagacaacatgtggttaaggagccagccactcaggggttaatggcatttgttgttttggatcccgggcggacgccaaatggaatttacttttcccagtagtrtagcatcgtaacacttgatttctgctcggcatgaagaaatgcacattttgctcaaaagactttgcacttaatcctcccacattcacttgggttaacactgagctgctgtattaacattcgttgtgggaaagaaggacacattctagcgcctggcatctcggcctcccatgtagggaggttggcctggccaagcctcgagggcaatttgtccattactgtttaagcgtctacagagtgctcagcttggtgcggaggtccagggagtggagctatctagtagggaaaagtgacaaagtgaaatgtgtagtggggactcaggagttcaggccaaaagggatataagtgaggactataaggatgattccatgtggg

SEQ ID NO: 23898 - DNA, 936 bp, Homo sapiens
ttacaaataatttttttcaaagtgtatgcatattgtttcaaagggtgtgaaatgaccaacgatctacgctttttcaaagtgtatgcatattgtttcaaaggatgtgaaatgaccaacgatctacgttttttcaaagtgtatgcatattgtttcaaagggtgtgaaataaccaacgacctacgttttttcaaagatgactgataatgagtaaatcataatgcatgttagttttctaaattttgttttaaggccagaagcaatcagggcatcatcatcaccatcatcagtatcatcatcttcttctcatcaagaacaacttgagcaaccctgtgtttataagatagctaattgcaaagctataatctcaggcttgaagattatttaacattcttcaggggcaaatctagacaaattgtgtgtgtgtggagaggaggtatgggcagggaggtcttcatggggagaaagacaacatgtggttaaggagccagccactcaggggttaatggcatttgttgttttggatcccgggcggacgccaaatggaatttacttttcccagtagtatagcatcgtaacayttgatttctgctcggcatgaagaaatgcacattttgctcaaaagactttgcacttaatcctcccacattcacttgggttaacactgagctgctgtattaacattcgttgtgggaaagaaggacacattctagcgcctggcatctcggcctcccatgtagggaggttggcctggccaagcctcgagggcaatttgtccattactgtttaagcgtctacagagtgctcagcttggtgcggaggtccagggagtggagctatctagtagggaaaagtgacaaagtgaaatgtgtagtggggactcaggagttcaggccaaaagggatataagtgaggactataaggatgattccatgtggg

SEQ ID NO: 23899 - DNA, 513 bp, Homo sapiens
attagggtctaggggtctgcatttttgcaaaggcctaaagtggtctrtggacaacattttgtggatatggccctaaggggtaaatgacctaaggaaagagcaggaaaaatctcagaagttgggtagccagagaaaggcataatagaagcaaactgcacagtgacctggatgagattggagactattattctaaatgacgtaactcaggaatggaaaaccaaacttcgtgtgttctcactggtatgtgggagctaagctatgaggacgcaaaggcataagaatgatacagtggactttggggactttgggggaagagtaggagggggacaagggatgaaagactacaaatatggtgcagtgtatacatggatgaagggtgcaccaaaatctcagaaatcaccactaaagaacacactcatgtaaccaaaaaaaaaaaaaaaaaaaaagcatgcacagttagtcacaatgacactgatttttgctaaaatttaaatgccacccagagcaattctt

SEQ ID NO: 23900 - DNA, 1469 bp, Homo sapiens
ggaatccgggaggcagaggttgtgtgagccgagatcgcgctactgcactccagcctgggcaacaagagaaaactccatctcagaaaaaaaaaaaaagatcttctcagggtgtcaaatatgctaggtatgccatgaagtggaggagcctgcaaccctgcagggacagactcaacttgatcagatgaggttaataaaagggtgcaggtggtgtgaaacagagtgtgcgggcaatagtggaagcacaaggttgccagttctctaaggggaagtgttgggtggggagtttcagaaaagacttgatagagggattattagctagctatgggagtttggggtgttctagggctacacttcctggaaaatcatgaggtcagaaaggcagctggcccagtggtaaaggacgcactttcctccacttacagcttggcaagttatgtaatgtctctgggctgcataagtaaaatgaaaagcaagggtaatattagtacctgccttattagactgttgagagaagtaaatgagaatagcactgagaatacagtgtctgagccacaaaagccaggcttacataatagttatgaggaaagcttggagtcgttttagtgatgccagactgtaaggtaaaggaatcagtggctggaagggattcaggttccagtagatcaaaccatacttcctagaagtttggcccgaatggatagagatgctatagaagatggaagatgaaggaagggaacagactttgtggatcccaccagacttccacacaaataccagcttaacctagagcagtcttccccatgccccatcagttactatcaatcccatcaccctcttcatttcccacatagtgcttgatgctaacatccatgcttctcattcatttatttgtttattgtcttccccaccatcagcccccttctccttagaatgtaactttaatgagaacagcaaccttgactgtcttktctactcctgcatctacaaagcctagaattgctttgctcctccataaatattgttaaattaattattgaattaatgccatatatcctcaatccatttaaaggggggtgatttcagctcatttgtcagcagagggaaagaatccaggaatgggggaaagcctgacaataccggagagcaggaattattcggagcttaggatcaaatgcaccagtcgggggatgacagtggaaatgatagagaatagttctcaccctggatatcacatttcatatagagctgattaatatccctctacctctcactcccagacagctggactctgatactcatgtgattaggcacatgctgtcattaatcatctttataaaatagctcaaagaaaattacacccagcaagtagccatccaaccttgttacggtcctcgcatgttggtttgctccctaaaataagcagaccttgtctcagtctttcagcaacccgaaaagctgcaggagtagtt

SEQ ID NO: 23901 - DNA, 768 bp, Homo sapiens
gcgattctcctgcctcagcgagtagctggggctacagacgcgcactaccacgtccagctaatttttgtatttttagtagagacagggtttcaccgcgttggccaggttcgtctctacctcttgacctcatgatctgcccaccttggcctcccaaagtgctgggattacaggcatgaaccacggcacccggctgcctctctctactcttacagcattttacacttatatctgttataactcacattacttgtattgcaattgtgcatttatgtatctttctccctcaccagacagcaagatccttgcgggcaggaaaagtgtcctcctgtatcttacatactgactgctggaaaatccatatgggctaaatcattaaatcaaataatctcttcacactatttatctgtgacaacacagacgctgctataggaggcaaaatagtactcaatcacgattcttctccaagttaatattatacctgaattaaaccagaggtggagctatccccactgcatcaagagcacagtgcatgatgactgaacaaccttttacattttaacctgttttttaatgccagttaataagtgtacatgaaatgaaatctcatccaattgcctgaaggatgttttacmcctacctaaaaccaagtggacacacaccaacaaggtatcggcagtttttcaagaatttgaaaatccttcttctgcttcatacccaagaaccaaagcaaaggaagccaagtagtgcaggtgcccttgccttccctgt

SEQ ID NO: 23902 - DNA, 571 bp, Homo sapiens
taaaggtggcagaagctctcctcggagttcctggagagtccagcagagatcaarcacaagactggaaaggaaggggagtttgaggagagagcggaggggctgcagggaagtagccagcatttatgagccccctgccatgcaccaggccctcgggactggagcatgcagttatctcctgtcattttcacaacgctgtgggtgctggggagtattttgtccatttgacctatgcagaaactgggacacccagggtttaagcagcctctcaagatctcagaccacagtctacatgctttaaatatcaggctcccccactcccctgtaaatgggcactgtgaagcctgccatcaagagaaccatcagtctgcttactagagagagcacagggacatagcatccatatcaggaaagctgtgtcggccagcacatcacaggaggcccaagctttgtctctgtggaaggcttagctcagccccctgccctatacactgacttcctgcctgccccctgctttccttcagccccgaaggagagagacctgggctgctttctctgctgacctgccttttga

SEQ ID NO: 23903 - DNA, 571 bp, Homo sapiens
taaaggtggcagaagctctcctcggagttcctggagagtccagcagagatcaagcacaagactggaaaggaaggggagtttgaggagagagcggaggggctgcagggaagtagccagcatttatgagccccctgccatgcaccaggccctcgggactggagcatgcagttatctcctgtcattttcacaacgctgtgggtgctggggagtattttgtccatttgacctatgcagaaactgggacacccagggtttaagcagcctctcaagatctcagaccacagtctacatgctttaaatatcaggctcccccactcccctgtaaatgggcactgtgargcctgccatcaagagaaccatcagtctgcttactagagagagcacagggacatagcatccatatcaggaaagctgtgtcggccagcacatcacaggaggcccaagctttgtctctgtggaaggcttagctcagccccctgccctatacactgacttcctgcctgccccctgctttccttcagccccgaaggagagagacctgggctgctttctctgctgacctgccttttga

SEQ ID NO: 23904 - DNA, 571 bp, Homo sapiens
taaaggtggcagaagctctcctcggagttcctggagagtccagcagagatcaagcacaagactggaaaggaaggggagtttgaggagagagcggaggggctgcagggaagtagccagcatttatgagccccctgccatgcaccaggccctcgggactggagcatgcagttatctcctgtcattttcacaacgctgtgggtgctggggagtattttgtccatttgacctatgcagaaactgggacacccagggtttaagcagcctctcaagatctcagaccacagtctacatgctttaaatatcaggctcccccactcccctgtaaatgggcactgtgaagcctgccatcaagagaaccatcagtctgcttactagagagagcacagggacatagcatccatatcaggaaagctgtgtcggccagcacatcacaggaggcccaagctttgtctctgtggaaggcttagctcagccccctgccctatacacygacttcctgcctgccccctgctttccttcagccccgaaggagagagacctgggctgctttctctgctgacctgccttttga

SEQ ID NO: 23905 - DNA, 435 bp, Homo sapiens
aggaaagaaaatctgataggcccagtttaggtcagggttccactcctagtccaataagctgaatccasgggtgagggcaggacatggccacacaatagaaaatggccacaagaggtctgtcttgtaacctaagcattagggcagaacagttccaagagagagaagtagtggtaagaagggtgtgtgatgtcccagaaggaagctactccgtggaggatccagtgtggtggtgctccatcacgccacaaaaaaactggattcaagcccaacaccactgggatccagtgagaaaatattgaggagttttaacacatcctctggaaacactgtaagcatttttccttagactacataggtaaagagaggggattttttttttttttacaatgtcatttaatcctccaagacaatgtgataagctctgttttgcagata

SEQ ID NO: 23906 - DNA, 745 bp, Homo sapiens
acatgtaccctagatcttaaagtgtaataaaatatatatataaataaacaattagaaaaatgaactattcttagatggtggaattaatgttaatatttttgttcttctgctcttctatattttttaaaattctataatcagcagtgttttacttttattatccccaaacccaacactttaaaaggtttttgtcatacttgagagggcactgtccccagtaccaagtttcctctctcggctgccctccctccttttatctgttctgcttttcccaacaccatgagtgcgcacacacacatatgtacacatacgtggaacacayacaccatgtacacatacaacacacacatgtacacatacacacaacacacacggacacacacatttatgaagttcccatatcactggcttggtttgtgcttggtcaataaccaagaaattaataacctccggttttctccggactgacctcttagttaggattatctttggcttcctagaatatatgacccatggtatgactcactgacctctggcctagtttgccctactggaggtcttcctggattcctggtctcagccttcaccaggttatctcaacctggtgcttaccctaatgtactgagttgaatagcaccccgcagcccaatgcatgtccttcctggtacctcagaatgtgaccttatttggaaataggatatttgctggcgtaactagttaagatgaagtcctattgaaatagggt

SEQ ID NO: 23907 - DNA, 1031 bp, Homo sapiens
aattcaaatgttcccaacacaaagaaaagataatagtttgatgtgatggggatcccaattagcctgatttgatccttacatattgtatatattaatcattaatcaaaatatcacatgtatcccccaaaatacgtacaacttttttttttgagacggagtttttggggagggccctctttmtggttaggagacagccacctgcttgtgtgccctcagatggcagagagagatcatctctttgtcatcttttcttataagggtactaataccattcctaagggctccatccttatgacctcccaaagtccccacctcctaatactgtcaccttaggaattaggttccagcatatggattttgaagggatgcaaacatgcagtccacagcactccctttccagcatgtgactccatggctgcgagcactctgtttcctatatagcagcaaggtggctttcacccccacttcctggatgtgcacacatccagctaggtgggcttcgcctgcagggcaagtggtgagcaggcactcagggcccaaagaggagagagcccaggctgggagtgggctgggaggaagtcaggcttgcagataccctccaccccaaccctgcccacctcatcatggcctccactcaagaggaaatggattccagagaggctaggggtggagacctgctgggatccatgaggaggacagcaggaaaagagggtccccaaggagaaaggttgcctcccacagtgactcaaagggggtggttgagggaaggttccagcccctgacctgtgaaccagcttcaagtcagggaaacagggtgaagccactgggcctggggcccctgtcctgggagtgttaaatggggggtgggaccacacaaataagttctgtggcgagagggctaagaggctgttccgtagggcagggtgcttttcccttcaccatccacaggcttgtactggagttacagaagtgtctgccaggacgaagagaagaggagaggatttttagcaagccgaggacaggacaagttc

SEQ ID NO: 23908 - DNA, 1031 bp, Homo sapiens
aattcaaatgttcccaacacaaagaaaagataatagtttgatgtgatggggatcccaattagcctgatttgatccttacatattgtatatattaatcattaatcaaaatatcacatgtatcccccaaaatacgtacaacttttttttttgagacggagtttttggggagggccctctttatggttaggagacagccacctgcttgtgtgccctcagatggcagagagagatcatctctttgtcatctyttcttataagggtactaataccattcctaagggctccatccttatgacctcccaaagtccccacctcctaatactgtcaccttaggaattaggttccagcatatggattttgaagggatgcaaacatgcagtccacagcactccctttccagcatgtgactccatggctgcgagcactctgtttcctatatagcagcaaggtggctttcacccccacttcctggatgtgcacacatccagctaggtgggcttcgcctgcagggcaagtggtgagcaggcactcagggcccaaagaggagagagcccaggctgggagtgggctgggaggaagtcaggcttgcagataccctccaccccaaccctgcccacctcatcatggcctccactcaagaggaaatggattccagagaggctaggggtggagacctgctgggatccatgaggaggacagcaggaaaagagggtccccaaggagaaaggttgcctcccacagtgactcaaagggggtggttgagggaaggttccagcccctgacctgtgaaccagcttcaagtcagggaaacagggtgaagccactgggcctggggcccctgtcctgggagtgttaaatggggggtgggaccacacaaataagttctgtggcgagagggctaagaggctgttccgtagggcagggtgcttttcccttcaccatccacaggcttgtactggagttacagaagtgtctgccaggacgaagagaagaggagaggatttttagcaagccgaggacaggacaagttc

SEQ ID NO: 23909 - DNA, 1031 bp, Homo sapiens
aattcaaatgttcccaacacaaagaaaagataatagtttgatgtgatggggatcccaattagcctgatttgatccttacatattgtatatattaatcattaatcaaaatatcacatgtatcccccaaaatacgtacaacttttttttttgagacggagtttttggggagggccctctttatggttaggagacagccacctgcttgtgtgccctcagatggcagagagagatcatctctttgtcatcttttcttataagggtactaataccattcctaagggctccatccttatgacctcccaaagkccccacctcctaatactgtcaccttaggaattaggttccagcatatggattttgaagggatgcaaacatgcagtccacagcactccctttccagcatgtgactccatggctgcgagcactctgtttcctatatagcagcaaggtggctttcacccccacttcctggatgtgcacacatccagctaggtgggcttcgcctgcagggcaagtggtgagcaggcactcagggcccaaagaggagagagcccaggctgggagtgggctgggaggaagtcaggcttgcagataccctccaccccaaccctgcccacctcatcatggcctccactcaagaggaaatggattccagagaggctaggggtggagacctgctgggatccatgaggaggacagcaggaaaagagggtccccaaggagaaaggttgcctcccacagtgactcaaagggggtggttgagggaaggttccagcccctgacctgtgaaccagcttcaagtcagggaaacagggtgaagccactgggcctggggcccctgtcctgggagtgttaaatggggggtgggaccacacaaataagttctgtggcgagagggctaagaggctgttccgtagggcagggtgcttttcccttcaccatccacaggcttgtactggagttacagaagtgtctgccaggacgaagagaagaggagaggatttttagcaagccgaggacaggacaagttc

SEQ ID NO: 23910 - DNA, 1031 bp, Homo sapiens
aattcaaatgttcccaacacaaagaaaagataatagtttgatgtgatggggatcccaattagcctgatttgatccttacatattgtatatattaatcattaatcaaaatatcacatgtatcccccaaaatacgtacaacttttttttttgagacggagtttttggggagggccctctttatggttaggagacagccacctgcttgtgtgccctcagatggcagagagagatcatctctttgtcatcttttcttataagggtactaataccattcctaagggctccatccttatgacctcccaaagtccccacctcctaatactgtcaccttaggaattaggttccagcatatggattttgaagggatgcaaacatgcagtccacagcactccctttccagcatgtgactccatggctgcgagcactctgtttccyatatagcagcaaggtggctttcacccccacttcctggatgtgcacacatccagctaggtgggcttcgcctgcagggcaagtggtgagcaggcactcagggcccaaagaggagagagcccaggctgggagtgggctgggaggaagtcaggcttgcagataccctccaccccaaccctgcccacctcatcatggcctccactcaagaggaaatggattccagagaggctaggggtggagacctgctgggatccatgaggaggacagcaggaaaagagggtccccaaggagaaaggttgcctcccacagtgactcaaagggggtggttgagggaaggttccagcccctgacctgtgaaccagcttcaagtcagggaaacagggtgaagccactgggcctggggcccctgtcctgggagtgttaaatggggggtgggaccacacaaataagttctgtggcgagagggctaagaggctgttccgtagggcagggtgcttttcccttcaccatccacaggcttgtactggagttacagaagtgtctgccaggacgaagagaagaggagaggatttttagcaagccgaggacaggacaagttc

SEQ ID NO: 23911 - DNA, 613 bp, Homo sapiens
tgcatatctcagaatctcaaaacatcatcatcatcattaataacaacaacaacaacaacaaaaatctcagaatctcatgatctattttccaagaaatctggtctataacacctaccaaccttgaaatccaaccttttcttatactttacttattgccatttcaatagtgtaaattagtcttataaattgacatctctggttcccatcatccctagtagccaatcaactactgtgcttgcaagaagaagaatcagatacaagtcctgatcttcaggaacttgaagtccagactgaaaaccaagatttcaaaaaaaaattagctaacctcctttcaattaaaataacaatataaaattctagctgaaggaatactacaaatttctttgcctagtgagtggaacagacatattctgtgacttcaaaagagagaacatgtrgtggattagggatgttagcaaagagattggaaagatagcaacaaatttttaaagaattaggaaattgacaaagaatcagaaagtttacagattatagatttaacaatgaatttgatggtgaggggagaatggaggtaatttcatattggagtttggatagaagcaggaaatagagg

SEQ ID NO: 23912 - DNA, 548 bp, Homo sapiens
ttttttaaagaaatgagattagcatcatatatgctgatccctaaatgcaaaagcaaaattcacaaaaatagtataattccgtttatgttctttaaatagctctatatgtgtaaatatagaagtctattagcacaaagaaaaagctctagaaaggcataagactctagtggtacatctacaaagatgtagcataccagtaggcacttctgaaatggggagaataattgagttaggtaagagaataaaggggaatctttattttcactctcacatgtctacttttttwaattttttacaatgaaacttgtttatgataaaagataaaaagagaacatggtgataaaaatggtaaatgtctcacaaagttataaagttaaattgagataacataaatgaaagttttgggaacacggtaatccttgagaaaaacaagttacttttgcactgttttattcttcttagggattcaaacctataggttagacttttaaacaatgtattatataacttacagacccttctcatgtgggcatctggctctctctgct

SEQ ID NO: 23913 - DNA, 724 bp, Homo sapiens
caaagtggacataaaatccaaagtggagtagcttgggactacaggtgtgtgccaccacacccagctaattttttgtattttttagtagagacagggtttcgccatgtcggccargctggtcatgaactcctgagctcaagtgatccccctcctgagcctcccaaagtggtgggattacaggcgtgagccacccgcgcctggcccaggacccctcttcttcagggcaatgcaccatctgtgaagctcccacctgaaatcagtcttcagtccaaccttgcagacttggctactgctgatcttctcctcatcccttctgtgggggcccctataggtaggcatctattgtactgctgtgccagggtctagcctccctgaattaaatgtgccactcagccatttccattggtcactgaagtttccacccccacccagtcctggtcagtctccctctgtctcactgcactcaaaggcacttggctctctccctcccctgcagcataataactcaagttcaggcttttactcaaagccagaggaggcagcctgtcattgagtaccttctagtagcatggggctagtttgtactggaggaaggaagagggagtataggagcacagaaaggaaaggcaacaccccactggtcatcatggcaatcagctagggtgttcctactggccacagtacccactgcttctggaaacctctcttttccagaaggcccctg

SEQ ID NO: 23914 - DNA, 1899 bp, Homo sapiens
gacctctttgcattggatttccttggtatcatcttattgcctaaaaaacatcttagtcttttctttctttttttttttttttttttgacagagttttgctcttgttgccaggctggagtataatggcctgaacttggctcactgcaacccctgcctcctgggttcaagctattctcttgcctcagcctccgagtagctgggattacaggtgcccgccaccacacccagctaattttttttttaattattattttttatttttagtagagatggggtttcatcatgttggccaggctggtcttgaactcctggcgtcagttgatctgcctgcctcgacctcccaaagtgctgggattacaggtgtgaaccactgcactggccgccgaaaaatcttctaagagcgtaggctggcctgaatcctgagaatcactggatatagtggttttgaaatgagatgggattctgcatgattatatagccacattttcttttattagtatactttgaatgtaataatgagacgtagtaaaattgtttacctaacagttctcaggcaaacctctagaacctttcaaatttgttggtaaatctctggcttgaattgtagtgtcacaggcttaaaattggtcaaattgcaaatttcaattaagggcatgcttccagtgtatgtccttctctttctcccatcttatgtctgagtcccctacaagcccaaatatttactcagcctcgctggcctgaacaaaactccatgccttgagcttctcccttctcactcaaaattaatcattctacagtgttctttgctccatctgaaacataatttctgctaggtggccatggttgataaatcaattattcaactaaaggagcatattccaaaatatgttcacccatagcactaattctacaggatgtcatacagaaaaaaatggggaacaaaaggcttttgttgttccattagtatgggaaatgccgtatactgcatcctctctcagatattaaaaactgacattctcattaaaactttgggcrgtatgaaagccatcttaactttaacttcacattttccagaatttcaacttgccaccacccatcccccctgccctttaaaaaaaaatatgacatctttagagacactgagacaaaacaatccttgctaaggccctgaccagctgtactgagaaagatggactatgcaaggtggcacttgtacataatgggtaattcataactgtcattatctttagtcccaaattagcaattatcagatgaactcttgagtgtgagcatttgtacccacatgcatatatatttatctgagacaggtgcctcacattctctacacactaggttttatcattttaattgcctggccaatgttgaagcaccatctcaggcgctgctaaattgcaggtgtttgtctttatttttcacccttcatattatacctcttattttatttttgttatcttaattttctaaagacttctttgtggttttatggctggctgccagcgttctgggaagtgtgtgtttttagatctttgttttttaaagatccacacacacaaaaaaatgctcacagtaagaaaaaccatctccagagttggcattgttttacttttcaagaacaagtttgagttgaaagaagcagcattatttatttctcatgggcatgtcctttggctcactctctgggaaaatcctcatccttgcagatcaaaaaagagaactgcctcccagtgaattagaatacaatctgcatttgcccacaatatcacacagtgatttcagaaatttggcttgtacacatctggggaatgatggcagaatgcccctagttaaaacagctttcagaacctacgtgggtgattttgattccctatgcctcatttt

SEQ ID NO: 23915 - DNA, 414 bp, Homo sapiens
  misc_feature (1)...(414): n = A,T,C or G
ttnnnnnnnnnnnnnnnnnnnnnnnnnnnnnnnnnnnnnnnnnnnnnnnnnnnnnnnnnnnnnnnnnnnnnnnnnnnnnnnnnnnnnnnnnnnnnnnnnnnntctccataggacaactcatatcattgaaaaccataaagccaacatttggagaaactcaaaaacttccaagcagaattttttaaaaaagattctgaaatctaacayaaataaaaaatatttagggcaaccataagaaaaaacatccactgttttcaaagaagaaataagctttataggttacttttcaggagaaactatcaagctagatggcaatggaatgactacttacaagtgctaaggggaaccatctgccaacttagtgtcctataccaagcaaaaaatattcttcaatattatgggaaaatgcaaaaa

SEQ ID NO: 23916 - DNA, 535 bp, Homo sapiens
aaccataacctggatgaacaacggttcctgtgctggaaatgccacatttcagctggactggccaccatgcaccaagaggaactaagacagagaggcgagagaagtgggaatgtttcctcccccttccattttccttgatgttaagagaatcaggawttattgcattgggtcaaacgtagctcttacagtttggtgatgctaaggacttcttgctcagtatcccactatactgggacctttacaggtgcaatgccatctgtccctttcaaggccctggcagaggaggtatcaccctcattttacagatgcagcagctgagactctgaaagatcataaagttgcatagggaatatacgaagtactgggattcaacctcaggcccgccgagagccctttccagcagaacagggctttccgtattacaagttcaacctactcaaggggaataaaactaatttaatgtgttcaagactaaagtaattaaaataagattagactagaataaaatatatagattagagaatagagtacattc

SEQ ID NO: 23917 - DNA, 535 bp, Homo sapiens
aaccataacctggatgaacaacggttcctgtgctggaaatgccacatttcagctggactggccaccatgcaccaagaggaactaagacagagaggcgagagaagtgggaatgtttcctcccccttccattttccttgatgttaagagaatcaggaattattgcattgggtcaaacgtagctcttacagtttggtgatgctaaggacttcttgctcagtatcccactatactgggacctttacaggtgcaatgccatctgtccctttcaaggccctggcagaggaggtatcaccctcattttacagatgcagcagctgagactctgaaagatcataaagttgcatagggaatatacgaagtactgggattcaacctcaggcccgccgagagccctttccagcagaacagggctttccgtattacaagttcaacctactcaaggggaataaaactaatttaatrtgttcaagactaaagtaattaaaataagattagactagaataaaatatatagattagagaatagagtacattc

SEQ ID NO: 23918 - DNA, 581 bp, Homo sapiens
ggaaaatgctggattaagcaaaacaaatgggtttctttgttctaggattccccatgcctttgaagctctaatatgctttctttttctcatctttaaaaggggataataatgcctacaccataaagttcttgtaaagattaaatgaatcaattctacagagcttaataaatgttagcttccattattatggctatgatcattattattagtaatmtggaaaggagagggatatagaatatagcatcctccacatttaggagtctatagaaatctcttattcattgacttgtgaactttctcactgggggctaatatttctcattacaccacctgagaaatcctgtctaggatgatcctctggtcccttccatatctgatgtcctgtgacttcacagtaaagcttccaaacataggctcccataccctgagcaagcatataaaaaagcccataacaagtactgcatgagcgtttgttgaatgaacacatgaatgattcacttttaaagtcgagaacatccagttcacaggctcaaattacagccctgcctcctagctggaggtgtttttcagagtctgcggtt

SEQ ID NO: 23919 - DNA, 950 bp, Homo sapiens
agaagagtttctttggggtgtagacccacgaacagattgacctccagaagtgtccttgcatctctacatccctttccccaaccccaagcttggcatcgcctcactatctgttttttccagtctgaaaaatgtaaagggatgcctaattgttgtttaattgacattagtctcattactaatgccattaagcatctcttcatgtgcctgygcatccttttaggactcttcttctgaaaattgccttttcaacttctttgcttttttatctaatggagtttctgtacttttcttgttgattttcaggagttccttctttttctagactaataatagacccttgttggtttcagacattgtggtggtcttttctgatcctttgtgtgtctattaaaagtatccatggtatttgttgaatagaaatccttaatttaatataatcaaattcatcaatttttttgttttatgcttttgaagttttgtatgagaaatccttccccatccctctcccatgatattcgcctacattttttgtcctatttcctttacagtgttaagtagggataagttttgttgtttttttctccatagagtgagccaattatccccccatctactaaacaacctttcataagttctacatattttttgcaaattagatacactggtatgaaacaaacagcatctgaaagaggggagaaagagggtcatatgagtggaagaaaagaaataaaactccagctcctccccactgaatactaacttccttccaaatgcctgcccttctgctacctgtgagtggtgacgtttcccctttcagagcttggggcatagcactcatttgcacaaaagccgactaaaaatcggccaactcttgtatcacactaaactgcaagagtaaagcctgctacttaaggagctgttgtttaaggagaaacggagatgatagttca

SEQ ID NO: 23920 - DNA, 950 bp, Homo sapiens
agaagagtttctttggggtgtagacccacgaacagattgacctccagaagtgtccttgcatctctacatccctttccccaaccccaagcttggcatcgcctcactatctgttttttccagtctgaaaaatgtaaagggatgcctaattgttgtttaattgacattagtctcattactaatgccattaagcatctcttcatgtgcctgtgcatccttttaggactcttcttctgaaaattgccttttcaacttctttgcttttttatctaatggagttwctgtacttttcttgttgattttcaggagttccttctttttctagactaataatagacccttgttggtttcagacattgtggtggtcttttctgatcctttgtgtgtctattaaaagtatccatggtatttgttgaatagaaatccttaatttaatataatcaaattcatcaatttttttgttttatgcttttgaagttttgtatgagaaatccttccccatccctctcccatgatattcgcctacattttttgtcctatttcctttacagtgttaagtagggataagttttgttgtttttttctccatagagtgagccaattatccccccatctactaaacaacctttcataagttctacatattttttgcaaattagatacactggtatgaaacaaacagcatctgaaagaggggagaaagagggtcatatgagtggaagaaaagaaataaaactccagctcctccccactgaatactaacttccttccaaatgcctgcccttctgctacctgtgagtggtgacgtttcccctttcagagcttggggcatagcactcatttgcacaaaagccgactaaaaatcggccaactcttgtatcacactaaactgcaagagtaaagcctgctacttaaggagctgttgtttaaggagaaacggagatgatagttca

SEQ ID NO: 23921 - DNA, 1179 bp, Homo sapiens
tagagagccggatttccaagtctcagcaccactggcattgggcatcctcctttatcgtggcaactgtcctgcactgcatcctctacccaccacatgccagtggcaacccctccccctagctgcgacaaccaaaaacgtctccagacattgcctgatgtcctttggggaggaaggggatgagaaagccctcactcccttgccagctgagagccactagtctagatattaacctctcgctggccttaggatacatagggtacatttcatttttttatttttggggggaggggatctcactatgtcacccaggctggagtgcaatggtgcaatcttggctcactgcagtctcgacctcctggacccaaggaatcctccccgcctcagcctctcccaagtagctgggactacaggcatgcgccaccatgccctgctattttttttttattttatattttgtagggaaagggtctcactatgttgcccagactggtcttgaactcctggcctcaagaaatcctcccaaagcacgtgggctacaggtgttagcctgtaaccatgcctggctcttcgggtacatttctgttggggtaagagttgactcatcattggaggactctggagtccctctctctgtcccccaacgaggcaggtgcagaattgcccccartcactgttctagagaagagcacagaactagggaggagtctaacacacctgtctgcttttcctcatctgcagacaggggaggggagcgtctccctcccggggttgccatgagaattaaatcagatgctggcgaagctcccagcttcaccgggcgccttagttcatttgtttcctttcttggcaccttcaccctctcctctccagagcctcaacttccctccaatgaactctgctccgaaggtcccacttcttcccccacagcttgtacactaggcacacgaaggcaccacccccaccccatacaagccttctctgctgctcactcccactctgacctccgtgtccccaccacgtccctatggccgactgtgcagtgggacaggcatggagcgtgggtctatacagacccagaggggtcagcggctggggctggagcttgctaggcacctgggtcttgggccatttacgtcacctctctgagcctcggccccacatctgtgaagagagggatga

SEQ ID NO: 23922 - DNA, 1179 bp, Homo sapiens
tagagagccggatttccaagtctcagcaccactggcattgggcatcctcctttatcgtggcaactgtcctgcactgcatcctctacccaccacatgccagtggcaacccctccccctagctgcgacaaccaaaaacgtctccagacattgcctgatgtcctttggggaggaaggggatgagaaagccctcactcccttgccagctgagagccactagtctagatattaacctctcgctggccttaggatacatagggtacatttcatttttttatttttggggggaggggatctcactatgtcacccaggctggagtgcaatggtgcaatcttggctcactgcagtctcgacctcctggacccaaggaatcctccccgcctcagcctctcccaagtagctgggactacaggcatgcgccaccatgccctgctattttttttttattttatattttgtagggaaagggtctcactatgttgcccagactggtcttgaactcctggcctcaagaaatcctcccaaagcacgtgggctacaggtgttagcctgtaaccatgcctggctcttcgggtacatttctgttggggtaagagttgactcatcattggaggactctggagtccctctctctgtcccccaacgaggcaggtgcagaattgcccccaatcactgttctagagaagagcacagaactagggaggagtctaacacacctgtctgcttttcctcatctgcagacaggggaggggagcgtctccctcccggggttgccatgagaattaaatcagatgctggcgaagctcccagcttcaccgggcgccttagttcatttgtttcctttcttggcaccttcaccctctcctctccagagcctcaacttccctccaatgaactctgctcygaaggtcccacttcttcccccacagcttgtacactaggcacacgaaggcaccacccccaccccatacaagccttctctgctgctcactcccactctgacctccgtgtccccaccacgtccctatggccgactgtgcagtgggacaggcatggagcgtgggtctatacagacccagaggggtcagcggctggggctggagcttgctaggcacctgggtcttgggccatttacgtcacctctctgagcctcggccccacatctgtgaagagagggatga

SEQ ID NO: 23923 - DNA, 762 bp, Homo sapiens
cttagaggtgacagaaaggatggcattttcctggagaccatcgagatattcgactttttctttcaatctatgaacataggtagagcacaactgcggactggacaggtgtgggtccatgtccctcctcacacggacaagagggggccggcatgggccagcaaacctgaccagtgtgacagtgacagcagctcctgcactctgctgatttctgctgagatgctggcctccctgattcttttttttctttttttttagagatggtgtctcactatgttgcccaggctggagtgcagtggctatttagaggtgcaatccyactgctgatcagcacgggagggttttttgtttgttttgtttgtttgtttgtttgttttttgagatagagtcttgctctgtcacctgggctggagtgcagtggcgcaatctcagctcattgcaacctctgcctccaaggtacaatagattctcatgcctcagccatccaagcagctgggattacaggtacgcaccaccacacctggctaatttgtgtatttttagtagatatggggtttcaccatgttggccagtctggtcttgaactcctgacctcaaatgatccgcctgccttggcctcccaaagtgctgggattacaggcatgagccactgtgcctggcaaagcacaggagttttgacctgctctatttccagcatggcagtgttcacccctccttgggcaacatggtggtcccccattcctgggaggtcaccatattgatgcc

SEQ ID NO: 23924 - DNA, 762 bp, Homo sapiens
cttagaggtgacagaaaggatggcattttcctggagaccatcgagatattcgactttttctttcaatctatgaacataggtagagcacaactgcggactggacaggtgtgggtccatgtccctcctcacacggacaagagggggccggcatgggccagcaaacctgaccagtgtgacagtgacagcagctcctgcactctgctgatttctgctgagatgctggcctccctgattcttttttttctttttttttagagatggtgtctcactatgttgcccaggctggagtgcagtggctatttagaggtgcaatcccactgctgatcascacgggagggttttttgtttgttttgtttgtttgtttgtttgttttttgagatagagtcttgctctgtcacctgggctggagtgcagtggcgcaatctcagctcattgcaacctctgcctccaaggtacaatagattctcatgcctcagccatccaagcagctgggattacaggtacgcaccaccacacctggctaatttgtgtatttttagtagatatggggtttcaccatgttggccagtctggtcttgaactcctgacctcaaatgatccgcctgccttggcctcccaaagtgctgggattacaggcatgagccactgtgcctggcaaagcacaggagttttgacctgctctatttccagcatggcagtgttcacccctccttgggcaacatggtggtcccccattcctgggaggtcaccatattgatgcc

SEQ ID NO: 23925 - DNA, 605 bp, Homo sapiens
aaccaaaggttgcagtgagctgagatcacaccattgcactccagtctggatgacagagtgagattccatctgaaaaaaaaaaaaaaaagaaagaaaaactagtcttctcatcctgggtaagtaagggtgccctccagaaataagatgaatcttgttgcatctaaggttgaatctaagaagtcagcctaaaagcaaacttcaattcagactcaagggtcagcaacagtagtcataacacaaaagcaacaagatgtggaatagaatagaacatggagattttctgtggcaaagccacagagagatgggatggaggaggggttggtgtctgtagctgtcagttcttgygccattaaggtgatcaattagtctgaatacatggcgtaagtcagtaacatagggaagattagaactgacatttgtctaacttcaaagactgggttctctctgcaatctttgcatgctccccagacacctctgtctactcagtcccttacatacatttatgctttatgtccattcatacctattcttgtgcctctgggaagataaaggaggtacacctttccctattctctctgctaagtaaaactaaaacccccaaacat

SEQ ID NO: 23926 - DNA, 1536 bp, Homo sapiens
tttttgagacagagtttcactttgttgcctaggctggagtgcagtggcacgatcttggctcactgcaacctacacctcccaggttcaaggaattctcgtgcctcagcctcctgagtagctgggattacaggcacatgccaccatgcctggctgattgttttgtattttagtaggaacgggctttcaccatgttgcccaggctggtctcaaactcctgagctcaggcaatccacccgtctcagcctcccaaagtgctaagattacaggcatgaatcaccgtgcccagggtccatgctaatttagaatatgatctaaaacccattcgccatcctcccagtctggggaggatcagacactggtgggatttccagggttgggtccccacagctcaccctgcaggcccatgacactgctgatcaccacgatgtggccctgccgcctcctcttcatgcctggaagcacagctttgacgagacggacagctccgaaaaagttggtgtcaaagacattctgcatggcagcaaggctgagcccctccaggggccccaccaggcccattccagcattattcactaagagaagaggtactaagggttaccttaaagtccctcactcttctagcattacttctagacactccctgaagcacctcaccccgtactccaagtccaaggccagtccagggtatcttgggtggacaaatatgaaaccttggtaacctttaaacacagtttagcatttgtcataggggatcctcagccctgagtgggaggaagggctgctgggaatagtgccccccttaatccatgagcaattcaattctgaccccaaattacatcaagacagcgacacccaccttcctgcgaaggttagggaccttatgacttatttctgtatcatgctgtcttccccaagtgactcatccaagtaattttcccaaccacatatggctttctccatatatgagaatttctattccataaaatctgccccacctccaggcctcagattgttactagtgtctctaatatttttgttttttwaaaaaattgatttttgagctgggcatggtggctcatgcctgtaatctcagcacttcgggaggccaaggtgagtggatcacctgaggtcaggcttcgagaccagcctgatgaacatggagaaaccccgtctctactaaaaatacaaaattagccaagtgtggtggcgcctgcctgtaatcccagctacttgggaggctgaggcaggagaatcacttgaacccaggaggtggaggttgcagtgagctgagattgcgccattgcactctagcctaggcaacaagagtgaaattccatctcaaaaaaaattgatttttggccaggtgtggtggtgcatgcctgtaattccagcactctgggaggtcgaggtgggcggatcacttgaggtcaggagtttgagaccagcctgaccaacacggtgaaacctcgtctctaagaaaaatacaaaaattagctgggcatggtggcaggcacctgtaatcccagctactcagga

SEQ ID NO: 23927 - DNA, 1536 bp, Homo sapiens
tttttgagacagagtttcactttgttgcctaggctggagtgcagtggcacgatcttggctcactgcaacctacacctcccaggttcaaggaattctcgtgcctcagcctcctgagtagctgggattacaggcacatgccaccatgcctggctgattgttttgtattttagtaggaacgggctttcaccatgttgcccaggctggtctcaaactcctgagctcaggcaatccacccgtctcagcctcccaaagtgctaagattacaggcatgaatcaccgtgcccagggtccatgctaatttagaatatgatctaaaacccattcgccatcctcccagtctggggaggatcagacactggtgggatttccagggttgggtccccacagctcaccctgcaggcccatgacactgctgatcaccacgatgtggccctgccgcctcctcttcatgcctggaagcacagctttgacgagacggacagctccgaaaaagttggtgtcaaagacattctgcatggcagcaaggctgagcccctccaggggccccaccaggcccattccagcattattcactaagagaagaggtactaagggttaccttaaagtccctcactcttctagcattacttctagacactccctgaagcacctcaccccgtactccaagtccaaggccagtccagggtatcttgggtggacaaatatgaaaccttggtaacctttaaacacagtttagcatttgtcataggggatcctcagccctgagtgggaggaagggctgctgggaatagtgccccccttaatccatgagcaattcaattctgaccccaaattacatcaagacagcgacacccaccttcctgcgaaggttagggaccttatgacttatttctgtatcatgctgtcttccccaagtgactcatccaagtaattttcccaaccacatatggctttctccatatatgagaatttctattccataaaatctgccccacctccaggcctcagattgttactagtgtctctaatatttttgttttttaaaaaaattgatttttgagctgggcatggtggctcatgcctgtaatctcagcacttcgggaggccaaggtgagtggatcacctgaggtcaggcttygagaccagcctgatgaacatggagaaaccccgtctctactaaaaatacaaaattagccaagtgtggtggcgcctgcctgtaatcccagctacttgggaggctgaggcaggagaatcacttgaacccaggaggtggaggttgcagtgagctgagattgcgccattgcactctagcctaggcaacaagagtgaaattccatctcaaaaaaaattgatttttggccaggtgtggtggtgcatgcctgtaattccagcactctgggaggtcgaggtgggcggatcacttgaggtcaggagtttgagaccagcctgaccaacacggtgaaacctcgtctctaagaaaaatacaaaaattagctgggcatggtggcaggcacctgtaatcccagctactcagga

SEQ ID NO: 23928 - DNA, 1076 bp, Homo sapiens
tccgagaatgaaactggggctctcagcggggtcaggctgtgggaccctgtggcttaaagcagggatggctcattttgcctctaggagtaactgaggaatgggcatgtggagaaaaccaacttggtgtccagccagaaagctggacagagaaccagagagaagagctttctgcaaatgtgtaacctggtcratgaaggactagagattttggggcaaaactaacataaataggcattgtcttttcaaatgctgggcgcattgctcctggagaatcatattagaaatcataaggaactgtgctccctgtggacatctttatggattttcctctagtgtttcaccattaaacctgatattgccaggcatggtaattacacactcatgcctgtagtcccagcactttgggagtccaaggcaggaggattgcttgaggccaggagttcaagaccagcctgggcaacataggagacctctgcctctacaaaaaaaaaaaaaaaatgtttttaattagctgagtgtggtgacgcacccctatagtcccagctacttggaaggctgaggcaggaggattgcttgagcccaggaagccaaggcggcagttagctatgatcacaccactgcactcccatctgggcgacagagtgagactccatctcttaaaaaaaaaaagagaaaaaaaagccaaaaacctgatgctgactgttgatttcagataaatatttatcacgagtttaaggaagtagcattgtcttcctggcttactagattttatcaggaaaggatgtcgaattttatcagctgccttttcagcatctcccttggccttttccacgtgtgtgtttaatcagtaaactttttattttaggatagttttggattacggaaaagtcacaggaacattagagagttccatgtacctggcacccattttccctattatgtattagtaaagttattaacattactttagaacatttgttaccatggatgcacgttattgatacttaattattatcttaagtccatgctttattccagcggccttagcttttacctaatgccctcctcctgttcca

SEQ ID NO: 23929 - DNA, 1076 bp, Homo sapiens
tccgagaatgaaactggggctctcagcggggtcaggctgtgggaccctgtggcttaaagcagggatggctcattttgcctctaggagtaactgaggaatgggcatgtggagaaaaccaacttggtgtccagccagaaagctggacagagaaccagagagaagagctttctgcaaatgtgtaacctggtcgatgaaggactagagattttggggcaaaactaacataaataggcattgtcttttcaaatgctgggcgcattgctcctggagaatcatattagaaatcataaggaactgtgctccctgtggacatctttatggattttcctctagtgtttcaccattaaacctgatattgccaggcatggtaattacacactcatgcctgtagtcccagcactttgggagtccaaggcaggaggattgcttgaggccaggagttcaagaccagcctgggcaacataggagacctctgcctctacaaaaaaaaaaaaaaaatgtttttaattagctgagtgtggtgacgcacccctrtagtcccagctacttggaaggctgaggcaggaggattgcttgagcccaggaagccaaggcggcagttagctatgatcacaccactgcactcccatctgggcgacagagtgagactccatctcttaaaaaaaaaaagagaaaaaaaagccaaaaacctgatgctgactgttgatttcagataaatatttatcacgagtttaaggaagtagcattgtcttcctggcttactagattttatcaggaaaggatgtcgaattttatcagctgccttttcagcatctcccttggccttttccacgtgtgtgtttaatcagtaaactttttattttaggatagttttggattacggaaaagtcacaggaacattagagagttccatgtacctggcacccattttccctattatgtattagtaaagttattaacattactttagaacatttgttaccatggatgcacgttattgatacttaattattatcttaagtccatgctttattccagcggccttagcttttacctaatgccctcctcctgttcca

SEQ ID NO: 23930 - DNA, 1076 bp, Homo sapiens
tccgagaatgaaactggggctctcagcggggtcaggctgtgggaccctgtggcttaaagcagggatggctcattttgcctctaggagtaactgaggaatgggcatgtggagaaaaccaacttggtgtccagccagaaagctggacagagaaccagagagaagagctttctgcaaatgtgtaacctggtcgatgaaggactagagattttggggcaaaactaacataaataggcattgtcttttcaaatgctgggcgcattgctcctggagaatcatattagaaatcataaggaactgtgctccctgtggacatctttatggattttcctctagtgtttcaccattaaacctgatattgccaggcatggtaattacacactcatgcctgtagtcccagcactttgggagtccaaggcaggaggattgcttgaggccaggagttcaagaccagcctgggcaacataggagacctctgcctctacaaaaaaaaaaaaaaaatgtttttaattagctgagtgtggtgacgcacccctatagtcccagctacttggaaggctgaggcaggaggattgcttgagcccaggaagccaaggcggcagttagctatgatcacaccactgcactcccatctgggcgacagagtgagactccatctcttaaaaaaaaaaagagaaaaaaaagccaaaaacctgatgctgactgttgatttcagataaatatttatcacgagtttaaggaagtagcattgtcttcctggcttactagattttatcaggaaaggatgtcgaattttatcagctgccttttcagcatctcccttggccttttccacgtgtgtgtttaatcagtaaactttttattttaggatagttttggattacggaaaagtcacaggaacattagagagttccatgtacctggcacccattttccctattatgtattagtaaagttattaacattactttagaacatttgttaccatggatgcacgttattgatacttaattattatcttaagtccatgctttattccagcggccttagcttttacctaaygccctcctcctgttcca

SEQ ID NO: 23931 - DNA, 1033 bp, Homo sapiens
tccagtattccatacatcttcagactgtccccagaatttaaccccactttttttgtttattatactttaagttctagggtacatgtgcacaacgtgcaggtttgttacatatggatacatgtgccatgttggtttgctgcacccattaactcatcatttacattaggtatttctcctaatgctattcctccccctgccccccaccccacaacaggcccctgtgtgtgatgttccccaccctgtgtccaagtgttctcattgttcaattctcacctatgagcgagagcatgcggtgtttggttttctgtccttgtgatagtttgctcagaatgatggtttccagcttcatccatgtccctgcataggacatgaactcatccttttttatggctgcatagtattccatggtgtatatgtgccacattttcttaatccttaaccccactttttccagctgcaatcatgtgcattacaataagtctcaaagtcaggtagcgtaagttctccaactcgttttatttttccaagactgctttgattattctagatcatttatattccatagcaacttcagaatcagtttgacaatcaatttctacagaaaaatcctgatgagattctgattgggattgcagtaaatctaaagattagtttgagaagaattgacctcttaataacattgagtcttctaaaccatgaacatggtatagttcactattgacttgagtctcctttaatttcttccagcagtgctttatattgtttcagtaggataatgatctgatagaagagatgacaggacttatggatggattggatgtaagtggtgaggagaaaggggttaggggccaggctgagtgcccagatttctgcctgagccactgggtggagatgagaaggaaagcaagttgcctcagaagacctagctcagagaagaagtgcttggatttgatttcagcttamttgatcccagggccatgtgcaggaccagctgaaacccacctctctgtacccccacccctggaaggactct

SEQ ID NO: 23932 - DNA, 597 bp, Homo sapiens
gagcaatttaagaaaactgttttaggctgggcatggtggctcatgcctgtagtctcaagcaatttagtaggttgaggcaagcagattgcctgagctcaggagtttgtgaccagcccgggcaacgtggcaaaaccccatctccaccaaaaacacaaaaaattagccaggcatggtggcgcacacctaaagtcgtcccaggtactcgggagcctgaggtggcgggatcacttgaacccgggacgcagaggctgcagtaagccaagatcatgccactgcactccagccttggtgacagagtgagaccctgtytcaattaaaaaaaaaaaaaaaaaaaagctgtttcattaacacttcagaaaaacctggatgactctttttcactcccctttgccaaactctcttcatatgcaccactctctcacatatgctgtttcttcaaataaggcaatacaatccaagtttttcctgttacgatttgtatttttcctgagactatatcctagtctctagatttcagcaaggcttcctgctttgaactgagaagatatcaccctggtctaaaattcagaggcatcacagaacagaagaaaaaatact

SEQ ID NO: 23933 - DNA, 1233 bp, Homo sapiens
caatccagtctggcgagggctgatggaagcaaatctagggactgcagaagcccccagggatataccaaggcaacctgagggtgtagggtcaggggcttcctggaggaggcgatgccagggagaatcactaaattattattattattattttgagactgartctagctctgtcacccaggctggagtacagggacacaatcctggctcactgcaacctctgcctcccaggttcaagcgattctcctgcctcagcctcccgagtagctgggactacagatacgtgccaccatgcctggctaatttttttatttttaggagagatggggtttcaccatgttggcctggctggtctcaaactcctgacctcaactgatccactcgcctcagcctcacaaagtgcagggattagaggtgtgagccaccgcgcctggccgagaatcactagattttgatataatccatgagttggagttgggcaggacaaaggacagaaagcagaggtaggagggtggtgctggaagaaggcatggaacgggcaagccgcggcctggtctgtcaggacaggaggagcaggtcacagtggcagaagcacaaagggtaagggagggtccaaggagggaagtggacggctgaagcagaccatgaagaggaggctggaccacaaagcatcccaaatgccaggcagaggggctgcgactctgtcctgagggtgctggggagccacaggcaggctgggagcaggggagagcagggtgagctctgggtgcagaaaggcccctaaggctgggtagaggtgggctgagagggagagactgggagtgagggaggacccgggtgagggtccaggtgagacaatgacaccaagagacaatagggcaagaagggtggggggtggagaactgacagctttgggagaagggaaagagggtgggacagtacccaggtctaatctggtgtttaggaagctggcagggtctgaatcatttatttgttctgaaaaggacatcaacagacacatccagtgagacaggatgtaatgcagggagccctggggcactgcgggaggggaaggcagcaccctctggaaaggacagtagctgattcaacgcggccttcacgcttcccctctgttctctccctgagcacaccagagacatccatgtgccaggctctgtgctgagtgatgctgggaccagagctgagtcaaacgtgggcctgcaccatgggggagac

SEQ ID NO: 23934 - DNA, 1233 bp, Homo sapiens
caatccagtctggcgagggctgatggaagcaaatctagggactgcagaagcccccagggatataccaaggcaacctgagggtgtagggtcaggggcttcctggaggaggcgatgccagggagaatcactaaattattattattattattttgagactgagtctagctctgtcacccaggctsgagtacagggacacaatcctggctcactgcaacctctgcctcccaggttcaagcgattctcctgcctcagcctcccgagtagctgggactacagatacgtgccaccatgcctggctaatttttttatttttaggagagatggggtttcaccatgttggcctggctggtctcaaactcctgacctcaactgatccactcgcctcagcctcacaaagtgcagggattagaggtgtgagccaccgcgcctggccgagaatcactagattttgatataatccatgagttggagttgggcaggacaaaggacagaaagcagaggtaggagggtggtgctggaagaaggcatggaacgggcaagccgcggcctggtctgtcaggacaggaggagcaggtcacagtggcagaagcacaaagggtaagggagggtccaaggagggaagtggacggctgaagcagaccatgaagaggaggctggaccacaaagcatcccaaatgccaggcagaggggctgcgactctgtcctgagggtgctggggagccacaggcaggctgggagcaggggagagcagggtgagctctgggtgcagaaaggcccctaaggctgggtagaggtgggctgagagggagagactgggagtgagggaggacccgggtgagggtccaggtgagacaatgacaccaagagacaatagggcaagaagggtggggggtggagaactgacagctttgggagaagggaaagagggtgggacagtacccaggtctaatctggtgtttaggaagctggcagggtctgaatcatttatttgttctgaaaaggacatcaacagacacatccagtgagacaggatgtaatgcagggagccctggggcactgcgggaggggaaggcagcaccctctggaaaggacagtagctgattcaacgcggccttcacgcttcccctctgttctctccctgagcacaccagagacatccatgtgccaggctctgtgctgagtgatgctgggaccagagctgagtcaaacgtgggcctgcaccatgggggagac

SEQ ID NO: 23935 - DNA, 1233 bp, Homo sapiens
caatccagtctggcgagggctgatggaagcaaatctagggactgcagaagcccccagggatataccaaggcaacctgagggtgtagggtcaggggcttcctggaggaggcgatgccagggagaatcactaaattattattattattattttgagactgagtctagctctgtcacccaggctggagtacagggacacaatcctggctcactgcaacctctgcctcccaggttcaagcgattctcctgcctcagcctcccgagtagctgggactacagatacgtgccaccatgcctggctaatttttttatttttaggagagatggggtttcaccatgttggcctggctggtctcaaactcctgacctcaactgatccactcgcctcrgcctcacaaagtgcagggattagaggtgtgagccaccgcgcctggccgagaatcactagattttgatataatccatgagttggagttgggcaggacaaaggacagaaagcagaggtaggagggtggtgctggaagaaggcatggaacgggcaagccgcggcctggtctgtcaggacaggaggagcaggtcacagtggcagaagcacaaagggtaagggagggtccaaggagggaagtggacggctgaagcagaccatgaagaggaggctggaccacaaagcatcccaaatgccaggcagaggggctgcgactctgtcctgagggtgctggggagccacaggcaggctgggagcaggggagagcagggtgagctctgggtgcagaaaggcccctaaggctgggtagaggtgggctgagagggagagactgggagtgagggaggacccgggtgagggtccaggtgagacaatgacaccaagagacaatagggcaagaagggtggggggtggagaactgacagctttgggagaagggaaagagggtgggacagtacccaggtctaatctggtgtttaggaagctggcagggtctgaatcatttatttgttctgaaaaggacatcaacagacacatccagtgagacaggatgtaatgcagggagccctggggcactgcgggaggggaaggcagcaccctctggaaaggacagtagctgattcaacgcggccttcacgcttcccctctgttctctccctgagcacaccagagacatccatgtgccaggctctgtgctgagtgatgctgggaccagagctgagtcaaacgtgggcctgcaccatgggggagac

SEQ ID NO: 23936 - DNA, 1233 bp, Homo sapiens
caatccagtctggcgagggctgatggaagcaaatctagggactgcagaagcccccagggatataccaaggcaacctgagggtgtagggtcaggggcttcctggaggaggcgatgccagggagaatcactaaattattattattattattttgagactgagtctagctctgtcacccaggctggagtacagggacacaatcctggctcactgcaacctctgcctcccaggttcaagcgattctcctgcctcagcctcccgagtagctgggactacagatacgtgccaccatgcctggctaatttttttatttttaggagagatggggtttcaccatgttggcctggctggtctcaaactcctgacctcaactgatccactcgcctcagcctcacaaagtgcagggattagaggtgtgagccaccgcgcctggccgagaatcactagattttgatataatccatgagttggagttggrcaggacaaaggacagaaagcagaggtaggagggtggtgctggaagaaggcatggaacgggcaagccgcggcctggtctgtcaggacaggaggagcaggtcacagtggcagaagcacaaagggtaagggagggtccaaggagggaagtggacggctgaagcagaccatgaagaggaggctggaccacaaagcatcccaaatgccaggcagaggggctgcgactctgtcctgagggtgctggggagccacaggcaggctgggagcaggggagagcagggtgagctctgggtgcagaaaggcccctaaggctgggtagaggtgggctgagagggagagactgggagtgagggaggacccgggtgagggtccaggtgagacaatgacaccaagagacaatagggcaagaagggtggggggtggagaactgacagctttgggagaagggaaagagggtgggacagtacccaggtctaatctggtgtttaggaagctggcagggtctgaatcatttatttgttctgaaaaggacatcaacagacacatccagtgagacaggatgtaatgcagggagccctggggcactgcgggaggggaaggcagcaccctctggaaaggacagtagctgattcaacgcggccttcacgcttcccctctgttctctccctgagcacaccagagacatccatgtgccaggctctgtgctgagtgatgctgggaccagagctgagtcaaacgtgggcctgcaccatgggggagac

SEQ ID NO: 23937 - DNA, 1233 bp, Homo sapiens
caatccagtctggcgagggctgatggaagcaaatctagggactgcagaagcccccagggatataccaaggcaacctgagggtgtagggtcaggggcttcctggaggaggcgatgccagggagaatcactaaattattattattattattttgagactgagtctagctctgtcacccaggctggagtacagggacacaatcctggctcactgcaacctctgcctcccaggttcaagcgattctcctgcctcagcctcccgagtagctgggactacagatacgtgccaccatgcctggctaatttttttatttttaggagagatggggtttcaccatgttggcctggctggtctcaaactcctgacctcaactgatccactcgcctcagcctcacaaagtgcagggattagaggtgtgagccaccgcgcctggccgagaatcactagattttgatataatccatgagttggagttgggcaggacaaaggacagaaagcagaggtaggagggtggtgctggaagaaggcatggaacgggcaagccgcggcctggtctgtcaggacaggaggagcaggtcacagtggcagaagcacaaagggtaagggagggtccaaggagggaagtggacggctgaagcagaccatgaagaggaggctggaccacaaagcatcccaaatgccaggcagaggggctgcgactctgtcctgagggtgctggggagccacaggcaggctgggagcaggggagagcagggtgagctctgggtgcagaaaggcccctaaggctgggtagaggtgggctgagagggagagactgggagtgagggaggacccrggtgagggtccaggtgagacaatgacaccaagagacaatagggcaagaagggtggggggtggagaactgacagctttgggagaagggaaagagggtgggacagtacccaggtctaatctggtgtttaggaagctggcagggtctgaatcatttatttgttctgaaaaggacatcaacagacacatccagtgagacaggatgtaatgcagggagccctggggcactgcgggaggggaaggcagcaccctctggaaaggacagtagctgattcaacgcggccttcacgcttcccctctgttctctccctgagcacaccagagacatccatgtgccaggctctgtgctgagtgatgctgggaccagagctgagtcaaacgtgggcctgcaccatgggggagac

SEQ ID NO: 23938 - DNA, 618 bp, Homo sapiens
catacatacatatatgtctacattctaggcaatttaaatatatatacatgtatatgtgtatatgtgtgtgtgtgtgtgtgtgtgcgcgtgtatttacatttcagaaggatacaggctgcaacataaagtcaaagtttaaataatgtagtatgccttcataagtgtggcagwctttgatcaacaaaacttaaccaaaaaaccatatggccaagcattgggggtcatgcctgtaatcccagcactctgggaggctgaagtgggagttatcacttgagcccacacagaaggctgaggctgcagtgagctgtaattgtgccactgcattccagattgggcaaaagagaccatgtcttaaaaacaaaaaacaaaaaccaaaaaataaaaaacagacaaggattaagaagtctgatatcagcattcaaattttccatccaataaaagacacaataagagacaaaatgcaagtggcagatagggagaaaataggacttaaaagcacaaagaattattgcccaagagctatagaggattcttacagagagaaaataagatttaaaagcacaaagaattactgcccaagaactacagaggattcttacagaacagcacataaaaaga

SEQ ID NO: 23939 - DNA, 616 bp, Homo sapiens
tttgagacagagtcttgctctgtcacccaggctggagtgcagtggtgcgatctcagctcactgcaacctccacttcccaggttcaagcgattctcctgcctcagcctcccaagtagctgggttacaagcacacgccaccatgcccagctaatttttgtatttttagtagagacagggtttcgccacgttggccaggctggtcttgaactcctgacctcaggtgatccatccacctcagcctcccaaagtgctggggttacaggtgtaagccactgggcccagccaaggaagtgatctttgagctgaggctccaaggaggtgtgggagcagctgtgagaaaagctggaagagagtgactcagcagagggaacagcaggtgcaaaggccctgaggcaggtggggatcagcttgctgggtgcagagcctcatgcactgtggtaggggtttggctgttacccacagtgagaggggagccacagaggtggtgagggcggaagtaggagcccagtgaggatgaggacgtggtggyccagccagggcagctagactgggctggggccatgggtggtggaacacaggtgacatggtcaggtccaacccctgggacttgcttaaa

SEQ ID NO: 23940 - DNA, 725 bp, Homo sapiens
cagggcagttccaatttaactctgctgtctggggtctctgccagactggtgtgcggtggtacaatcatagctcactgtagcctggaattcctgggctcaagcaatccttctgcttcagccttccaagtacaggagaatacaggtgtgcaccaccatgcccagccttttatttttattttattttattttattttatgttatgttgagacagagtccctctctgttttccaggctggagtgtagtgacacaatctcggctcactgcaacctctgcctcctgggtktaagcgattctcctgccttagcctcccgagtagctgagattacaggcacccaccatcatgcccggctaagttttgtatttttagtagagacagggtttcaccatgttggccaggctggtcttgaactcctgacctctggtgatctgcccacttcggcctccctaagtgctgggattacaggcgtgagccactgcgcccagcctattttttaagtagagatgaggtcttggtatgttgccccaggctgatctcaaactcctggactcaagtgaccttcccacctccacctcccaaagtgctgggagtgtttacggaaataccaggggtttggtctaggtcctgctgttcaccgcacagatagccaatcaccgaggcaaggattattgccaagcaagaaggctttaggctttaattggatgctgcaaccaaggagatgggagc

SEQ ID NO: 23941 - DNA, 544 bp, Homo sapiens
tgtcataataataaaaataaagtgaataataaatgtaatgcgcttgaatcacccagaaaccatccccgctccccccctaccccatacacacaccaactgtcttccatgaaaacagtctctggtgccaaaaaggttggggatcgctgcactagggtatcagatacttatccaggtgcagtggggactagagtcagaaatgcaagagtctgcctggagcatgtgtgtgtttgtgtcctgcatcatctctgcccaccatagtcaaatctgcgattctccgtgcattggccgggggggtggtgcctttctgtgtccaagagtgtctaggggcacatgggtgtgtctgtggatgtggtgtctccatgtggccgtggtaggtgggttgtgtactctgtgtgtgcacgtggctgtgtatagctgtgtgtgcatgtgcagtatgtgcacgtcggtgctgtatcwaagtgcacatgtggctactgatcaacagacatttactgaacgtctactgtgttccatgctctattctaaaccctgggggcgctgggtg

SEQ ID NO: 23942 - DNA, 465 bp, Homo sapiens
gacaatatttattgagctcctactatgttccagatactatttcaaacacgaaggacaaatcagcaagattaatacaagaccaatttatccctaatcctgtcctcagtcttctaggatttgtagattagtgaagggggactggcattaatgaaaaattcccatttttttttaaaaaaaaaggaaattgtaaaattagtgagcttcataaacagaattgctagatttggcaaataaaaatataggacactcaaatacttttaagttttcaataaacaacaaataatgtaagtatgtctgctatggtctgaaagctggtgtccctctcaaattcatatgttggaacttactccccartgtgatagtattaagaggtgaggccttttggaaaataagtaagtcatgagggttccaccctcatgaatgggattagtgcccttatcaaagacgctgaagggaggtgccttg

SEQ ID NO: 23943 - DNA, 804 bp, Homo sapiens
tcatgccagtcggaagacaaacaaaaaccaaggtggattcyaaattggtgaaaagggtcgatcctgactctcaaagggaactaggtatgctgaaacccagcaggagcaggaaggaactatgaagagaatccagaggctcccatcagatgccttctcacatgaccatactgttaatgatggagggtgtccaggttcttggcatcttgaaaaagaattggacaaaacacacaaagcaaggaaggaatgaagggatttattgaaaatgaaagtacactccatggtgtgggagcaagcctgagcataggggctcaaaggccctgttacagagtttttatgagtttaaataccctctacttggggtatgtcctaggtaaatgaagaggatgaagtaaagtcacaaagtcatttatttgctatatgttctatggagaggagatttcctgttttatttatttatttgagatggcagtttgctcttgtcgcccaggctggagtgcaatggctccattttggctcactgcaatctctgcttcccaggttcaagggattctcctgcctcagcctcctgagtagctaggaataaaagcaccaaccacacccagctaattttttgtatttttagtagagatggggttttgccacgttggtcaggctggtctcgaacccctgacctcagattatctgcctgcctcagcttcccaaagtgctgtgattacaggcgtgagccaccccacccagctgaatatttcctgttatagctgaagtgtggatcggccttatgttccctgcctccaaaccctgttt

SEQ ID NO: 23944 - DNA, 804 bp, Homo sapiens
tcatgccagtcggaagacaaacaaaaaccaaggtggattccaaattggtgaaaagggtcgatcctgactctcaaagggaactaggtatgctgaaacccagcaggagcaggaaggaactatgaagagaatccagaggctcccatcagatgccttctcacatgaccatactgttaatgatggagggtgtccaggttcttggcatcttgaaaaagaattggacaaaacacacaaagcaaggaaggaatgaagggatttattgaaaatgaaagtacactccatggtgtgggagcaagcctgagcataggggctcaaaggccctgttacagagtttttatgagtttaaataccctctacttggggtatgtcctaggtaaatgaagaggatgaagtaaagtcacaaagtcatttatttgctatatgttctatggagaggagatttcctgttttatttatttatttgagatggcaktttgctcttgtcgcccaggctggagtgcaatggctccattttggctcactgcaatctctgcttcccaggttcaagggattctcctgcctcagcctcctgagtagctaggaataaaagcaccaaccacacccagctaattttttgtatttttagtagagatggggttttgccacgttggtcaggctggtctcgaacccctgacctcagattatctgcctgcctcagcttcccaaagtgctgtgattacaggcgtgagccaccccacccagctgaatatttcctgttatagctgaagtgtggatcggccttatgttccctgcctccaaaccctgttt

SEQ ID NO: 23945 - DNA, 537 bp, Homo sapiens
tgttcttagaggtgcctccccatccaaacagccacaggtgcacaggacagacggatgggcagagggcagctcctcaccccaccagcygccctaccagctggggtgcatggccatgtccccggcatgcatgctgcacccaaagaccatggcgggtgggagtgagctgcagtcaaggcaggggctccagggcagtcttgggggccctgcgcaaccggctggtcaacattgcccactctctgccccctcgtacctacacgctcccacggaatccttcctcccatgacagaggggcccagctcagtctgaacgaagaggaggacacagtgattaagagccttttcctgttaaaggaatccatttgcatagagcaaaaggtttctcccccaggcctttcccccctcttgcacttaagctgttttttgtttgtttgtttgtttgtttttccttttctccaccttgtcaagagttaacacatagccctgcaaactcaaacccaagcttcaggttgaagccctagaaaggaaaactagatctgag

SEQ ID NO: 23946 - DNA, 549 bp, Homo sapiens
ccgcctcccgggttcacgccattctcctgcctcagcctcccgagtagctgggactacaggcgcctgccaccatgcccagctaatttttcgtatttttagtagagacggggtttcaccatgttagccaggatggtgtcgatttcctgacctcgtgatccrcccgcctcggactcccaaagtgttgggattacaggcgtgagccaccgtgcccggccagatttcttgctttctagcacaaaatgttccaggcttatcttatactttccctgccccaacactgaaatcagccattcctcaagaacccccttgttccttctttttttcaattcaactttttatttggagatcactagatttgcatgcagttgtgagaaatagagatttcacgttacccagttaaccccaatagtaacatcttgtaaaattatagtgcaacatcacaaccaggatattgacatggacacagccaaggcacagaattttccctctctactaggatccctcctgttgcctttttatagccatacccacctttctctctccctctct

SEQ ID NO: 23947 - DNA, 549 bp, Homo sapiens
ccgcctcccgggttcacgccattctcctgcctcagcctcccgagtagctgggactacaggcgcctgccaccatgcccagctaatttttcgtatttttagtagagacggggtttcaccatgttagccaggatggtgtcgatttcctgacctcgtgatccayccgcctcggactcccaaagtgttgggattacaggcgtgagccaccgtgcccggccagatttcttgctttctagcacaaaatgttccaggcttatcttatactttccctgccccaacactgaaatcagccattcctcaagaacccccttgttccttctttttttcaattcaactttttatttggagatcactagatttgcatgcagttgtgagaaatagagatttcacgttacccagttaaccccaatagtaacatcttgtaaaattatagtgcaacatcacaaccaggatattgacatggacacagccaaggcacagaattttccctctctactaggatccctcctgttgcctttttatagccatacccacctttctctctccctctct

SEQ ID NO: 23948 - DNA, 549 bp, Homo sapiens
ccgcctcccgggttcacgccattctcctgcctcagcctcccgagtagctgggactacaggcgcctgccaccatgcccagctaatttttcgtatttttagtagagacggggtttcaccatgttagccaggatggtgtcgatttcctgacctcgtgatccacccgcctcgsactcccaaagtgttgggattacaggcgtgagccaccgtgcccggccagatttcttgctttctagcacaaaatgttccaggcttatcttatactttccctgccccaacactgaaatcagccattcctcaagaacccccttgttccttctttttttcaattcaactttttatttggagatcactagatttgcatgcagttgtgagaaatagagatttcacgttacccagttaaccccaatagtaacatcttgtaaaattatagtgcaacatcacaaccaggatattgacatggacacagccaaggcacagaattttccctctctactaggatccctcctgttgcctttttatagccatacccacctttctctctccctctct

SEQ ID NO: 23949 - DNA, 549 bp, Homo sapiens
ccgcctcccgggttcacgccattctcctgcctcagcctcccgagtagctgggactacaggcgcctgccaccatgcccagctaatttttcgtatttttagtagagacggggtttcaccatgttagccaggatggtgtcgatttcctgacctcgtgatccacccgcctcggmctcccaaagtgttgggattacaggcgtgagccaccgtgcccggccagatttcttgctttctagcacaaaatgttccaggcttatcttatactttccctgccccaacactgaaatcagccattcctcaagaacccccttgttccttctttttttcaattcaactttttatttggagatcactagatttgcatgcagttgtgagaaatagagatttcacgttacccagttaaccccaatagtaacatcttgtaaaattatagtgcaacatcacaaccaggatattgacatggacacagccaaggcacagaattttccctctctactaggatccctcctgttgcctttttatagccatacccacctttctctctccctctct

SEQ ID NO: 23950 - DNA, 750 bp, Homo sapiens
tttgctgctcttataaactcattttgtgtccaagtggcttgctctgtcagataaaaccttggaaaggtaaaaaatccttctcaagtcaaattttcatcttcctttgaaatctctgaacccattaactcgggacattaaccagcactttcatgttacccmcctgagaccacctcttgttcagcatcaaccatcttttttttttttttttttttttttgtgaaagagcatgctttatttggaagcagagtgctgcacagtgaccgacagatgaaggccacccattgggcactcacacatcgtactccaaaatacacacaggatgctttgctaataaaaatcaatgggaacagggattcctctgggcaactcccccaacctcatccctttcaggggttgggaaatctcccaaccatcttcctgatggcagcggtggttcactagagataaagcccctcagggatgccttcgtgtttcttataaagaacactttctatagattttttgaagtcttcatttgttgctttcattctatgttctcttaaggccatcagaccagcttctgtacagattgccttgatgtcagcaccagagaagtcatctttagccatgatcaagtcgtccagggttacatcattggccagtgtcatcctgcttgtgtgaatctgaaagatgtgcttcttagtcttttcatcaggcaggtggaactcgatcttcttgtcaatgcggcctggtctgataagtactggatcc

SEQ ID NO: 23951 - DNA, 612 bp, Homo sapiens
acaccaaaacagcggctgctggaaggaaactgctgtttttgttcagtggctagggaataggaacgagggggtgtcaatatcttcagtgttttctattttcagatcaatggaaataaggctccatttctgaaagattcccattaaaatagatttaaggcaataaaaagaaaaaaatttctttgacctttacaagataatgtagagtggttatgtgcctgacaaaccaagctcaagatctggctttgcctcttactagctgtttgactccaggcaagtttttaatactgkgtcttttttaatgaaaaaatggacagaccatttaaaaaccattaataccattgacagaggtgtagttgagaatatctttgccccatctgaggggcatcactggggaccccattgtctgccagcttctccagtcctaaagcctcatgtttggtggcagtcaagttcccctcaaagctcactgatttgtggagagaagagggtagaggatcagtccccaaataagatctcagccagggccctgcctggtcagctagaacttgtagaagtgaccagagcagctcttctcccatgggaggagaatcccttcaaaaggcagtgagcttc

SEQ ID NO: 23952 - DNA, 612 bp, Homo sapiens
acaccaaaacagcggctgctggaaggaaactgctgtttttgttcagtggctagggaataggaacgagggggtgtcaatatcttcagtgttttctattttcagatcaatggaaataaggctccatttctgaaagattcccattaaaatagatttaaggcaataaaaagaaaaaaatttctttgacctttacaagataatgtagagtggttatgtgcctgacaaaccaagctcaagatctggctttgcctcttactagctgtttgactccaggcaagtttttaatactgtgtcttttttaatgaaaaaatggacagaccatttaaaaaccattaataccattgacagaggtgtagttgagaatatctttgccccatctgaggkgcatcactggggaccccattgtctgccagcttctccagtcctaaagcctcatgtttggtggcagtcaagttcccctcaaagctcactgatttgtggagagaagagggtagaggatcagtccccaaataagatctcagccagggccctgcctggtcagctagaacttgtagaagtgaccagagcagctcttctcccatgggaggagaatcccttcaaaaggcagtgagcttc

SEQ ID NO: 23953 - DNA, 517 bp, Homo sapiens
tggaaaacagaactttattgcttctcacaacaaaactttcagtgccctccgaggagaaaaataaacttacaaaagaaaaaaaaagaaacttaaaaacaatatggcacttctgtggtatcaagcctcaaaggtcttacctcgagattattttggtaaatccatttacatttttttagtctcccygcccctccaatgtcatgtgtaagaacacatagatttttgacatctccattgtgatatttattttaagccatcagtagagttttaaatatcttagaagtgaactctggcctctgtggaaggcaaactaattatttcccaaactgttccataaagccagaacctggcatttattcctggcagcttagaaaggaaacgtgaagatgctggctttctaaggaaggggatgtgcagtcaaacaagagctcagaaacttgggggcccaaagccatcttggctgctatattttgcaaggaagccctggtgtccctggagagcagctgggaccagagtttca

SEQ ID NO: 23954 - DNA, 517 bp, Homo sapiens
tggaaaacagaactttattgcttctcacaacaaaactttcagtgccctccgaggagaaaaataaacttacaaaagaaaaaaaaagaaacttaaaaacaatatggcacttctgtggtatcaagcctcaaaggtcttacctcgagattattttggtaaatccatttacatttttttagtctccctkcccctccaatgtcatgtgtaagaacacatagatttttgacatctccattgtgatatttattttaagccatcagtagagttttaaatatcttagaagtgaactctggcctctgtggaaggcaaactaattatttcccaaactgttccataaagccagaacctggcatttattcctggcagcttagaaaggaaacgtgaagatgctggctttctaaggaaggggatgtgcagtcaaacaagagctcagaaacttgggggcccaaagccatcttggctgctatattttgcaaggaagccctggtgtccctggagagcagctgggaccagagtttca

SEQ ID NO: 23955 - DNA, 503 bp, Homo sapiens
gtactcaggttattgatttattaacactctcatgcggatgggttggactttattgggtgaaataggcagcacaacaatgcagaaagsctgtagaacttggagtcagacagatcttatgcaagccacttagtctctctcagcctcagtttcttcatctgtgagatggggctaatacatacatacctcatagaattgttgtggaagtgaaatgagacatgatatatgtgaaaggatgaatcaagcagactcaacacatgctagttcttgtttttgctgactgcctgctatcgtctcagtatttgtccccctaaagctcatgttgaagtttgatcccaatgttggaggtggcagactcatgggaggggttggggtcatggaggcagatccctcatgaatggcttggtgccatcctcatgtttataagtgagttactgctgtattagttcctgtgagagctgattgttaaaaaggcttgatacctccccctctttctcttgcttccc

SEQ ID NO: 23956 - DNA, 503 bp, Homo sapiens
gtactcaggttattgatttattaacactctcatgcggatgggttggactttattgggtgaaataggcagcacaacaatgcagaaaggctgtagaacttggagtcagacagatcttrtgcaagccacttagtctctctcagcctcagtttcttcatctgtgagatggggctaatacatacatacctcatagaattgttgtggaagtgaaatgagacatgatatatgtgaaaggatgaatcaagcagactcaacacatgctagttcttgtttttgctgactgcctgctatcgtctcagtatttgtccccctaaagctcatgttgaagtttgatcccaatgttggaggtggcagactcatgggaggggttggggtcatggaggcagatccctcatgaatggcttggtgccatcctcatgtttataagtgagttactgctgtattagttcctgtgagagctgattgttaaaaaggcttgatacctccccctctttctcttgcttccc

SEQ ID NO: 23957 - DNA, 503 bp, Homo sapiens
gtactcaggttattgatttattaacactctcatgcggatgggttggactttattgggtgaaataggcagcacaacaatgcagaaaggctgtagaacttggagtcagacagatcttatgcaagccayttagtctctctcagcctcagtttcttcatctgtgagatggggctaatacatacatacctcatagaattgttgtggaagtgaaatgagacatgatatatgtgaaaggatgaatcaagcagactcaacacatgctagttcttgtttttgctgactgcctgctatcgtctcagtatttgtccccctaaagctcatgttgaagtttgatcccaatgttggaggtggcagactcatgggaggggttggggtcatggaggcagatccctcatgaatggcttggtgccatcctcatgtttataagtgagttactgctgtattagttcctgtgagagctgattgttaaaaaggcttgatacctccccctctttctcttgcttccc

SEQ ID NO: 23958 - DNA, 503 bp, Homo sapiens
gtactcaggttattgatttattaacactctcatgcggatgggttggactttattgggtgaaataggcagcacaacaatgcagaaaggctgtagaacttggagtcagacagatcttatgcaagccacttagtctctctcagcctcagtttcttcatctgtgagatggggctaatacatacatacctcatagaattgttgtggaagtgaaatgagacatgatatatgtgaaaggatgaatcaagcagactcaacacatgctagttcttgtttttgctgactgcctgctatcgtctcagtatttgtccccctaaagctcatgttgaagtttgatcccaatgttggaggtggcagactcatgggaggggttggggtcatggaggcagatccctcatgaatggcttggtgccmtcctcatgtttataagtgagttactgctgtattagttcctgtgagagctgattgttaaaaaggcttgatacctccccctctttctcttgcttccc

SEQ ID NO: 23959 - DNA, 624 bp, Homo sapiens
tagaactagttgcaggaacatcacagacaagggaaagtttgaaccacaccatggatgagtgacaagcttggaaaagaagggcacttcacctctgtggtattctttgcaaaaactcatgacctgagtctaatcatgaaaaaagaaaaaaatcagacaaactcaaatggaggctaatacggtttggctctgtgttccaaatctcatcytgtggctcccataattcccacgtgttgtgggagggacctggtgggagatgattgaatcatggggacaggtttttcccgtgctgttctcgtgatagtgaattagtcttatgagatctgatggtttttaaaaatgggaatttcctgcacaagctctttttgcctgctgccatccacatcagatgtgacttgctcctccttgccttccaccatgtttgtgaggcctccacagccacgtggaactgtaagtccaataaacctctttcttttgtaaattgcccagtctcaggtatgtctttatcagcagcatgaaaatggactaatacagagatatatcctgcaaaatccgtccccagtactcctgaaaactgccaagctctgtagagttggagttagaataccttttgttgttgaagatgtg

SEQ ID NO: 23960 - DNA, 624 bp, Homo sapiens
tagaactagttgcaggaacatcacagacaagggaaagtttgaaccacaccatggatgagtgacaagcttggaaaagaagggcacttcacctctgtggtattctttgcaaaaactcatgacctgagtctaatcatgaaaaaagaaaaaaatcagacaaactcaaatggaggctaatacggtttggctctgtgttccaaatctcatcctgtggctcccataattcccacgtgttgtgggagggacctggtgggagatgattgaatcatggggacaggtttttcccgtgctgttctcgtgatagtgaattagtcttatgagatctgatggtttttaaaaatgggaatttcctgcacaagctctttttgcctgctgccatccacatcagatgtgacttgctcctccttgccttccaccatgtttgtgaggcctccacagccacrtggaactgtaagtccaataaacctctttcttttgtaaattgcccagtctcaggtatgtctttatcagcagcatgaaaatggactaatacagagatatatcctgcaaaatccgtccccagtactcctgaaaactgccaagctctgtagagttggagttagaataccttttgttgttgaagatgtg

SEQ ID NO: 23961 - DNA, 586 bp, Homo sapiens
aataatgcaccatcttaaaccataaaggcaaaacatccacgtagctagcccctgtacaacctcctcaattagcatagagggaaactgaggccagtttctcaaagttatacaactgatatgcagcaccttattagccatgcaacgaacattttgaaaatcagaatgatcatcttgctaaaatagaattcctttattttgcttaatttactcatctgctaaaaaataaacatggtgaaaaaaatatagccttgagaatcagacagactcctttttcttgtgtgtattgtataatctttccatgcctcagtttctttacctctgtaagatttttttaaataatagatttggagagataattaagttgacatgactatgtaaagctcagagcacagtgcctctcaaggagttacttctatttcctctccacttttagggagtatttaagaaaatattatttcaaaggctaagaaaaaggattgaagataatayaataagtgactttatttttcactggcaattaaaatattataaatttaggcatctttacaaggaaaaatattaaatttcataatttaatacataaaca

SEQ ID NO: 23962 - DNA, 581 bp, Homo sapiens
aaaaaagaaagaaaagaaagttttgtcctactattcatgttaaagccaccagaagctgttggtggcttagaccattttaaaaatctaagtttattattggccaaaacatgtyacatgcttcaaattataaatgttactattatgatatatttcagtgaatccgaatacatttataaaccaaattactgaattaaacattaggattaaaatgagatccaacaaatatttcaccataatatgataccttaagttgttatatgtgatgattgactgcagataactttatccagatttcatagaattgttaaaggtcatgctgttagcaatagctcacctctacaaatggctaatgaaaattttctatttcaataggtgaaacactatattggaaaaatgcctaacttgagggataataatttctatatattattaactttgaatttgttcttgtcacttaaaaaaaacatgtgcatgacttaaaaattcaaccagtacaaaaaggtacacaatgagaaataggcttatctactgcccagacttcccagtctccttctcaggtcataacagtttcttgagtacca

SEQ ID NO: 23963 - DNA, 581 bp, Homo sapiens
aaaaaagaaagaaaagaaagttttgtcctactattcatgttaaagccaccagaagctgttggtggcttagaccattttaaaaatctaagtttattattggccaaaacatgtcacatgcttcaaattataaatgttactattatgatatatttcagtgaatcygaatacatttataaaccaaattactgaattaaacattaggattaaaatgagatccaacaaatatttcaccataatatgataccttaagttgttatatgtgatgattgactgcagataactttatccagatttcatagaattgttaaaggtcatgctgttagcaatagctcacctctacaaatggctaatgaaaattttctatttcaataggtgaaacactatattggaaaaatgcctaacttgagggataataatttctatatattattaactttgaatttgttcttgtcacttaaaaaaaacatgtgcatgacttaaaaattcaaccagtacaaaaaggtacacaatgagaaataggcttatctactgcccagacttcccagtctccttctcaggtcataacagtttcttgagtacca

SEQ ID NO: 23964 - DNA, 610 bp, Homo sapiens
tcatttgagtgtctgtgcctattaagttctgtatattgaaaaattctagataatctagaccagttaaagcccccactgaaacactgtgtggagccagacctcatttccttattttccttctagaacaaacaaatgaagcaggtgcaatgatgtccgttccccttctttcatcccaccctgagtcaatggcagcagcaaacccaaagttactgcaccttcattcctgtgataccgattttaatctcactacatttaatttcactacatttctgagacaaagtaacatacatactagcaaaagctgcagactacaagttagcagcctgtagtttaagcytcaattctgacagtaactgtctggctctagtgaaaccatttagtcatttgtttcacattttctcatctgtaaaatgtaatgtgggtcaactctgaatttctctgagagttctaaaagtctacgattcaccaaccacaacttgacaaccagtaatatccaccatgatgcatgagactcaagctaataaaccaattagttaagcaatccccatggcaaaatcagatccagttttggatcacttttttaaaataattccaagaaaccccagtctcc

SEQ ID NO: 23965 - DNA, 614 bp, Homo sapiens
cattttataagtatagaattctcgattaaatcctcaatttattttaaaattggttttaaaggatattgttgcgacaactagggaagtatagagataatatattttattgtacgaatgtttaatatctttggtgtgataatggcattgtgtttatgtaggaggcttcttagtttttggaggtacattctgaaagagttaacgtgaagtttgtgtatatgtttttagagaaggaaagagaggtagaaaaatgtggcaatgctgaatatagattaagggttttagaagtattctttgtactgatcttccaacatttttgtagttygagttttgtgttttttgttttttgtttttttttttttgagacggtgtctccctctgttgcccaggctggagtgcaatggcgcgatctagactcactgcaacctccgcctcctgggttcaagcgattctcctgcctcagcctcctgagtagctaggattacaggcgcctgccaccatgcccagctaattttttgtatttttaggagaggtgaggtttcactatgttggcgaggccaatctcgaactcctgaccttgtgatccgcccacctcagcctcccaaagtgctgggatt

SEQ ID NO: 23966 - DNA, 471 bp, Homo sapiens
actaaaaatacaaaaaattagctgggtgtggtggcaggcgcctgtaatcccaggtactcgggaggctgaggcaggagaatctcgtgtacctgggaggcggagattgcagtgagcagagattgtgtcactggactccatcctgggcaacagagtgagacttcgtctcaaaaaaaaaaaaaaaaagattccttcctttccctctctatgcacatcactscattccttcctttctaattccactttatgaatagatcttgagtttttccttttcgtacgtggtggctgcctcatttcttcattaggtgattgcaagtttcctaatttaccactttggtcttgctcttctctaatctatatcctccaaaataaagtcagagtttttagaaatttttctaaaagttaacttttttgattctgtaacatatgcataaggctctaaattgaaatttacaaagggtaaacagagaaaag

SEQ ID NO: 23967 - DNA, 591 bp, Homo sapiens
cagggcagttccaatttaactctgctgtctggggtctctgccagactggtgtgcggtggtacaatcatagctcactgtagcctggaattcctgggctcaagcaatccttctgcttcagccttccaagtacaggagaatacaggtgtgcaccaccatgcccagccttttatttttattttattttattttattttatgttatgttgagacagagtccctctctgttttccaggctggagtgtagtgacacaatctcggctcactgcaacctctgcctcctgggtktaagcgattctcctgccttagcctcccgagtagctgagattacaggcacccaccatcatgcccggctaagttttgtatttttagtagagacagggtttcaccatgttggccaggctggtcttgaactcctgacctctggtgatctgcccacttcggcctccctaagtgctgggattacaggcgtgagccactgcgcccagcctattttttaagtagagatgaggtcttggtatgttgccccaggctgatctcaaactcctggactcaagtgaccttcccacctccacctcccaaagtgctgggagtg

SEQ ID NO: 23968 - DNA, 1175 bp, Homo sapiens
cagaaattaccacttctcaaattaagaaagctttattctgttctctctttattaagcatttagtttttgtgcctgtcttcatttttaaatgaataatgggtattgaatagatrtatctcataaatgtaatgtagagaggacaaaaacaagttacggaaggatatagaccatgtggtaacactcctgtaaagttttcagatgtgcaaaacaaaccagcataggtcaggcatggcagctcatgcctgtaatcccaacactttgggaggctgaggtgggtggatcacctgaggtcaggagttcaagatcagcctgaccaatatggtgaaaccccgtctctactaaaaatacaaaaattagccaggtgtgggggagtgtgcctgtggtcccagctattcaggaggctgagacagaagaattgcttgaacctgggaggcagacgttgcaatgagccgagatcgtaccactgcactccagcctgggtaacagagtgagacttcttctcaaaaaaaaaaaaatccaaaatattgtccttgggtacatgcataattattttaaataggataaacaccaagtttgggagggcagttaccttggggaggggaataggagcagggtggggtacaagggacctccactctatttgttatgatttgttacgtaatgatgctttacttttaaggtgatctgaaatacatgaagatgtcaaaacttgaaaaagccgagtgaaaggcatagcgtttatatttgtttctacaaacctctttgcatgcgtcgtaataaaaaagcaaagccaaaattcagagcgacaaccaatgtgccacatgccctttgcagtgggctggcttccctggttacagcaaccctctcatctctgcagagaatggaaaccagagtggtcatggccttggagctgaatcttgtgactttcaccttcttcccacatttgtccaaacctcttgtccctgctcttcaggtccttgtgtgatgtgacccagctgacaccctagccccagatgactgcccctgaattagtctcagcttctccaacctgttcccttatcctctattcttgcatgtgctgataccgtattgagaacgttctttaatgttatttatctcctctggaataattctgactccctcctcaagcatcacctcctccaggaagccctctc

SEQ ID NO: 23969 - DNA, 1175 bp, Homo sapiens
cagaaattaccacttctcaaattaagaaagctttattctgttctctctttattaagcatttagtttttgtgcctgtcttcatttttaaatgaataatgggtattgaatagatatatctcataaatgtaatgtagagaggacaaaaacaagttacggaaggatatagaccatgtggtaacactcctgtaaagttttcagatgtgcaaaacaaaccagcataggtcaggcatgrcagctcatgcctgtaatcccaacactttgggaggctgaggtgggtggatcacctgaggtcaggagttcaagatcagcctgaccaatatggtgaaaccccgtctctactaaaaatacaaaaattagccaggtgtgggggagtgtgcctgtggtcccagctattcaggaggctgagacagaagaattgcttgaacctgggaggcagacgttgcaatgagccgagatcgtaccactgcactccagcctgggtaacagagtgagacttcttctcaaaaaaaaaaaaatccaaaatattgtccttgggtacatgcataattattttaaataggataaacaccaagtttgggagggcagttaccttggggaggggaataggagcagggtggggtacaagggacctccactctatttgttatgatttgttacgtaatgatgctttacttttaaggtgatctgaaatacatgaagatgtcaaaacttgaaaaagccgagtgaaaggcatagcgtttatatttgtttctacaaacctctttgcatgcgtcgtaataaaaaagcaaagccaaaattcagagcgacaaccaatgtgccacatgccctttgcagtgggctggcttccctggttacagcaaccctctcatctctgcagagaatggaaaccagagtggtcatggccttggagctgaatcttgtgactttcaccttcttcccacatttgtccaaacctcttgtccctgctcttcaggtccttgtgtgatgtgacccagctgacaccctagccccagatgactgcccctgaattagtctcagcttctccaacctgttcccttatcctctattcttgcatgtgctgataccgtattgagaacgttctttaatgttatttatctcctctggaataattctgactccctcctcaagcatcacctcctccaggaagccctctc

SEQ ID NO: 23970 - DNA, 1175 bp, Homo sapiens
cagaaattaccacttctcaaattaagaaagctttattctgttctctctttattaagcatttagtttttgtgcctgtcttcatttttaaatgaataatgggtattgaatagatatatctcataaatgtaatgtagagaggacaaaaacaagttacggaaggatatagaccatgtggtaacactcctgtaaagttttcagatgtgcaaaacaaaccagcataggtcaggcatggcrgctcatgcctgtaatcccaacactttgggaggctgaggtgggtggatcacctgaggtcaggagttcaagatcagcctgaccaatatggtgaaaccccgtctctactaaaaatacaaaaattagccaggtgtgggggagtgtgcctgtggtcccagctattcaggaggctgagacagaagaattgcttgaacctgggaggcagacgttgcaatgagccgagatcgtaccactgcactccagcctgggtaacagagtgagacttcttctcaaaaaaaaaaaaatccaaaatattgtccttgggtacatgcataattattttaaataggataaacaccaagtttgggagggcagttaccttggggaggggaataggagcagggtggggtacaagggacctccactctatttgttatgatttgttacgtaatgatgctttacttttaaggtgatctgaaatacatgaagatgtcaaaacttgaaaaagccgagtgaaaggcatagcgtttatatttgtttctacaaacctctttgcatgcgtcgtaataaaaaagcaaagccaaaattcagagcgacaaccaatgtgccacatgccctttgcagtgggctggcttccctggttacagcaaccctctcatctctgcagagaatggaaaccagagtggtcatggccttggagctgaatcttgtgactttcaccttcttcccacatttgtccaaacctcttgtccctgctcttcaggtccttgtgtgatgtgacccagctgacaccctagccccagatgactgcccctgaattagtctcagcttctccaacctgttcccttatcctctattcttgcatgtgctgataccgtattgagaacgttctttaatgttatttatctcctctggaataattctgactccctcctcaagcatcacctcctccaggaagccctctc

SEQ ID NO: 23971 - DNA, 1175 bp, Homo sapiens
cagaaattaccacttctcaaattaagaaagctttattctgttctctctttattaagcatttagtttttgtgcctgtcttcatttttaaatgaataatgggtattgaatagatatatctcataaatgtaatgtagagaggacaaaaacaagttacggaaggatatagaccatgtggtaacactcctgtaaagttttcagatgtgcaaaacaaaccagcataggtcaggcatggcagctcatgcctgtaatcccaacactttgggaggctgaggtgggtggatcacctgaggtcaggagttcaagatcagcctgaccaatatggtgaaaccccgtctctactaaaaatacaaaaattagccaggtgtgggggagtgtgcctgtggtcccagctattcaggaggctgagacagaagaattgcttgaacctgggaggcagasgttgcaatgagccgagatcgtaccactgcactccagcctgggtaacagagtgagacttcttctcaaaaaaaaaaaaatccaaaatattgtccttgggtacatgcataattattttaaataggataaacaccaagtttgggagggcagttaccttggggaggggaataggagcagggtggggtacaagggacctccactctatttgttatgatttgttacgtaatgatgctttacttttaaggtgatctgaaatacatgaagatgtcaaaacttgaaaaagccgagtgaaaggcatagcgtttatatttgtttctacaaacctctttgcatgcgtcgtaataaaaaagcaaagccaaaattcagagcgacaaccaatgtgccacatgccctttgcagtgggctggcttccctggttacagcaaccctctcatctctgcagagaatggaaaccagagtggtcatggccttggagctgaatcttgtgactttcaccttcttcccacatttgtccaaacctcttgtccctgctcttcaggtccttgtgtgatgtgacccagctgacaccctagccccagatgactgcccctgaattagtctcagcttctccaacctgttcccttatcctctattcttgcatgtgctgataccgtattgagaacgttctttaatgttatttatctcctctggaataattctgactccctcctcaagcatcacctcctccaggaagccctctc

SEQ ID NO: 23972 - DNA, 1175 bp, Homo sapiens
cagaaattaccacttctcaaattaagaaagctttattctgttctctctttattaagcatttagtttttgtgcctgtcttcatttttaaatgaataatgggtattgaatagatatatctcataaatgtaatgtagagaggacaaaaacaagttacggaaggatatagaccatgtggtaacactcctgtaaagttttcagatgtgcaaaacaaaccagcataggtcaggcatggcagctcatgcctgtaatcccaacactttgggaggctgaggtgggtggatcacctgaggtcaggagttcaagatcagcctgaccaatatggtgaaaccccgtctctactaaaaatacaaaaattagccaggtgtgggggagtgtgcctgtggtcccagctattcaggaggctgagacagaagaattgcttgaacctgggaggcagacgttgcaatgagccgagatcgtaccactgcactccagcctgggtaacagagtgagacttcttctcaaaaaaaaaaaaatccaaaatattgtccttgggtacatgcataattattttaaataggataaacaccaagtttgggagggcagttaccttggggaggggaataggagcagggtggggtacaagggacctccactctatttgttatgatttgttacgtaatgatgctttacttttaaggtgatctgaaatacatgaagatgtcaaaacttgaaaaagccgagtgaaaggcatagcgtttatatttgtttctacaaacctctttgcatgcktcgtaataaaaaagcaaagccaaaattcagagcgacaaccaatgtgccacatgccctttgcagtgggctggcttccctggttacagcaaccctctcatctctgcagagaatggaaaccagagtggtcatggccttggagctgaatcttgtgactttcaccttcttcccacatttgtccaaacctcttgtccctgctcttcaggtccttgtgtgatgtgacccagctgacaccctagccccagatgactgcccctgaattagtctcagcttctccaacctgttcccttatcctctattcttgcatgtgctgataccgtattgagaacgttctttaatgttatttatctcctctggaataattctgactccctcctcaagcatcacctcctccaggaagccctctc

SEQ ID NO: 23973 - DNA, 523 bp, Homo sapiens
ataacacatcacagctttaaatcattatcagggtaaatttttgtttaccctatgaggacagggacatatctgtctctttctccccagctacagccctgtgcttctgcatagctggctctcaaacattgttgaatgaatgaatgctccctacccctatttgtctttttggcmtgccttatttgtaccaggcactattttaagtgttttgcatatattaatataattcttataaccaattttattatgtagggatcattattttacagataagaaaatgggcatagaaaggttcagtaattttcacatacaacagttagtaacagatatcatttattgagtacttaatttgtgccaggcagggctgccattagctacccaaagtgactatgtgtaaatttgaaaaagatgccccttttacatggataaattacaaaaggagtctcttccctaggcacagggcttatcagtgaaagccagttcctacctgtactggcccctcaaccatgagcatttttggagggca

SEQ ID NO: 23974 - DNA, 589 bp, Homo sapiens
tggtacttgtttttcattataaattgctattagtttagcttcattattaatttaggttatttgttaaatagccaataatgggcagtggtacacattttcatcaagaatatttctatgttttcaaagaattaaactcaaaattatatatatatatatayacacacatacacacatacacatacataaacatatttctgttttcaaacagacttaaaagcatatatatattcatgcatatacatgagttcatacatatattcatacattcatacatacatgtatgcatacatatgtatatgcaaattgaattaccaatacttaaacctttgcatatacacttttccaaatttgctagtattaatattactattttttattaacattttttttaatgggtgagttaggtgggcagctaatcatttgccctcactgagcagactatcatttttataagtttaagttccatagctcaggaagaaaagttctttgctaagcacactattgtagaccacatcaagatgcataaattgaatataaaattttcaaagagaagtagagaaaacaatttatttcttgacttcccttagaa

SEQ ID NO: 23975 - DNA, 589 bp, Homo sapiens
tggtacttgtttttcattataaattgctattagtttagcttcattattaatttaggttatttgttaaatagccaataatgggcagtggtacacattttcatcaagaatatttctatgttttcaaagaattaaactcaaaattatatatatatatatacacacacayacacacatacacatacataaacatatttctgttttcaaacagacttaaaagcatatatatattcatgcatatacatgagttcatacatatattcatacattcatacatacatgtatgcatacatatgtatatgcaaattgaattaccaatacttaaacctttgcatatacacttttccaaatttgctagtattaatattactattttttattaacattttttttaatgggtgagttaggtgggcagctaatcatttgccctcactgagcagactatcatttttataagtttaagttccatagctcaggaagaaaagttctttgctaagcacactattgtagaccacatcaagatgcataaattgaatataaaattttcaaagagaagtagagaaaacaatttatttcttgacttcccttagaa

SEQ ID NO: 23976 - DNA, 566 bp, Homo sapiens
ttttttatttgcatataaatatgaaagtacaaaaatatgaaggtgaacactgcttgtgtgtgtgcactaatacttatgtaaaataaattcagaaaacaaaacaactatttactaaaaactccatctcattactaaaaccattataacaaaagtcagggtaacaaaagaatttgagttggaatttatcattacactggaactgctagtccttaatgtcatgtgaaatgctgtagatccataatgagccaattggaaaatatgttgacttctaaaatttgctttcttaaaggagtttaaaacctagaacattcatcttctgagggtttttcttaggaatatattatatgacttgaaggcaacttaaaacttcatatattggccaggtgtggtggctcacrcctataatgccaacactttgggaggcctaggtgggcagattgcctgagctcaggagtttgagagcagcctgggtaacatggcaaaactccgtctctgcaaaaaaaatacaaaaattagccaggcatggtggcacacatgtgtggtcccagctacctggggggctgaag

SEQ ID NO: 23977 - DNA, 749 bp, Homo sapiens
cttgtcacctgcacaccccacattgcccccacctcagttcactgctgcttcctctcactgctcactttggcctctcacctgggtcccaaaattctgaagtgcagatgaagtttattagagccctttggtgcccaagtggcaactcttggcatctctgcgtactttrtcttgcctcccaaggaccgggtgtaaacgaggaggaagcagaagatccttttacctatttatttcccattgctgctcacagcaaaacaacctttggaaatgcttggctgtttgctttaggagtggtggtgaagaggaaacaggagactaattctgtttaccagggccaagaggaaggggaaagtatgctcagacctgggaggggagaaatgtaggcctttggcagccaaattcttccacccacactctggagctctcacctgatccctcaccccaacatgagtcctcacattttggcgctaaccattcctaatgccttgccctatgcccaggctctaacccacttaattctcacaaccatcctgcaaagcaggcatcatattcccctttctacaggtgaagaaactgatgttctctaggagaggccgtggtagaacacactctggattaagtagaactgaagggaacataaggtttctacaattcgaataataaacttacacaaataaaacctttctactccaacacataaatgattttaaaagatgagggaggcaaggcatggtggctcacgcctgtaatcc

SEQ ID NO: 23978 - DNA, 754 bp, Homo sapiens
caggttcttcctttatatcaatcattaatttttatcagtttgcccatttaatgtatatttagaaggagttttggcaaatggcataaggtaaggaattaaaatttttttctagttagtttgccttctcaaaattgaaaaaaattacaaccttatcttctatactctcattctgttttcttatttttattttttaaattaatttttaatttttgtggaaacatactaggtgtatgtatttatgggttacatgagacattctgatacaggcatgtaatgtgtaataatcacattagggtaaatggggtatctrtcacctccaacgtttctcctttgtgttacacacaatccaattataatcttttagttatttttaagtgtacaattaaattatttttgactgtagtcaccctattgtgctacaaaatacttatttattttttctaactgcttttcatacccattaaccatcctcagttccctccaatccccgactacccttcccagcctatggtaaacatccttctagtctcttatctccatgagttcaattattttaatttttagctcccacaaataactgagaacatgtgaagacttcctttctgtgcctggcttatttcacttaacataatgacctccaattccatccatgctgttgcaaatggtgggatctcattcttttttatagctgaatagtactccattgtgtatatgtacctcattttatctatccatctgttgatagacacttagg

SEQ ID NO: 23979 - DNA, 562 bp, Homo sapiens
ctgaaagattgtggggtccaaggtcggagtttaaataggtttaccagctacatatgccctaccttcctcctggactttaagatagaaaactaaattcagttaagtcctattgtgggctaggcacagtggctcatgactgtaaccccagtcatgggaggctaaagtagagtgggaggattgcttgaacccaagagttccagatcagcctgggtgacatagtgaagaccctrtctctcaaaaaataaaaaagaattagccaggcatggtggtgcatgcctatagttccagttgcttgggaggcttggatgggaagattgcttgagtccaagaggtcaaggctgcagtgagctatgatcatgctactattgcactccagcctgggcaacagagcaagatcccatctctaaaaaaaaaagacctattgcgtgactcaagattgtcccaagggtatgatgactgaagtggagcttggtggttatggaaggtatgatgatgctgctattacaatttttcctggtggaaattgtataaatagaaattggttgcttatggccagagcaca

SEQ ID NO: 23980 - DNA, 1755 bp, Homo sapiens
ggatagcattaggagatatacctaatgtcaaatgacgagttaatgggtgcagcacaccaacatggcacatgtatacacatgtaacaaacctgcacattgtgcacatgtaccctaaaacttaaagtataataaaaaaaaaagaatcagaatttaatcattctttagttcatgtagtgcttaaaagagagtccaaggaacacagaattactatagtgtcaggttatatccccaaagaggaactagttttgacaaaaagaaaaaaaaagttatttgacaacatccacatattccaagccccaggaaaataatgacttgaaaaattactctctctatgcccaaagtcactcctgactccagagccttttgggcaagcgatcaggtcctatggtaggcagaaggggcatattatatctgttttaattatattctgaataaatctcactactcaggaccactgggcatagattcaatttacagaccatctacgattttcctaaatggcagaataggaagggggactggtttcagatgaatagactgagagtaacgaaaactcaagatgcatcacagacgctctgactaggagcctgacctcactctaagcccatcccatgaaaggtgcacaactctctcaaccagagctccttgattgttatgggaaacccaactgaccaatggcttgtgtggtcaaaccctaaacatgaaagttctaggcatggtgttctgaggacagctaggtaagaaccagtctggcctcagtaatctaagagttcatttgggtgtgagtgggatccactccctggatgcccttttgtctctttaggggtggggaggatatacaacaacttcattaccgtgattattaaaacttggaaaagtggaagataaatatgtctgtctatgtcttgtcataacaatttagcaattacaatatgtattctgaaattaaacatgcatttagaaacatttagaagtcttcagggggttgagcttctccctccaacactgcatcacttgggatgacatctctctaattctataatattcagccagcctggtaaatgtggtaaatattgtgaaaggatcaactgttagtccaacttggactaacagagctctgcaattacagaaagagaaatagttgaagaggcttgggttggcacagaagagaattaagcaaagacaataataactaaagagataataactaaaaagaaaagagcacataatccaattctcacacattcagcaagtacatycttttctgatgaggcatcacaattggctccagggccctggtcacctaacatcatagactgatcacctagtcacttgcattctccttacattacaagaaatgcccaatgttccttctcccaggaacattaactgaaatctctaacaactggtccagcacagagagtggtcagtaaagcacaaagatcgataaggtacaggcatggaccagtccaatcagctgccttctctcacatacctggggactacactggcaccccttgtactgcctcacacagttcaagcacactcactttttaaaagatatgtttcacttcactaaaaaaggaaatatcaaaaagaaataaaataggaaacagcaaaaccatcttgcaatttgagagggaaataatgtctggtaagttttcaaacgttctgcatgcccctctggcatattcagctttggggggacccggcttggtgactgaggcagtagggatctggagagcacggaggatc

SEQ ID NO: 23981 - DNA, 575 bp, Homo sapiens
ttggtaagggattgtcaatttcatttcccaatattcctttcaacaaaaatattattgaaggaaataaaagagaaatactctaaccagacaagcagaaagcaaagaaggcaaatctctagccccatcaatgtattttcttggcttaatraaaactctagctaaaaaaataataaaaacaaaaaccaaccaaaccacaaacccaccaacaaaaccccaacaaataaacacattcttcaactctcaaaatggaattcttctttcttccaaaagaattcattttctgtacaactctgaagaaatactagtatcaacgttaataggcaactgttgactatccatttatcttggaagataaaacttttctaactttaaaaaaagagggatcattagaagggaaaataaaagcccatttccatttttttccacacagaatgttgtttaaattttaaaatgcctgttcaatatgttatgaggacaaatcaaggtataaaaataagcataggctacaggtataagcacaactatttttaaaaattatatatgcatgtgtatgtcatatgtcacccaaactgtaa

SEQ ID NO: 23982 - DNA, 1237 bp, Homo sapiens
taattgtaaggtagagagatggataggtgaacagtcagataagcaaagaaagcactgaggcttcccaaggggcctggccaggaggaaatatggagcaactggcttcaggatttcttggtttattcacaaagttatctccctttgcaagtgtttgtagcacagtgaacacccatacatccttcactaagattaacctcttttttagcattttgcctcgtttttttctgaaccatttgagaatttgttgcaaacatcagaatgttaaatatttcagtatgtaccttctaagaacaaggacaatgtcttatatagccacaattcagttatcagtctcaggaaatttaacatggatataatactgttatccaatagatagtctgtgttcatatgtccccagttgtagcaattatgtcctttatgttttgtttttttttttttaaaacccaggaccataaattgcatttgactgtctggtatctttatacttccttaatctaaaatgattcccaagtctttttttcccgcatgacattgacatttgtgaaaactctgggctcttttgctagctgtttcccagactacccttcagtttagatctgtctgattatttccacatgattagatgtagggaaacatccttggaatatcatattcatggcactatgtcctcacatcaggaagcgcccaatatcagtttgttccaaggagccattcatgcatgaatgcctttgtatggcgcctgaaggtgtttatccctgggacaggccccacaatagaatggctagataggtgagaagcacaccgtctctcagtaaggataaagagggattggaaaaggggacatgggcaaggagaaccasagcaggagcatccgcaggcagaccagacattttaggacatggcacatgtggaaattgaggaaatggacatggattccctttcaaccacccataggcactgcagaaagtcttcctgtgcccccagagggccaggtgcctcagtctgaagacactgctctaagccatagtggacacaaagataaccctcatgggctctggggtctgctgacatttgcatgtttagttgtcaggcattttgaggaacacggaagagctcacacagcctcccaagacgggcctgtggcttctgcccacaacccaccatgccaggggctccaggccctgcacagaggtctctcctctgtagaacatgctagactaagtagggaccagtgtct

SEQ ID NO: 23983 - DNA, 510 bp, Homo sapiens
ttttttccagtaaagttgttgggcagctcattactactgcctatatgtttcattcggtttttacagtatacttatcaagagaatcatttcttgcacaaacattcatggactttaaaatttttcacaagggtatctcttaatactttgagatcacaagtattctctctgaagtgcttttgcattcatttgcrtggtgttccagttactttggctacataataaaccatcccaaaacttagtggcttgaaaaaacaacagttatctttttagctcacaaatctgccatttaggcaggggctggtggagaagtgtagtctctactccacatggggatgcttgataggactagagggcccacttgcagaattgctcacttgcatggtgggcaagtaggtgttgactctcagttgggagcccagtaggagctgagaagggagggtgcccttgtttctctctagcttaagcctctccctgtggacctctccacaggctggacatccttccccttgt

SEQ ID NO: 23984 - DNA, 811 bp, Homo sapiens
ctggccaacatagtgaaaccccgtctctactaaaaatacaaaaattagctgggtgtggttggacacacctgtagtcccagctactcgggaggctgaggcaggagaatcacttgaacccaggaggcggggttgcagtgagccaagattgcaccactgcagggaggcggaggttgcagtgagccaagatcatgccactgcattccagcctgggtgacagagcaagactccgtctccaaaaaaaaaaaaaaaaaaaaaaaaagtgtatcaggttttcttgracatcactttgaacaggctagtaactactcagccgttttcatgtaatttttggtgagtcctgttcctgtaagacctaataaggagtgtgcttggctgtcagaggacaaagcctgtggcttacaggatttatgagagactgagtcacaaaggaagcacagcggcactggaaaaagtctggggtcttaggctgggtgcggtggctcaggcctgtaatcccaacactttggaaggccgaggcaggcgaatcacttgaggccaggagtttgagaccagcttggccaacgtggagaaaccctatctctactaaaaatacaaaaatagccaggcatggtggcaggcacctgtaattccagctactcgaggggctgaggcaggagaatcacttgaacctaggaggcggaggttgcagtgaactgacatcacaccactgcactccaacctgggcgacagagtgagatctgtctcattaaaaaaaaaaaaaaaaagaaaaaaaaagtatggagtcttttgtcccagtaaagtaatgcaggtg

SEQ ID NO: 23985 - DNA, 811 bp, Homo sapiens
ctggccaacatagtgaaaccccgtctctactaaaaatacaaaaattagctgggtgtggttggacacacctgtagtcccagctactcgggaggctgaggcaggagaatcacttgaacccaggaggcggggttgcagtgagccaagattgcaccactgcagggaggcggaggttgcagtgagccaagatcatgccactgcattccagcctgggtgacagagcaagactccgtctccaaaaaaaaaaaaaaaaaaaaaaaaagtgtatcaggttttcttggacatcactttgaacaggctagtaactactcagccgttttcatgtaatttttggtgagtcctgttcctgtaagacctaataaggagtgtgcttggctgtcagaggacaaagcctgtggcttacaggatttatgagagactgagtcacaaaggaagcacagcggcactggaaaaagtctggggtcttaggctgggtgcggtggctcaggcctgtaatcccaacactttggaaggccgaggcaggcgaatcacttgaggccaggagtttgagaccagcttggccaacgtggagaaaccctatctctactaaaaatacaaaaatagccaggcatggtggcaggcacctgtaattccagctactcgrggggctgaggcaggagaatcacttgaacctaggaggcggaggttgcagtgaactgacatcacaccactgcactccaacctgggcgacagagtgagatctgtctcattaaaaaaaaaaaaaaaaagaaaaaaaaagtatggagtcttttgtcccagtaaagtaatgcaggtg

SEQ ID NO: 23986 - DNA, 811 bp, Homo sapiens
ctggccaacatagtgaaaccccgtctctactaaaaatacaaaaattagctgggtgtggttggacacacctgtagtcccagctactcgggaggctgaggcaggagaatcacttgaacccaggaggcggggttgcagtgagccaagattgcaccactgcagggaggcggaggttgcagtgagccaagatcatgccactgcattccagcctgggtgacagagcaagactccgtctccaaaaaaaaaaaaaaaaaaaaaaaaagtgtatcaggttttcttggacatcactttgaacaggctagtaactactcagccgttttcatgtaatttttggtgagtcctgttcctgtaagacctaataaggagtgtgcttggctgtcagaggacaaagcctgtggcttacaggatttatgagagactgagtcacaaaggaagcacagcggcactggaaaaagtctggggtcttaggctgggtgcggtggctcaggcctgtaatcccaacactttggaaggccgaggcaggcgaatcacttgaggccaggagtttgagaccagcttggccaacgtggagaaaccctatctctactaaaaatacaaaaatagccaggcatggtggcaggcacctgtaattccagctactcgaggggctgaggcaggagaatcacttgaacctrggaggcggaggttgcagtgaactgacatcacaccactgcactccaacctgggcgacagagtgagatctgtctcattaaaaaaaaaaaaaaaaagaaaaaaaaagtatggagtcttttgtcccagtaaagtaatgcaggtg

SEQ ID NO: 23987 - DNA, 811 bp, Homo sapiens
ctggccaacatagtgaaaccccgtctctactaaaaatacaaaaattagctgggtgtggttggacacacctgtagtcccagctactcgggaggctgaggcaggagaatcacttgaacccaggaggcggggttgcagtgagccaagattgcaccactgcagggaggcggaggttgcagtgagccaagatcatgccactgcattccagcctgggtgacagagcaagactccgtctccaaaaaaaaaaaaaaaaaaaaaaaaagtgtatcaggttttcttggacatcactttgaacaggctagtaactactcagccgttttcatgtaatttttggtgagtcctgttcctgtaagacctaataaggagtgtgcttggctgtcagaggacaaagcctgtggcttacaggatttatgagagactgagtcacaaaggaagcacagcggcactggaaaaagtctggggtcttaggctgggtgcggtggctcaggcctgtaatcccaacactttggaaggccgaggcaggcgaatcacttgaggccaggagtttgagaccagcttggccaacgtggagaaaccctatctctactaaaaatacaaaaatagccaggcatggtggcaggcacctgtaattccagctactcgaggggctgaggcaggagaatcacttgaacctaggaggcggaggttgcagtgaactgacatcacrccactgcactccaacctgggcgacagagtgagatctgtctcattaaaaaaaaaaaaaaaaagaaaaaaaaagtatggagtcttttgtcccagtaaagtaatgcaggtg

SEQ ID NO: 23988 - DNA, 811 bp, Homo sapiens
ctggccaacatagtgaaaccccgtctctactaaaaatacaaaaattagctgggtgtggttggacacacctgtagtcccagctactcgggaggctgaggcaggagaatcacttgaacccaggaggcggggttgcagtgagccaagattgcaccactgcagggaggcggaggttgcagtgagccaagatcatgccactgcattccagcctgggtgacagagcaagactccgtctccaaaaaaaaaaaaaaaaaaaaaaaaagtgtatcaggttttcttggacatcactttgaacaggctagtaactactcagccgttttcatgtaatttttggtgagtcctgttcctgtaagacctaataaggagtgtgcttggctgtcagaggacaaagcctgtggcttacaggatttatgagagactgagtcacaaaggaagcacagcggcactggaaaaagtctggggtcttaggctgggtgcggtggctcaggcctgtaatcccaacactttggaaggccgaggcaggcgaatcacttgaggccaggagtttgagaccagcttggccaacgtggagaaaccctatctctactaaaaatacaaaaatagccaggcatggtggcaggcacctgtaattccagctactcgaggggctgaggcaggagaatcacttgaacctaggaggcggaggttgcagtgaactgacatcacaccactgcactccaacctgggcgacagagtgagatctgtctcattaaaaaaaaaaaaaraaagaaaaaaaaagtatggagtcttttgtcccagtaaagtaatgcaggtg

SEQ ID NO: 23989 - DNA, 1930 bp, Homo sapiens
tctacttagaaagatttctacaatatgtgggattgactcttatgttcattgaggttaaaaaattgctaattagccagggtgtttaataataataaaacacctagacctgatgattcaagtgctaaacctaactttatattatgtcaatttaacaaataataaataattatttttttacttaaaggatgaggtggggtggaagaagcagattttttttaatagtctactatgagttatgtattttacaaacagtatcttccttccactacataacaagttctgttcttatccctttcttacttaggaagaggacatagagactcaaagaaattaataactagcctgatgtcacacagctagtagtcagcagagctgaaatttggtatttgcttggctgcaaaatccaggctcttttcaaaactccaagctgtttctttcttacccaagttgggctgatattgcccaaatgaagaagagtaagccaaaaacctaaaaccaaggaaaggcaggggggaatgtccctgtgtgttccacgtttactttattctttcctggcagctcaaataaccacagaatccctggtgatcctaagcatttgacgatgactgtgagaagcacttgcattgaagaactaactaatcaactaaatcactccaacatgtagtacattgcagccttcgtttcacagtatgcctgggaaaatgagatataaaagagagaaagtacttcaggtccttttattggagtggaaacataaaagaggaggttaagcaataacacatatgaacagtcatttgcaattacttctaacgcaatctggatccatgggtcatatgatcaactagcagtttgggcacttcaaggcataataatttcctctcttttcatagatcagagtcatagaataactctcccaagtcgtaggtttctacatgtctctataattagccttttggcgctacccagtctgctttttagccttttaagtgatcttctaacacttttctccaaaaccttacgcctgtggtttgccaaatctcccacaggtcttyttcttaggaatcactttcctttttcttatttttgcattgttcccccttattaatgacagactaaatttaccagttgggaatcttcttaaggacaacatgtaaatcacgtatttaggattaaagtgaatttccaaaatggttatgtatacagatgagcccaaaaagtccagttaataaatgatctttctgagttgtggaactgagataccattgagcctatctctaaacataatttatagcaatttatagcactgtttttttatcagaaaaagaatgtgttcccagttctatatccatttatttactaaacacatattaatgaatgcctacctggggccagattttatggataaaatggtaagtaaaaaccatgagtttctggagcattcaatatagtggttgaaatagtcaattaaacacatttatatacaccccaaaacatatgagacagtgcaggatgctactgaatatactgcagggatatgtcacagcctaaatgatggacaagagaaagccaggtaaaagtagtgacaaagggaagggaagaggtgacaggcagaaagaacatgtgtgaaagatgaagcagaagagaacacagttcactgaaaccactttggaaagctgagcaaactggaactcaggtacaaaaaaaattagtgacaggtgtagtggggcaggtgaacattggttggagttcacagggtttggaaactaagtgaaagggtttataaacatatttgaaatttaataggacatggcatccttagcagcaagatgaatggatagacaacaacaatattaaactatatagtaaaaataaatgaaagggaatagagaaaattaaatagcctggaggaagctatccaatataaagtcag

SEQ ID NO: 23990 - DNA, 753 bp, Homo sapiens
tggtgtagatgcaaaatcttgccttcataatttttagccttatgttggattagagagcatattttcaagttgatctcttggaacctcagcatgaatctatattagaagcccagagaatgctaaacagagttttcactgagccatattagataacaaattattttacctataaatgagatattaattatatagattagatttttgttattagattatcagctatggagtgatcaccaaggaggataaaatagaaatagtataatcttctttgcccccctttaactctactatctgtggaatatactgaactttttacaaccaagtctttaatgctctttactttccctagcaaatgttcttccatttaaaaagtctttaaaatacttctttattttagcagtgcttcagaaaatctatcttagaccattctatgcttttaaatctatgataagattaattaagtaggctaacaacctcacttaaaaatattacctcgttcttgtaacattaatttctacagatttttttattgtgtagaagtagatacatagatattcctagtaactatagtataatataaaattaaaatcctatgtgttgaatcattatgttaataatagctgccatttctggagcactgtgtcttccaggcctctggtaaacactgttgcatacattatttgtcttagttctcaaaataatcttgagaggtttgtactattctttccatcttwcagatgcagaagttgaggc

SEQ ID NO: 23991 - DNA, 1357 bp, Homo sapiens
cctcggcctcccaaagtgctgggattacaggcatgagccaccgcacctggcctagtttctaattttaatggaagtagagtcgatatagtgctatctttatggtgcaattggattttggtaaatatctatattgtggttagatagccctttctattcccatttcctttactttctatttgaactttcactccctctggctcctggatggttaatcaatgacaggattgactcatacaagaaacacctgcctcattcagggactcaggagtctaggtcctcagccccctcctccctggggaagttaagcattactgtcttcaaaatctagctccctcctgaagtgtccaaagacatgacaattctggccaggcgcgctggctcacagctgtaatcccagcactttgggaggccaaggtgggaggatcccttgagtccaggaattcgagaccagcctgggcaagatggcaagacccctgtctctaccaaaaattaaaaagttagctgggcacggtggtgtgtgcctgtggtcccagctacttagaaggctaaagtaggaggatcaagatgtagtgaggtgtgatcatgcccctgcactctatcctgggcgatagagtgacaccctgtttcagaaattaggctgatgcggtggctcatgcctataatcccagcactttgggagtccaagttgggaggattgcttgaggccaggagttcgagaccaccctggccaacatagcaagacccccatttctaaaataaatacataattaagtaaaaaaagaaatgacaattccaatgagcmtctgaacagaagattaggacaaggctgatgtttgccgactcctgggaaatgcggttttctcctatctccagcaaaggctgatgggaggtaatcaagcccccttctcttcttgcctcagggactggaattgacatccctgtcctgctcctcctgattgatggtgatgagaagatgttgacggtataggggcccggatgcccggatctaagggggaaggagggttgggggccaggactcctgggtcctgagtcttagggagggtctgggggtctgactccgggtagggtgaatatcctgccttttctgacgtgatgaataaagaatgcctttatcctgtagcgaatagagaacgccacccaggctcagctcccatgtctcctcgtggctggctcagggggagctgcggactgcctggcggagaccctggaagacactctggccccagggagtgggggagccaggcaaggcgaagcccgagatcgaatcaggcgtttctttcccaaaggggaccttgaggtcctgcaggcccaggtatgacactgggggcccaactct

SEQ ID NO: 23992 - DNA, 556 bp, Homo sapiens
gggataatttgtgattgtaaagttggcacatataycttttttttttaaatcaggggaatttttcttttactttataagagaaaattagaagccactagacaggaactcactcaaattcttgccacaaacttacctgcagaggaattcatcatttcctccttctcctccatcatagtgaaagagacatctcattgacaaagccaattctgaggctctaaatctctcttgcagcctcattgacattgctgcattgcaagttccttttctctcttgatgcttcacttgctgctgattcattgccatcagcatttaaacaagcccaagtgtcttctatccttaaaatcttacccttcctagcttccccacccctttaattcacttctttatctgacttgttttggttacagttaagtttattgaaacaggtgtccacactcaccaccacttccttaccctccaccctgaaactctccttgaaatctggctgctgccccaatgttcctctgacactggtccagccaagatcactaacaaccttgttgctcaattttaggct

SEQ ID NO: 23993 - DNA, 528 bp, Homo sapiens
gagccgtgagttaaaggagctgtctttttcaactgtttgtttcatacaccactgcacwaagcaagtccaacattttgattaataacaaacctaaacccagaggaaagaaagggctatcagcttacaaactacttcagctttaatatcataatacttagcatggctagttacttggcaataatatttaacctttaatagaaataaaagcataatcaaaatgcttcatccatttatctttcaacatgctttggtcacttcattgtgaaaagcaaaacaaaacagttattatgattttcagcataataaattcctgacctacttgcctctataaatcacagactgtacgaattgaaagcatgcccgcactttacagtctcctatgaggatacacaataagatttagaatacggactcaatttgagtacagggggtctgatagtttacaatcatgtatgtcccaataactcaatactatccactctgcggctctttatggaattggcccaaaaaaagtagtgaatttttttg

SEQ ID NO: 23994 - DNA, 655 bp, Homo sapiens
tgccaatgtttggtccacaaaaaaatggagaaaggagactacaataacatcctatcaaatataattaggccttttctgtgttccacagacactgctctataacacaattcaacttgcgaatgagatatccatttttttctggtatatagacacctctgtggtggatcctgtagctygttatccaggttcccctcaggatgacagagctcattctcccagctggtagaaatttaggtggcttatggccgttaactgagttgctctccaaaaattaccttcaacccaaagttgctcactcatgagtaacggcaggttggtgtggacatataaagccacagccccttccccctaggccatctgactctcctgggactggccaaagcctatcttgcactgcactgtagctcacctcatccttacctgcctcctccgtcaccacggaggttaatccatgtgtgtttaccacaactcacctcatccttacctgcctcctccatcaccacagaggttaatccgtgggtgtttacctgtaaaattcctgcagcaaattttcatctcagagtctgtttctgaggaatcttccctaagagaggcccaaaccattgccaaattgtatgagaaaatacggtaaaaggcaatagagaaaaatgggaag

SEQ ID NO: 23995 - DNA, 454 bp, Homo sapiens
agtggctcccaacctttttggaaccagggactggttttgtggaagacaatttttccacagacaggggtgtggcggaagtgacagaggcaagagcatgaagggatgatggttttgggatgaaactgtaacacctcagatcatcaggcattagattctcataagaagcatgcaacctagatccctccccagtgcagttcacaatagggttcatgctcctatgggactctaataccaccctgatctgacaggagaggcgcccaggcggtaacgctcacttgcccactgctcacctcctgctgtgaagcccagttcctagcatggtccttgacatgcaaattggggacccatgctttaggcaacacttccatgaaagtgttrcaaattcaaaattgttaataaatatgaaatggaaagaatcctcctataatggcctcaagcccttagtaaagaatta

SEQ ID NO: 23996 - DNA, 766 bp, Homo sapiens
tgtgcttgacactgyggaagcaaaactgagtaaagaacaggccccacccaggaaaagtccacaacttaagtgggaaaatggacacgtaaacaaagtgctataaatgaaaatggcaagtgttgtcagaggtgtgtataaaatgctatgggaaatgggaaaggcaagtcattaattccgccctaagggatgtgagtccctgaaagttatttagagaaagggacatttcagcagaacatgttaattgaaagtaagtgttcaaaatgataaagtgacaagtattcctggtagaggtgtggaacaactaggcatttactggcacctgcaatggggcctcaaagccatgctggtagcctttgactatacctctcatatactcccatacacctcccatagtgggtccaatagtggcccacagaagatatgtctacctggtaccctaatatgaccttacttggaattgagtctttgctgatataattaaggtaaagatctcgaaatgtgatcatcctggattagggtggcccttaatctaataatcagtgcccttgtaagaaacagaagagacagacacagagggacacaaggaaaaaccacgtgactaagtagagattggcatgatgtgtctacaaatcaagaagcaccaaggattgctggagccacaacaagctaggagaaggagaggcatgaaataagaccaggggcagtggctcatgcctgtaatcccagcattttaggaggctgatgtgggaggattgcttgaggccag

SEQ ID NO: 23997 - DNA, 568 bp, Homo sapiens
gaggggttttgggggagggaacggtggcatctgggtttagtcataaaagtaacacaagaygtagctgaagaccaggtatcgaatctagcgttggcagactgggccaaatggaaggattctaaggtgagtggcattaccttgctgtaagtttttatagcaaaaatttctctgttcagatatttaaatacagcttttcatagcattggaattgctttaaaggtaattgatttcctttgactatatcctttcgccatttgggtatgagcaattccaagggacaaggaagaaaaaaataaggaggaaaagtttctgtaatataaattccctgaagaaaatggatgtgtatgttgagttgcaatagccaagggtaagtctccattgtaggccatacaattgaaaatatatctatctctacttcctgaaatgatcagaaggtagactctgcttacaggccccaagactacaaacccctttacaaaaaaaatgttcaagacttattgcaagattttaacaaaagtgtacatccagttatgcatacaccagagtgataattcacatttctcccaag

SEQ ID NO: 23998 - DNA, 1025 bp, Homo sapiens
tatgttttaaagtgtgtatttgaggayatttagttgtatatgagacagaaactggaaacagcactaggtagaacatccttacatgtaaagatttgtacatttgcccacttgtttccctaggataaatttctagttctggaacagttataaagtatctgttttttaaagactatgtgatacacagtccagagttgccaaatcagagaaaccattgttaaggcttctgagttctttatctgcaatttttggcagctacaattttggtcagctgttctctttatcttagtaaaatgagttctagagtattgctacctaccaaatgatgacttgtagcatgatgaatttactactgaaatgttaattttttttgtttctggtatcatacatttaaaagctatatgccagctcttctaatatcatagcttactaattaattttttttttgagactaggtctcattccatcacccaggctggagtgcagtggcaccatctcagctcactgcaacctccacctcaagagatcctcccacctcagcctcccaggtagctgggactacagacgtgagccaccatgcctggctaattttttatttttgtattttttgtatagatggggttttgccatgttgcacaggctggtctcgaactcctgagctcaagcaatctgcccacctccgcctctcaaagtgttgggattacagatgtgagccaccacgcctggccttgataatgaaagtacattttttttttttttttttttttttttggagacagtgtcttgctgtgtcacccaggcttggagtagagtggcacaatcccagctcactgcaacctccaccttctgcgctcaaatgatccatcctgcctcggtgcatgccaccacaccgggctaattttttgtatttttagttgagatggggtttcaccacactgcctaggctggtcttgaactcctgagctcaagtgttccacgagcctgacctagtaaaagtactttttaagtgaaactattttagttttcaa

SEQ ID NO: 23999 - DNA, 1025 bp, Homo sapiens
tatgttttaaagtgtgtatttgaggacatttagttgtatatgagacagaaactggaaacagcactaggtagaacatccttacatgtaaagatttgtacatttgcccacttgtttccctaggataaatttctagttctggaacagttataaagtatctgttttttaaagactatgtgatacacagtccagagttgccaaatcagagaaaccattgttaaggcttctgagttctttatctgcaatttttggcagctacaattttggtcagctgttctctttatcttagtaaaatgagttctagagtattgctacctaccaaatgatgacttgtagcatgatgratttactactgaaatgttaattttttttgtttctggtatcatacatttaaaagctatatgccagctcttctaatatcatagcttactaattaattttttttttgagactaggtctcattccatcacccaggctggagtgcagtggcaccatctcagctcactgcaacctccacctcaagagatcctcccacctcagcctcccaggtagctgggactacagacgtgagccaccatgcctggctaattttttatttttgtattttttgtatagatggggttttgccatgttgcacaggctggtctcgaactcctgagctcaagcaatctgcccacctccgcctctcaaagtgttgggattacagatgtgagccaccacgcctggccttgataatgaaagtacattttttttttttttttttttttttttggagacagtgtcttgctgtgtcacccaggcttggagtagagtggcacaatcccagctcactgcaacctccaccttctgcgctcaaatgatccatcctgcctcggtgcatgccaccacaccgggctaattttttgtatttttagttgagatggggtttcaccacactgcctaggctggtcttgaactcctgagctcaagtgttccacgagcctgacctagtaaaagtactttttaagtgaaactattttagttttcaa

SEQ ID NO: 24000 - DNA, 489 bp, Homo sapiens
tataaagaaacttcagccctaatacaactcaattttctgaacaaagtaggtagcaagtttgctaatagtgaggagcatatgaaatgggtgttgaagtgagggtctgagacccataaaaatatttttaaaatatagagtcttggacttacgaactcaaagaatgttgatgttggaagggacctgctgcttgctccagttgaagctgcactgtactccttttgcatgtatttttaaaatcagaataaatgaagctcagagaggctaagggttgcatgtaacgccacacagcttagcagagcttcagcctgttctctctcattttgccttcagttggaacagacaccctttccagagccyccctgagcaatcactgtgctgagtacacccctcgcccaccagtattgctccgcacagaggcctccccaactccaggtctcaccacagaagcttgagcagtccagttccctacccacagctgacctccaacag

SEQ ID NO: 24001 - DNA, 615 bp, Homo sapiens
gattctcatgcctcagcctcccgagtagctaggattacaagcacccgccaccacgtccagctaattttttgtatctttagtagagacagggtttcaccatgttggccaggctagtcttgaacccctgacttcaggtgatccaccgcgcccagcctaaactttaagtaactgcaacttgttaaaaaaagaaaaaagcctcaaacactccaatttttgctctaagatatatcagaattcaatttgaagctttagtcatgaaacagcaatagaataaaatagagggcccattaatacacctatgcacgcatataactaagcatataacagaggtgacattttaaactgatggggagaagggactataaaataaatgtgacagcaagaaaaagttacataaatggaaaagacagaatgtttatctaccccataacacacccacaaatgcctgatatattrttttgtgttttttttttttttttttttttttttttgagacggagtcttgctctgtcatccaggctggagtgcagtggcacaatctcagctcactgcaagctccgtctcccaggttcatgccattctcctgcctcagcctcccgagttgctgggactaca

SEQ ID NO: 24002 - DNA, 538 bp, Homo sapiens
gtagtaactgatccatattatttacagttaataaaatacataatcttcagttaactcttggtcatacattattataagcatactgtgcatcttccagaaggaaggaatgccagctattaaatcaaaagcaaacatttcttaagtgcttgtatgtgcaggatctcacagctgsaaactaccaatataataataaaacatctgaaatgagaggatgaactcagaaattcctaagatttcttaacctattaatttaaattgttattaaattcaataattcgatatgtgggtaggcatttgatgaacttgcccaaaaacatttgagatgttcaggagtttgtatttcccagaatcagaatacaataattttatctaaaatgacaattttgccctagctgctgagcaatttaaactctacgggaatcacactccagtgagtgtgtgtatattctgctttacaaataaaaattgcctgccacgtacctaacaaaagtctctagcccattaggatgtaaggttaaaacaaagctagaatttttat

SEQ ID NO: 24003 - DNA, 515 bp, Homo sapiens
ccacgcctggctaatttttttgtatttttactagagacggggtttcactgtgttagccaggatggtctcgatctcctgacctcatgatccgcccgcctcagcctcccaaagtgctgggattacaggcgtgagccaccgcgccccgccttggactgggtgtgtttttaacaatcctttcttagtgtcatttctctcagctaaagtttggatatgcaatggataattgtattctgtgtggagttctcaattgtattctgaggagagttctcgattgcagatattctatacttgtttgaggctagatctgtaaaattagtaggatttgttagwtaattcattagctgagtttcaaaaattttgaagctgtattttaaaacaattagataatttctgtgttaaaaataatgtttatatttgtgaaattataactcccacaagttattgaaatcacttccctttttaggattaaaaaatattactgatgattgaagggtaattttcaatgttaaacttca

SEQ ID NO: 24004 - DNA, 563 bp, Homo sapiens
atgttagaaactacttaagggcatatgaaaaactgtatgatgctagaaatatttgtaatatttctgccactgacaaatagagctttcagaaaaggttcacattacaaagttgaacaaaaatctcaggttctaaaaaataagtaacaaaagataattggttaattttcttctaattttgtatatgacacagctaacttaatgattataggttctaaataaattgattatacatgaacttgaagagatttcttttcttaaatcctatccctggcttatgtaaagccaactgagaccacagagcatataaaatcaagtgctgcttcacaaatgaaataaagtgttccttgattcattactaatgcgactatccacatacatggaaaaccacaactcagatattccccttttatttttctctagaaacatgaataaattgcttttggcacacttaattggtgtttgggrcatacttttcacaattgaagtccttagtaaattactcaggagagagactctcctctttcagtacattatttaatacttaggcttgttagtgtgtgtca

SEQ ID NO: 24005 - DNA, 996 bp, Homo sapiens
tccaaagcatcaaagtgagggtcagaaacaggatgattggaaacaaagccaagtcaggragctccctgggaagtctaagacaatgttctggcaacatcttatgcataggttgatgaacccagctgaacaaggcccttttctgaacagtactagagactgggtgaatccatatgatttgataggaagggaacaatattgatgagcccagctgaacaaagcccttgttctgacagtacccgagtcttggtggattcatacaatttggtggtcagggagcagtattgacaggtgatttcgcaagcactagttttggagcattgttttcatagtccgtcaaatgagatatttgtactgatgatttgtcaagtctgcatgaatgattacattctctgacaccatctgcatatcgcatccaaagctctgagctcatgcttctcctagagccagctagttcttccttagcatttgcaaatctattcctggtaaacatgctgcaaatcaacactgttccaccccaggtaacatctgaggaaagcaaatagctagggcagagcaacataacacccatccttcctcagcagtggaaggcacctcagttagcactttctgcaggaaggaaatgtctgtggagtgttcctttccatatgtcctaagatcaaaccctggaatctgagaaaatccttgtgatgtgaatgtgtcatcctataaaattaagtataccaatcaggctgcaagaaagtgagtaaagtgcatgccaagtttgcctgtggtagcataaatgcgtcttagctgtttcctgaagataggagctggaactcttatggggaaagctgactgagcgcacacatttcacccttggcctactttgtttatcttgagaccactgaagcatttagtctagaccgtacagtgttttcagtgtgtcctgttcattctttcccaagcatctgttttttctcaagccccatgtgactcaccttacatggccttctgctg

SEQ ID NO: 24006 - DNA, 996 bp, Homo sapiens
tccaaagcatcaaagtgagggtcagaaacaggatgattggaaacaaagccaagtcaggaagctccctgggaagtctaagacaatgttctggcaacatcttatgcataggttgatgaacccagctgaacaaggcccttttctgaacagtactagagactgggtgaatccatatgatttgataggaagggaacaatattgatgagcccagctgaacaaagcccttgttctgacagtacccgagtcttggtggattcatacaatttggtggtcagggagcagtattgacaggtgatttcgcaagcactagttttggagcattgttttcatagtccgtcaaatgagatatttgtactgatgatttgtcaagtctgcatgaatgattacattctctgacaccatctgcatatcgcatccaaagctctgagctcatgcttctcctagagccagctagttcttccttagcatttgcaaatctattcctggtaaacatgctgcaaatcaacactgttccaccccaggtaacatctgaggaaagcaaatagytagggcagagcaacataacacccatccttcctcagcagtggaaggcacctcagttagcactttctgcaggaaggaaatgtctgtggagtgttcctttccatatgtcctaagatcaaaccctggaatctgagaaaatccttgtgatgtgaatgtgtcatcctataaaattaagtataccaatcaggctgcaagaaagtgagtaaagtgcatgccaagtttgcctgtggtagcataaatgcgtcttagctgtttcctgaagataggagctggaactcttatggggaaagctgactgagcgcacacatttcacccttggcctactttgtttatcttgagaccactgaagcatttagtctagaccgtacagtgttttcagtgtgtcctgttcattctttcccaagcatctgttttttctcaagccccatgtgactcaccttacatggccttctgctg

SEQ ID NO: 24007 - DNA, 830 bp, Homo sapiens
cacagcctgcctggtactcaccaacacctgtggcacggagaatccctcgttctgttgcctttggctctgctctttgccccagctgggagacacaactgggtttgcatggtggagttcctgcacatgaagaaagacacaggcactgagagagagagggcttgcaggggaaaacaaactcttgtttctcaactcaaactctccttcagcttcaatatgggcttcagattctctgggctgagcaagtgtgatgggtagcaaagggatcttgcccaatagctaatgaactcaggacccaacccacaaacaccctcccctctgccccaaggggctgargctgtctcacctcagaagcctggggccaaattcaaggagacccaaacagggccttactacagagggaaagaagtcaatgcaacagatgaagctttgtcatcctgtggacgctaagtgccacaaagcctaagccacgtctgtcttcttcacatggcaggcgcttaagaagcatttagtgcctgcgtacaggaaggagccaggtgacgccagccttacccctggaggccagggtcctgcactggtcaagcatcctgtatttgcacaggctcctccgtgcgctgtccagcaatgcccactcctggatgaactccacggccacatcctcaaaggtgacggattcctaaaacagcacacacattctggctcggcaaataccacccccaccactgagcagaacgactggttatcactggagaagagaaaatgttcagacacagcaggcatggaaaatccagcctaaagcctatttttgtaaataatgttttcttggcacacag

SEQ ID NO: 24008 - DNA, 830 bp, Homo sapiens
cacagcctgcctggtactcaccaacacctgtggcacggagaatccctcgttctgttgcctttggctctgctctttgccccagctgggagacacaactgggtttgcatggtggagttcctgcacatgaagaaagacacaggcactgagagagagagggcttgcaggggaaaacaaactcttgtttctcaactcaaactctccttcagcttcaatatgggcttcagattctctgggctgagcaagtgtgatgggtagcaaagggatcttgcccaatagctaatgaactcaggacccaacccacaaacaccctcccctctgccccaaggggctgaggctgtctcacctcagaagcctggggccaaattcaaggagacccaaacagggccttactacagagggaaagaagtcaatgcaacagatgaagctttgtcatcctgtggacgctaagtgccacaaagcctaagccacgtctgtcttsttcacatggcaggcgcttaagaagcatttagtgcctgcgtacaggaaggagccaggtgacgccagccttacccctggaggccagggtcctgcactggtcaagcatcctgtatttgcacaggctcctccgtgcgctgtccagcaatgcccactcctggatgaactccacggccacatcctcaaaggtgacggattcctaaaacagcacacacattctggctcggcaaataccacccccaccactgagcagaacgactggttatcactggagaagagaaaatgttcagacacagcaggcatggaaaatccagcctaaagcctatttttgtaaataatgttttcttggcacacag

SEQ ID NO: 24009 - DNA, 534 bp, Homo sapiens
tgttttaaatgtttctttcctccaaaacttacgttgaaatgtaattgccaatgtaatggtcttgggaggtgaagcctttaacaggtggtaaggccatgtaggctcttccctcatggtgggtttaataccttaaacaaaagggcttttgagagtgggctctctctttcctcttttgttcttctgacatgtgaggaactgtgtttcctccacgctggaggatgcagtgttcaaggcatcgtcttggaagtggagagtgggccctcaccagacaccaaacctgttggcattttgatcttagattttccagcctccagaactgtaagaaatatatttccattatttataaaccaccyggtctcaggtattctgttattgcagcacagaacaggaggctaagacacacgtggaaactctgaggctgagcagagggtggcacatggaggccctgagagcaggctcagcccatgggtttggaaagagccatgtgatggggaggctgaggaagggcgggtgcagtgcacgtggggcctcaga

SEQ ID NO: 24010 - DNA, 1106 bp, Homo sapiens
aggtgttgtaagacatgggccacagaactgatgcatgagggaagaataaagaccaacgctcatcaagctatttccgtgtgccagactctactgggggcttcaaaatatatggcctcattgacttcacctaatatctgtttggagtaagtattttatcactggtattagagggggaaactgacactcagaggggcagagtgacttctctgagtctcagtgctaacacaagccaaggtttaggttccggtctacatgtctccaaacccattgtctctggaccacaatcatactgtgtacacagtccctgaccggagtctctcctgggacacttaactttcttttaaggactcttcattctcaccctcatgtccacgctggctcagtcttatcctttaagcccttatgatgcctcattcctccaggaagccttctgagaggaacaatcagagacagaagtcaaaggctggagcccctgtgcttgcttctgggggaacctgagctggaagtcagcagatgacatttgagcctccctggccattgcttattgcctgggcacatagtgaataccactcaggacagggtccagagggcaaggctggctggtgtgtgctggcctctcccccatatcycaggctgggcagcccccactgtgtttccatagtgatgatgacaactatgatgatgaccttattggtcatcattgggtggccacattcgatgctcggcgttttctacgtaatatcttaggtaattcccctaccacctgctgctccacaatcaggtctgttgtaacatgtctgttctctaaaggggcagggcacagacataggtgacagctccatcaagaatcaagcggggatgacgcagtgggctgtgtcttgcacggcagtggagaggatatcactgaactctctagactcattttacaacattctcctgtcattccttgggaagtgttcaacaaagcttcttccctttgcattcatctgagcctggcttctgtcagtgtatgcgcttttcaaaaatgctgtcaatcccccacttcttgaatcagttaattaactagttgagtgtctgtttaagcagaggaaaacccaaattgcgta

SEQ ID NO: 24011 - DNA, 991 bp, Homo sapiens
attcattatgtgatgtaaagtgaaaaattagaagtacatttaagagtgacatatgagaaaatcattaaataatgcagaaaggggtaattaagattcatrccaaaatgaacgtagccattatagacgatacagatttaggtttgttgacaagtccagtaaattgttaatgacaaaagttggttacaaaaggatatgtcttatgtaatatactctttatttgaatacactgtaaaatatgtaagtatatacatcagcatctctagagaaccactttggataatggcattttaggtaaccttaatattaaaaaggttgaccatctatattttgttattttctatattgttatttttcttttatgagaaggaaatgaaaggaaagcaataggagagaaagaagagcaaggaaaggaaaggaaaaagaaaagaatactgtgagatttatggagggagtgaaattttctctctctccctcttacacacacacacacacacacacacaccagttagagacagatgttttgtggcattggtttcataactttattatcctttgttaaatcaccattctcaattagtgaatgacagttattgggtgcattatgaaaaaatacccgggtgttctatgccaaattttaaccagaattctacatgctaatttgtttagaaaaaaatgaatacatgtgaatgaattttgagttagggaatataaatgataactggatggcattttacagaatccttgggtgtcccagttatttagaacagtgagtcctacactgaaaacaataggaaaacactcttataagccataccttcattttgccaattaaattttattattaaataattttttcctatgttttctaaaagagataagactgaatgaaacaatcatcctaaagagaaaagctagaattgtgtagtggcatcaggcttactagtaactctaaatactactatgtcgtggcgattaacctgtttatagagga

SEQ ID NO: 24012 - DNA, 1097 bp, Homo sapiens
tgaaaaaacttcatagatgcaaaaaaaaaaaaaacccaccattattaaagaatacttaggtatttgtggaatgcattgaagagttaacaaaatggataggcaggaaatatcgcagacctagaatgaattacagttacccactgtggaactgaggagctagggtttctcataaaactccctgatagaagacgacttttgataaatttttttttccgccaacaaaatcccctgtcttctcaactagttactgtctgtccactaaataagaggtggtccgtcacttcttcagatgagcaactacaggcttttcaaaagataattgctaatcaacccctttgtgcctgggttttcttatttgtaaaaatagatactactacctaactccaaagtgtgtggtgaagacaaacaattggggtgatgtatactaaagtaacgaaagtgttgaccacacactacgggctggttagtgttagattcccttgtttttccctcagtatcaaaaacagatctaatttaggtttacataaagacaaagtatgaagataaggtgacttacagttggtactactaacaaaatgtttgggctaagatttgcattattgcatgaaaacaacaaaacatatcaataaataacaaaaagcttggaattcagacracagatccaagtctgggcttgatctcaagctagtgttttgatgttgaaaaaatgttatttggtctttctaaccccatttccttatgtaaaataggggatgatgataaattcactgataataagagttaaatgagattcttgaggagtcagaatggttctaacatgtgtaggtattattagcagtcatactgtagcataagaaaataccgtctgctgaaagagggacaataaagattatctacatggtcatcatttaaaagctaccagatataggaagaaggggccataaaatgataacgttatgatgattaattttgatgcttaggtcagagtccattctaggatatctgctgcccaaaaacagcagagactcatttctttggaatcacaggacgctgagtgagaggaaagaaaaagaaaagaaatatttaagtcacatatg

SEQ ID NO: 24013 - DNA, 1097 bp, Homo sapiens
tgaaaaaacttcatagatgcaaaaaaaaaaaaaacccaccattattaaagaatacttaggtatttgtggaatgcattgaagagttaacaaaatggataggcaggaaatatcgcagacctagaatgaattacagttacccactgtggaactgaggagctagggtttctcataaaactccctgatagaagacgacttttgataaatttttttttccgccaacaaaatcccctgtcttctcaactagttactgtctgtccactaaataagaggtggtccgtcacttcttcagatgagcaactacaggcttttcaaaagataattgctaatcaacccctttgtgcctgggttttcttatttgtaaaaatagatactactacctaactccaaagtgtgtggtgaagacaaacaattggggtgatgtatactaaagtaacgaaagtgttgaccacacactacgggctggttagtgttagattcccttgtttttccctcagtatcaaaaacagatctaatttaggtttacataaagacaaagtatgaagataaggtgacttacagttggtactactaacaaaatgtttgggctaagatttgcattattgcatgaaaacaacaaaacatatcaataaataacaaaaagcttggaattcagacgacagatccaagtctgggcttgatctcaagctagtgttttgatgttgaaaaaatgttatttggtctttctaaccccatttccttatgtaaaatwggggatgatgataaattcactgataataagagttaaatgagattcttgaggagtcagaatggttctaacatgtgtaggtattattagcagtcatactgtagcataagaaaataccgtctgctgaaagagggacaataaagattatctacatggtcatcatttaaaagctaccagatataggaagaaggggccataaaatgataacgttatgatgattaattttgatgcttaggtcagagtccattctaggatatctgctgcccaaaaacagcagagactcatttctttggaatcacaggacgctgagtgagaggaaagaaaaagaaaagaaatatttaagtcacatatg

SEQ ID NO: 24014 - DNA, 971 bp, Homo sapiens
tggagctctgctgtgcacgtttgctcacatgccctccttctccccccacccatcacaggtcagtgctgtctcgcacaggagaaggtgctggcttcccctgacgtcctctgtgggtagactcacaggagctctgcattcagtgatcatgtgatgaggatcaggaatttcaaagaggaatttcagcactgcctgcactgaaataatcaagtttgacctcacaaggaacagcaggttgggcagaacgttaagtgtcaggcagcatgagagcccacacgcagggcacgcagcctgggactgaaccagaagaaggtctgccattgaggatttagcaaggggagtagctcatgatgaggcgagaaacaactgtttccagtcaggtccaacaacctccctgagctaatcacaaagtcattctaatatctggactatagaaatccaaatttcgtctccatcctttggagctaaatttctgacgctcctttcaacaagatgagaacctgccactttggttggaaccaggccctgggcctcactgtgaaggctgaacgaggatgaccagagccgggaccttggacacactgggaagtgaccatccagcaatgtgtcaggcctgggggaaggaggaaagaaagcagccgggggaggccttggggcagaaaagagatggacatggaggccattcaaagcaggggagggactcaaggcgtgagaagacaggcctggggctcaaggtggatctgttaaggtccgtggttacagcccgctgccccaggtgagggaggatgctactgaaggatgcggagttttttagggaactaccatgcaggttttccctcgaccatccccatcccttgattgaccttaccattctcccttcaggtaaactgaaaaacagaaccataacagagggatactcactctccactctggtacatattcatatttcttttrgacccttctcacaggatcct

SEQ ID NO: 24015 - DNA, 466 bp, Homo sapiens
tgtttgattcgtgcccctgctgttgctgacaaaaaccatgctgatacatttcatattcagggatgtgtcagaacccattgtgtagcaccttggacagctctcccagtggcccttttgacaaatctaggtttaaatcagcctcctatgtatcttgccttctgtcctatccctcactgccccactgacctcctcaaatgctacactacaagagaactggctgaaaaattattcatgctcaacagatccttccaaaggctgaagttcattcaggaagtcaagattagagtgagccctgcagaatatagggtgagagaaactgggaaaatggcgtggggagataatggaaagaagggtagcttcaggagaggactcacttttttaaacttttattttaggttcggggtacatgtgcaggcttgttatayaggtaaacttgtgtcatagggggttgatgtacagatgattt

SEQ ID NO: 24016 - DNA, 718 bp, Homo sapiens
gcaggagaagtgatgagtgaaacataagcctatatgagaagcccgagaaatcccacatagggccaactctctcagttgagtcttcgctacctgaagctgcaacagctgccttcaccatgcctgaagttgtgtagggtgtccaggagacactcaggagtccagggaatcccaagtaccacctcttgaaagaatccaggaaagacgtatggccggaattatgggtcttttaatgacacataaaatgaaccactccacatatccatttgctttgacagctgaagatttcactgtgataaaagtagggccgtgcacactgtcagcaatttacatttcacatcccaaaccctgtcagccaattagactgcaagaaggagcggccrcattttctaatgaggctatcatcaggctgctccctcacccagaaagaggagatattcttgttcagaatggagaaggtaatcatcagggaaaaggggttgaataaatcagatgtgatttcagtgcagcttgctataggtccattataattggaatctaggctgatgaagactcagcatcctccctcaaactgttttgcttaaaagaaggcagatttctctgtgtggagaaaggtgactttccctacacaaggaaaaaggcttctgccttgccagttctttattccagaataaagaactggaaaggcaaaagccatgggtatcaggcctgagttctcaag

SEQ ID NO: 24017 - DNA, 608 bp, Homo sapiens
tgcatgtagtgccagctacatatgtacagtgtccaaccccacaaaggggatccctgttattcgtagggagatggtgtagcagtgttgccctagagccaattcatagcagtttgcaggggccagttgttaccatctctttgtagctgtgcattcagtgacatcgtgggagtaactcgaaactggccacagtggaaatacttctatcatggaattagacaaacactattaattcaagctttccccacctccagagaatcagatgttaaacatttgccagtgttcctctggcaaagaaaaggaaaatagccagaggtaagtgaaatcaaatgagagaagtctaaccttgcaaaactgagccaactgcactgatgtatcctgttgtctgtcccacaccctcgcaaggcttttggtctttgtccagcagagtcaccacgtcttattcaggttacagtgctgagctatttggaaaccaggctgggggggtggatttcaatgtcatcttactaaaaaagytcactaatgaaaagtgtattgctaagacagcagcttcatatttctcccagtctttatcagcagccatggattgaatcgttgacttgattttacta

SEQ ID NO: 24018 - DNA, 844 bp, Homo sapiens
ctatatatctttgttgaccttaatggtagatttcggatttcacgaccctgatgcaaccaaataacatatttttgtcatgagaattctatttttccaggcttaatcttttatttttatttatttatttatttatttattttgagacagagtttctctcttgttgcccaagttggagtgcaatagggcaatctcatatcaccacaacctctgcctccccagttcaagagattctcgttcctcagtatgtagctgggrttacaggtatgcaccaccaagcccagctaatttttatattattagtaaagacggggtttcttcattgtctgtattcgtcaggctggtctcgaactcccgacctcaggtgatccgccagcgtcagcctcccaaagctgggattacaggcgtgagcccaagactggtgcccagccaatcttttaattctatgaaggaaaatctattgaggaaaccagcaagggctcttaataaaatgtttgttgtgggtgtttgttgactgcttaaccaacacgcatgccctccctgcccgtctcctccggggccctgtggggaatccaccctcccccatcctcagccatgtggcttggtgcggccgaccctgctctcagcaggaggtgcgccccatggacttgaacccaagtcttgtgggtctagcagtagaacacaggctcaggacggaggttgctgtgtggccgtcaggagtgggcagccccagggtaaagctggtatcagaagaggcagagcccaacttgaagggtcttttgaaccctgaaatgaggccctgggaaagcaaggcccatgcgtgcttcagatgaacatgctcacgggt

SEQ ID NO: 24019 - DNA, 545 bp, Homo sapiens
acagagtgagactccgtctcaaaaaaaaaaaaaagaaaaaaaaaacaggcttctgcaggcactgaacactgtggtggggtggggaagcaggtaggtacctgggtagaatcccagtagggtacaggaataaacttggatgaggaaaaaaatacctctgctaacttctacctattagaattgtaatcttctattgtgaatgtacataacaaactgcaatggtactaatggtacatgtgattgtattcaccagtagaaatccctgatattttcattttatattacagttacctcagggatttgagaaaaattatttatgctcaatggcatttcaaaatcatagtagctmttagattaaccagtagatcttattaatgttactggcctgtgtgttactggtaacagactcacttaggtaagggatcaaagggaaatacaactttcctcttgcatgctctgtctgcacaaagcaggaacgtctggaaagagccagcctcccaatcaggactggccaccctctctctcttcctattcctctctgctgtctg

SEQ ID NO: 24020 - DNA, 597 bp, Homo sapiens
ttttatttactcacggtgtgacttcgggcaagttccttcccttctctcagcctttcaggtgatctcaaagttgccctccagctcccaaatgtgctgattctattcttatagctagtctcaggtggtccagaaatattttctagtatgtctacaaggctgtgggtgtgagcaagacacacataaattgaaakgttgtgtctttatgttcatgccagtaaaaaatgataagaattgttcctgtcccagtcagcatttgagtgcttaatgttggtagtgatgaaaataacagaaaaaatatgagcacttgcacatatagaagaaatatgtgattatgatttatagaattgaactaaagaatagttgtccatctgggaaaagattttataaacaccagatagaaaagcatgttcagctcccctatagatggcatgaaagagtgcttaataatgggtaaatatgctttttgccgcatgtgtgtgcctttaacaaatattgacctgtcctttgctgttatatttcaaaacgtgagtaaatcaaaataagatgtgttttatggaactctcttgttttattatctgtcatttaatttttaatacc

SEQ ID NO: 24021 - DNA, 523 bp, Homo sapiens
tgtacacctctttaagtatataaaagatggtttccatagctgacaaatactgtgagtttccactcacatcttctgtaagataagaatgttttctratgttaaaaaattggatatttgtctatcataatatttcctgatgttaaaaattggatatttgtctatatttttccattttctattttttaaaccacaactacacccttctattctaaatggttgttaagcaatgttttcccaatacctatagaatttgatattaaaatcaagcacttatctgtagaggaattagcttacttggttaattgacagagataactcccattcttggatggatctctataagaataattatagcaatctatatagcgttgtttggcaattttgactgccctaaattgttatgcttctttgcaaacaactattatgcttcattaaatcttccaagatatgcatgttgcatgtcagtgcttaagaggatagatccctaaagataaaaaaaaagtaggtgcttttttatgagttg

SEQ ID NO: 24022 - DNA, 689 bp, Homo sapiens
tctgaggtcaggagttcgagacgagcctggccaacatggcaaagccatgttgtaattttgtaaaaatacaaaaattagccgggcatggtggtacatgcctataatcccagctacttgggaggctgagacaggagaatcgcttgaacccaggaggcggaggttgcagtgagccaagactgtgccattgcactccagcctgggggacagtgtgagactccatctcaaaaaaaaagccttggcatattgtggaatttccctcccttaagcttttccccatgacamcttttttcatttattatgatcaaaggctttttctaactttaaaaatactttattatgaaatatcaatacagaagaaaagagcaaaaatgtaaatatactacttactaaatagtaagcaaatatccgggcacctgccacctaggtcatgaacagagcattctcaatatcccaaggagccccagggtcatttccccatcataactctctacctcccctcaggcttttgagataactttttcttgacttcctttttaattttacaacctacagctgtgccccttaacatagagtatcattttgactattattgaaccctgtataaatttaattatactgtatatattctttctatttttgcttcttctgctccgtattatgtatttagtttcactctcataaatgcatgg

SEQ ID NO: 24023 - DNA, 689 bp, Homo sapiens
tctgaggtcaggagttcgagacgagcctggccaacatggcaaagccatgttgtaattttgtaaaaatacaaaaattagccgggcatggtggtacatgcctataatcccagctacttgggaggctgagacaggagaatcgcttgaacccaggaggcggaggttgcagtgagccaagactgtgccattgcactccagcctgggggacagtgtgagactccatctcaaaaaaaaagccttggcatattgtggaatttccctcccttaagcttttccccatgacaccttttttcatttattatgatcaaaggctttttctaactttaaaaatactttattatgaaatatcaatacagaagaaaagagcaaaaatgtaaatatactacttactaaatagtaagcaaatatccgggcacctgcyacctaggtcatgaacagagcattctcaatatcccaaggagccccagggtcatttccccatcataactctctacctcccctcaggcttttgagataactttttcttgacttcctttttaattttacaacctacagctgtgccccttaacatagagtatcattttgactattattgaaccctgtataaatttaattatactgtatatattctttctatttttgcttcttctgctccgtattatgtatttagtttcactctcataaatgcatgg

SEQ ID NO: 24024 - DNA, 689 bp, Homo sapiens
tctgaggtcaggagttcgagacgagcctggccaacatggcaaagccatgttgtaattttgtaaaaatacaaaaattagccgggcatggtggtacatgcctataatcccagctacttgggaggctgagacaggagaatcgcttgaacccaggaggcggaggttgcagtgagccaagactgtgccattgcactccagcctgggggacagtgtgagactccatctcaaaaaaaaagccttggcatattgtggaatttccctcccttaagcttttccccatgacaccttttttcatttattatgatcaaaggctttttctaactttaaaaatactttattatgaaatatcaatacagaagaaaagagcaaaaatgtaaatatactacttactaaatagtaagcaaatatccgggcacctgccacctaggtcatgaacagagcattctcaatatsccaaggagccccagggtcatttccccatcataactctctacctcccctcaggcttttgagataactttttcttgacttcctttttaattttacaacctacagctgtgccccttaacatagagtatcattttgactattattgaaccctgtataaatttaattatactgtatatattctttctatttttgcttcttctgctccgtattatgtatttagtttcactctcataaatgcatgg

SEQ ID NO: 24025 - DNA, 2242 bp, Homo sapiens
tgaatgatgtaatggcttcgggccagagctccctgtgatcctgcgacaaattttggattggtgttgccataaaacgtccctgcccacacctcaaaaccacacataagccgtcattaatctctccgcttacgagttgtgttgctatctcagattgattcaaaaatatttgggtgtgggtgcatacaaagagttcacaacattgttatatgaactgtagtagatgtttaaaagttaagtaaaagaaaaaaatgagttaatgctgaatatcagagtccagggagatcatactgattcctttgtttacatttagacattctgcgatcaatctttactttttaccttacttttttctcctaaacattttattataawttttttcaaaaatatggcaaagttgagagcattttacagtgagcaatcatctcttccacctactttctaccataaatattttactatactcatttttaaaatcacgcatctatatatccctctgtccatccatcaattcatttgtaacacatttcaaagtaaatctcagatacctgtacactttccctaactacttcagtgtgcacattattaactagagttgattatttatttacaatatttttctttcatgtcaagatttatacataacaaaatgcaaaaatccagtttccattcattgagattttacaaaagcatttatttcttggtctttcattttctcttgtagtctatgcatttatttaattcaatagatgttattaaacacatcccatgtgccaaacatttataatgacacacattaatatgatgtatgctagacagaggagacagtggctaattctcatgttggaagtcagggagttaagcaacagagagagagagagatgttacaaaaagcatttatcactgaattaacccatgaacaaaattgaaaagaatgagaaaatatggtgtgtttagggcaaaatgcattgtcttttgtagcctgagcctaatgagagtatgcatgtgtaggagggtggtgagtaagagacgtaattattttaaaaattcaaaattcaaaacaacatgtattaaaaagttggcaataaatgaagtgcttcatactatagcactgaacttatgagaaagcctgctcttcttcagctgttccttcttgaaccaaaatgacaaactgacaactcagattttagcctgttttatttcattgataaactgctaaaatttagatttaatgcatgtttgatttctgacttttgaaatttgtttgaaatgtttgaaaattgactacacatttgctcccaaatgtcttaatataaatgtttggaggaaacaaccaagtgagtattctaaagtgtgaaaagatcactatgaaaaatgcttcattatttaaatcaaactataaatgagtttgccacaaactggaaaataaggagaaatattaagactcaaaataaagccttaaaatagtaaaaaaaaaaaaaatgaaaaaaagaaaactttttcttaaatttgtggatttatgactatgaacatgacatggtgcaaaccttgtcatcattcattcattgacccaatatgctctgatgacagatgcataagaggggctgtgtgtgtgtgtttccctaaagaggacactatttttctgactctccaattaactctctgacttctctgtactactcctggtttaggatctcacgtcagacaacattctctacctgcatcattattttatccatctatcctgagtgatttgcacttctgtgataatgactactgtattgtactgctatataatatgtaaaaatttaaaaaaaaattgagggagaaaatgagctttggttatttatttatttatttagagacagagtctcgctctatcacccaggctggagtgcaatggcacaatctcggctcactgcaacctccaccccccgggttcaggcgattctcctgcctcaacctcccgagtagttgggattacaggcatgtgccaccacaccgagctaattttgtatttttagtagagacggggtttctccatgttggtcaggctagtcttgaactcctgaccacaggtgatccagccgccttggcctcccaatgtgctgggattacaggtgttagccactgcgcccggcctatttatttttaatcttgaagtgctaacaccatccctggtgcagaatataagtatgtgatcagtaaatctttcttatgctgatatatattattcaggcagtga

SEQ ID NO: 24026 - DNA, 2242 bp, Homo sapiens
tgaatgatgtaatggcttcgggccagagctccctgtgatcctgcgacaaattttggattggtgttgccataaaacgtccctgcccacacctcaaaaccacacataagccgtcattaatctctccgcttacgagttgtgttgctatctcagattgattcaaaaatatttgggtgtgggtgcatacaaagagttcacaacattgttatatgaactgtagtagatgtttaaaagttaagtaaaagaaaaaaatgagttaatgctgaatatcagagtccagggagatcatactgattcctttgtttacatttagacattctgcgatcaatctttactttttaccttacttttttctcctaaacattttattataatttttttcaaaaatatggcaaagttgagagcattttacagtgagcaatcatctcttccacctactttctaccataaatattttactatactcatttttaaaatcacgcatctatatatccctctgtccatccatcaattcatttgtaacacatttcaaagtaaatctcagatacctgtacactttccctaactacttcagtgtgcacattattaactagagttgattatttatttacaatatttttctttcatgtcaagatttatacataacaaaatgcaaaaatccagtttccattcattgagattttacaaaagcatttatttcttggtctttcattttctcttgtagtctatgcatttatttaattcaatagatgttattaaacacatcccatgtgccaaacatttataatgacacacattaatatgatgtatgctagacagaggagacagtggctaattctcatgttggaagtcagggagttaagcaacagagagagagagagatgttacaaaaagcatttatcactgaatwaacccatgaacaaaattgaaaagaatgagaaaatatggtgtgtttagggcaaaatgcattgtcttttgtagcctgagcctaatgagagtatgcatgtgtaggagggtggtgagtaagagacgtaattattttaaaaattcaaaattcaaaacaacatgtattaaaaagttggcaataaatgaagtgcttcatactatagcactgaacttatgagaaagcctgctcttcttcagctgttccttcttgaaccaaaatgacaaactgacaactcagattttagcctgttttatttcattgataaactgctaaaatttagatttaatgcatgtttgatttctgacttttgaaatttgtttgaaatgtttgaaaattgactacacatttgctcccaaatgtcttaatataaatgtttggaggaaacaaccaagtgagtattctaaagtgtgaaaagatcactatgaaaaatgcttcattatttaaatcaaactataaatgagtttgccacaaactggaaaataaggagaaatattaagactcaaaataaagccttaaaatagtaaaaaaaaaaaaaatgaaaaaaagaaaactttttcttaaatttgtggatttatgactatgaacatgacatggtgcaaaccttgtcatcattcattcattgacccaatatgctctgatgacagatgcataagaggggctgtgtgtgtgtgtttccctaaagaggacactatttttctgactctccaattaactctctgacttctctgtactactcctggtttaggatctcacgtcagacaacattctctacctgcatcattattttatccatctatcctgagtgatttgcacttctgtgataatgactactgtattgtactgctatataatatgtaaaaatttaaaaaaaaattgagggagaaaatgagctttggttatttatttatttatttagagacagagtctcgctctatcacccaggctggagtgcaatggcacaatctcggctcactgcaacctccaccccccgggttcaggcgattctcctgcctcaacctcccgagtagttgggattacaggcatgtgccaccacaccgagctaattttgtatttttagtagagacggggtttctccatgttggtcaggctagtcttgaactcctgaccacaggtgatccagccgccttggcctcccaatgtgctgggattacaggtgttagccactgcgcccggcctatttatttttaatcttgaagtgctaacaccatccctggtgcagaatataagtatgtgatcagtaaatctttcttatgctgatatatattattcaggcagtga

SEQ ID NO: 24027 - DNA, 1226 bp, Homo sapiens
ctcctgctgcattcgtcttgctagattacccgaaaaagacagcttttgcccccgctgatgggcctcccggatcattttttctgccattcaacagcgactctgccacgttttattctccagcagacttttgctatcttctaataattttcttctaaaaaagttcacactcattaaaaaggccatgtctggaaatatataatatatgtgtttcttcggaaaaataggccatctttaaattattatgctgttgatgtaagctggattttattagcatttcacctgtggtttggtgacagacacaagctggcttgaaaactgttgaaatgggattctttgttgattaatttgtttttctttctcatggttctgacacttaggagatatttaaattgcattttacaactttgtgcaaaaccagtccgagtgttagagagctgtgtgggcagaatttagatgtttttaatgacgcagtggcggaagtcatatttgaaattcacagaatcgggctgggcgaggtggcccacgcctgtaatcccagcactttgggaggctgaagtgggtggatcacctgaggtcaggagttcaggaccagcctggccaatatgacgaaaccccgtctctacaaaaaacacaaaaattagccgggtgtggcggtcaacacctgtaatcccagctactcgggaggctgagatgggaggatcacttgaaccygggaggtggaggttgcagtgaactgagatcgcaccactgcactccagcctgggcaaacagagggagactctgtctaagaagaagaagaaaaaaagaaattcacagaatcaaacacacctggaggtggaaggacatcagtggtccagaggaccaatgcctttgttgatggctgttagtgacagactgctgccattgctgatatatggtagatcaacttctgcttggatctctccagtgacaggaaactcactaccttaacatcagccctgaattattcctagtggggcatgttgaacagtgtcacacgggaggtatcgaagcctccatgtgcttcagtttgagctccagagttaagatggcacagcccttgggccatggtacccaggaggctgttggttgtaccagagagaacacatattcacatgcagaggaaagtggcctggcctgaagctacctgacagtgactgggaggtcctgaagcctgccttaagcaacagatatgcaaatgctcagga

SEQ ID NO: 24028 - DNA, 729 bp, Homo sapiens
agtttcagctttctacatagggctagccagttttccaagcactatttattaaatcgggaatcctttccacatttctagtttttgtcaggtttgtcaaagatcagatggttgtagatgtgtggtattatttctgagggctctgttctgttccattggtctatatgtctgttttggtaccagtaccatgctgttttggttactgtagcctwgtagtatagtttgaagtcaggtagcatgaggcctccagctttgttcattgggtttaggattgtcttggcaatgcgggctcttttttggttccatatgaacattaaagtagtcttttgcaactctcatcagcccagtttaatattacctatttattataatgtaatgctgctcacacaactgagaaaacactgttgctttaccccctccagctctgtagcagccaggcacaaatcatagaactataaacatatgctaattacacaacctatgtaggcaatcaatattaagaaaaatttttactgcccaatatttctgtggttgaaaatgtagatactaattttgatctgcagtaacatctaggttaatgttgattcagaaggaaaacgtttgttgttgccgtgagaagaggcattgaaacgctgaatcaccaccacaaatgttaccactattaatataaggagatacataggaagatcgaattagaccatctcggaccaccaggtttacaattccacctgt

SEQ ID NO: 24029 - DNA, 542 bp, Homo sapiens
agccccggaacctcccccagtgatgagtaccaatgccttccaggaaattcgtttctgctggttgaaagtggatttctgttcctaacaacgaaatgagtgcaaacaggggatccttgactccggagaaaatacaagtgaatttccttgtcgaagggtgagcctctagtcttaggcttccgctaactgatttgtcttttcaatttcccagagctgaaggaaaagaggtattttgaccattcctgtgtgaggctggtacaagtggacaattcagtttgtttgggtttgttgagactttcttttcagccacagggtccagtgcccatgatgtgagaggccagtgcgtggttattatagaccagacagctaactggttctggctctgatatatggatttacagccctgaattgaaccgtgcattcaggggcgattagcaaagacayctgttcctatttgtagagctgccgggaaaaagtgctgtttgttagatttgatttaatgcaacggacattctttgtgctccctctgtgcacaccgctccgag

SEQ ID NO: 24030 - DNA, 1605 bp, Homo sapiens
tacttcactggggacccccactgctgatgtgaaccattcacaggcctagaattccacctctgctctgcgcttgagtaccagatgcgtttctggaccatgaacctcatcctctgtatggcagcccatttgcagtggagcaggctaggaatctatgcaatacagaaaccagcgtaactgagggatgacaaaagtgaaggtaatttaaaaatactttaatcatattagaaaaagagctataaactgcaatgtaaagtgctcatacttttgggccaggcattttgcttttgggagtttatcctacaaagactttcatatatgtacgtgaagatgtacattcaagcatttttattgctgtaatgtttataaaagggaaaaccaggaaccaccatcaaaatgtccatttatgtgaagttggtcaaatggtgggacatctataaaacagaacacaatacaaagccattaaagggaatgaagtagcatattgtttggcattatggatcagaagggaaatccgttatattggaccatggaagcaccttgggtttacttagtggaaataaaatgtgctaagttaatgaaattgggagaatgtgggccattcaagggacacatctgaaggcagagstgagataaagagaaggagattacagaatttttatgttcttaggctgcagggtccaaggactctgttgggtttcactagttggagctggcgggggctgatctgataggctctgcttctagctgccctcgttacagcttatgttaaagatctgaagataagacaaaccacatgcaggttcctcaaacgctctctaggagcggagctctggctttctgggaggatcccacttagaggaagagctgggtagtacgtaaagcgtgggtaggtggctgtacagtggacaagtggacaggaaacttggggggctctccaggatgctgttgacatgtttgacattatgattaacgtaagtaaactatgaatttgcagtactacctgtctcattcattctatttggtaggaaacctggactgagtgatggaagaacccattctcctgactgcttctgcaaactgacttggattactaaacattatggagtttctctgccctttattgccaccaagaaaggccaagatcacccaaagcaggtagcataagctgaagggggaacaataaaaataacatcaacaaagacattactatgtagcaggtgctgggttaaactctctgcatgtgttttatcatttgatcctcaccaaagactaaagaaatagagtattattaatagttctccctttttacagacaaggaaaaagatacaaatcgtgagacagatggcaatatactgaagagagtgtgatcacacgtttgtaaataaaaaagtagaacttgatatatacgaagggaaagaacatagtcctctctcaggtgtgtggagagatctgttaaattttttttttcttttttttttttttttttattatactctaagttatagggtacatgtgcacattgtgcaggttagttacatatgtatacatgtgccatgctggtgcgctgcacccactaatgtgtcatctagcattaggtatatctcc

SEQ ID NO: 24031 - DNA, 1605 bp, Homo sapiens
tacttcactggggacccccactgctgatgtgaaccattcacaggcctagaattccacctctgctctgcgcttgagtaccagatgcgtttctggaccatgaacctcatcctctgtatggcagcccatttgcagtggagcaggctaggaatctatgcaatacagaaaccagcgtaactgagggatgacaaaagtgaaggtaatttaaaaatactttaatcatattagaaaaagagctataaactgcaatgtaaagtgctcatacttttgggccaggcattttgcttttgggagtttatcctacaaagactttcatatatgtacgtgaagatgtacattcaagcatttttattgctgtaatgtttataaaagggaaaaccaggaaccaccatcaaaatgtccatttatgtgaagttggtcaaatggtgggacatctataaaacagaacacaatacaaagccattaaagggaatgaagtagcatattgtttggcattatggatcagaagggaaatccgttatattggaccatggaagcaccttgggtttacttagtggaaataaaatgtgctaagttaatgaaattgggagaatgtgggccattcaagggacacatctgaaggcagagcwgagataaagagaaggagattacagaatttttatgttcttaggctgcagggtccaaggactctgttgggtttcactagttggagctggcgggggctgatctgataggctctgcttctagctgccctcgttacagcttatgttaaagatctgaagataagacaaaccacatgcaggttcctcaaacgctctctaggagcggagctctggctttctgggaggatcccacttagaggaagagctgggtagtacgtaaagcgtgggtaggtggctgtacagtggacaagtggacaggaaacttggggggctctccaggatgctgttgacatgtttgacattatgattaacgtaagtaaactatgaatttgcagtactacctgtctcattcattctatttggtaggaaacctggactgagtgatggaagaacccattctcctgactgcttctgcaaactgacttggattactaaacattatggagtttctctgccctttattgccaccaagaaaggccaagatcacccaaagcaggtagcataagctgaagggggaacaataaaaataacatcaacaaagacattactatgtagcaggtgctgggttaaactctctgcatgtgttttatcatttgatcctcaccaaagactaaagaaatagagtattattaatagttctccctttttacagacaaggaaaaagatacaaatcgtgagacagatggcaatatactgaagagagtgtgatcacacgtttgtaaataaaaaagtagaacttgatatatacgaagggaaagaacatagtcctctctcaggtgtgtggagagatctgttaaattttttttttcttttttttttttttttttattatactctaagttatagggtacatgtgcacattgtgcaggttagttacatatgtatacatgtgccatgctggtgcgctgcacccactaatgtgtcatctagcattaggtatatctcc

SEQ ID NO: 24032 - DNA, 1605 bp, Homo sapiens
tacttcactggggacccccactgctgatgtgaaccattcacaggcctagaattccacctctgctctgcgcttgagtaccagatgcgtttctggaccatgaacctcatcctctgtatggcagcccatttgcagtggagcaggctaggaatctatgcaatacagaaaccagcgtaactgagggatgacaaaagtgaaggtaatttaaaaatactttaatcatattagaaaaagagctataaactgcaatgtaaagtgctcatacttttgggccaggcattttgcttttgggagtttatcctacaaagactttcatatatgtacgtgaagatgtacattcaagcatttttattgctgtaatgtttataaaagggaaaaccaggaaccaccatcaaaatgtccatttatgtgaagttggtcaaatggtgggacatctataaaacagaacacaatacaaagccattaaagggaatgaagtagcatattgtttggcattatggatcagaagggaaatccgttatattggaccatggaagcaccttgggtttacttagtggaaataaaatgtgctaagttaatgaaattgggagaatgtgggccattcaagggacacatctgaaggcagagctgagataaagagaaggagattacagaatttttatgttcttaggctgcagggtccaaggactctgttgggtttcactagttggagctggcgggggctgatctgataggctctgcttctagctgccctcgttacagcttatgttaaagatmtgaagataagacaaaccacatgcaggttcctcaaacgctctctaggagcggagctctggctttctgggaggatcccacttagaggaagagctgggtagtacgtaaagcgtgggtaggtggctgtacagtggacaagtggacaggaaacttggggggctctccaggatgctgttgacatgtttgacattatgattaacgtaagtaaactatgaatttgcagtactacctgtctcattcattctatttggtaggaaacctggactgagtgatggaagaacccattctcctgactgcttctgcaaactgacttggattactaaacattatggagtttctctgccctttattgccaccaagaaaggccaagatcacccaaagcaggtagcataagctgaagggggaacaataaaaataacatcaacaaagacattactatgtagcaggtgctgggttaaactctctgcatgtgttttatcatttgatcctcaccaaagactaaagaaatagagtattattaatagttctccctttttacagacaaggaaaaagatacaaatcgtgagacagatggcaatatactgaagagagtgtgatcacacgtttgtaaataaaaaagtagaacttgatatatacgaagggaaagaacatagtcctctctcaggtgtgtggagagatctgttaaattttttttttcttttttttttttttttttattatactctaagttatagggtacatgtgcacattgtgcaggttagttacatatgtatacatgtgccatgctggtgcgctgcacccactaatgtgtcatctagcattaggtatatctcc

SEQ ID NO: 24033 - DNA, 517 bp, Homo sapiens
cacattgactgatatctcatgtgtccctaaaatgcataaaaccaggttataccctgagcacctcgggcacgtgtcatcaggacctcctgaggctgcgttatgggtatgtccttaaccttggcaaaataaacgttctaaattgactgagacctgtcccagatacttttaggttcatagcatcaaaatgttgcactttatttaacctttattacaaagcaggtccacttatctccatcatactgaaaaataacccagatctcagagaggttaaaaactatgcctgatctcacaccatcagaaaatggtggtgcagggatgtaaaggcaggtctgagatcaacacgtgggttttcaaagctaggctagatgtttgccaacccgagatgaatctgttaaatgsctgtctgccagcctgctgtcagatgacaggtcatgtgggaagtaagggtggtatcagggctctatgaaatacggcagctaaaatacatttctgttactgacgttgacttttaagtgtg

SEQ ID NO: 24034 - DNA, 724 bp, Homo sapiens
tgctcaactctcagtctcttacatgctgcagttcagtggtgagtgaaggacagcttgagtgctgaatggcagtcttcataagttgtaaatataccatcagatgtgaaaatgccaccattttatttctgaacttgtaacaatcaatgcaatattatttttctcctaaaaacaaatcattattgggattcctcacatctttcctaattgtaatcaggagttataattgtctcacacttctgaatcaagtgaatcacttcaaattgcacaagaatagctctgctgtgtgaagtaatacaacagtttactcttgtgccattcaatcataatatgaaatagaacatgctattcctctctgaacatgtaacaactagtgcagtcatctgaaaaggcaggtaactccagatcaataaggctggactgtggcctctatgaaaaaagtaatagatagagagacaaagagggagaaagagagtgtgtgtgtatgtgtgcgtgtgtgtgtgtgtgtgtgtgtgtcaatcagaagagagactaattagcctggttcataggaattgatttggggtggagaaggggcaggaaagtgatggtgacagtgcccttcgaaacaacattctttgaaggttgtgaattgattcaaggacaaacctgtcaggttctagtactttcaatcactcaaaacaacaacaactaaatrtcattgtcctggtgcatttatgaaacaagt

SEQ ID NO: 24035 - DNA, 583 bp, Homo sapiens
tccagcagagcataaatgacaaaggcccagagaaacaagcagagatctgccccataggattccagcatttgttaagagtggcttcagtgtaccccctttttgttccttttctgacagggaatttgtaattgcaattattgcaggcagcttgcttcgctgcagtataagtagtagtgaagcgagaaagggaggaaagataacttcttttagttcattgggtgccacgccaagaagagtcacatgatagatctttgcatcatccagagaccccggactctgagctggaatgaagtgactggacaggactttgagttgttttccctgggcagagatgagtgtgtcctatacgtggttctctctttcttggacacacagctaatctaattgctctctagtccgtgcatctaggtgaagccacatgattgagttctggccaatgaagcataagaagagggaagggtatgctggtaagggtttaacaactgaccctccagaaaagacatatgcatatgtayttgaatttatgataaatttgctaatataagggttgcacagcaagttatttataattaataatattata

SEQ ID NO: 24036 - DNA, 552 bp, Homo sapiens
ttatccatacaagtggctgtttgaacaagatcctgtttgaactctaagactactagatatttaggtctgcatctggatacagaatcttatttgaatcaattagcacctaaagctaaaatctgtgctcttttctcagggaaccttctgacaatacttacactaagcacaaggaattagtgggagacactcaatagatcctttaatggaaattaatgaatgtccagcaaaaaatcaatggaatctaccagaaaacagaaatgccttgaaaaactatatttcccagactgaaggattcttaatacttaaacttttttttttctttttttgagacttgagtcgtccaggctggagtgcagtggcgcggtcttggctcactgcaacctccactccctgggttcaagccattctcctacctcagcctcctgagtagctgggmttacagctgccatgccatgttggccaagctggtctcaaactcctgacctcaaatgatccacctgcctcggcctcccaaagtgctgggattacaggtgtgagccaccgcacccggcc

SEQ ID NO: 24037 - DNA, 551 bp, Homo sapiens
gtgggaggactgcttgaggttagcagtttgagaccagcctggccaaaacagtgagactctcatctctacaaaaaaatgtgtaaaaccttaaccaggcatggtggtacgcacctgtcgtcctagctactcaggaggctgaggtgggaggatcacttgagtttgaggcttccgtgagttacgatcaccctactgcactccagcttaggtgacagagcaagaacctgtctcaaaagaaaaaagaaaaaaagaaacaaactattactcttcactgagtactccaaaaagttcttcaaacagtaaaggtgaatgtcacaatttaaagggaatccaggaagggaaaaacagcctaagcagaaaacaaaatcaaaagaaagatgttggacaacttcaaatattatatttaaatctttcaatatgaggcaaaaaaaaaaaaaagytcaaaaataacaaaaatgatatctgaaaggcaaaattttagccatcatatatttttaaaagttctggacacaaaaaatctgatgtatgaaacagaaattgaatcaaatttcttt

SEQ ID NO: 24038 - DNA, 527 bp, Homo sapiens
tttctctctgatgatgtatgctcgagatattttggggcaaggcaataggagtctggagctttgcttactgggtcctcagaaatcttgtgtttctattgttctctgctctacaggcttcactatgtttaggattgtttctgtggctatggcccctctcttcttcccttctctttaggaaatatttattgagttcctagtgccaggaactctgctagccactggttactttgggatggaaaataggaatagttcagccctcacgaagattacaacaagcttttagcctttcacggactgtctcttgtgttttatgtgttactatgcttttatccttagtaagaacgtgatatatacgtatatatacgcgtatacgtatatatgtgtatacgtatatatacgcatatacgtatatatgtgtatacgtatatatacacatatatgtatataygtgtatacatgtatatatgtgtatatatgtatatactatatgtatacacacatatgtacatagatgtgtatatatgtac

SEQ ID NO: 24039 - DNA, 804 bp, Homo sapiens
aaacgtttacgactgaacactgtggtggagggggtaaccctgcctggttgttgactatgttataaagaagaggaggttgagggcacttactagaagccttcgtatttctcttattgccctcagcactgtagagacagtctctcatttcagactgcaaaaacctggtgggtgggaaggcctggcaggagtattcccgttttacagttgagcaaacckaggctaagagagtgacgtccacttgctcagggtcagcagagcagatatctgaactgggatctgactcccaggccccattaagcaccatctctgggatgactgaagagcagccctctcttggttactgggctgtggcttttgtttacagatataaaagcttttttttttttttttttttttttttttaaagacagggtcttgctctgttgcccaagctggagtgcagtggcacaatcatagcttactgcagcctccatcctctgggctcaagtgatccttcccatctcagcctccctagtagctggttatcatgggcatgtgccaccacacctggataattttaacttttttttaggctgggcgcagtggctaacgcctgtaatcccagcactttgggaggccgaggtgggcggatcacaaggtcaggagttcgagaccagcctggccaacatggtgaaaccccatctctactaaataaaaatataaaaattagccgggcatggtggcgtgtgcctgtaatcctagctactcaggaggctgaggcaggagaattgcttaaacccaggaggcagaggttgcagtgagctg

SEQ ID NO: 24040 - DNA, 804 bp, Homo sapiens
aaacgtttacgactgaacactgtggtggagggggtaaccctgcctggttgttgactatgttataaagaagaggaggttgagggcacttactagaagccttcgtatttctcttattgccctcagcactgtagagacagtctctcatttcagactgcaaaaacctggtgggtgggaaggcctggcaggagtattcccgttttacagttgagcaaaccgaggctaagagagtgacgtccacttgctcagggtcagcagagcagatatctgaactgggatctgactcccaggccccattaagcaccatctctgggatgactgaagagcagccctctcttggttactgggctgtggcttttgtttayagatataaaagcttttttttttttttttttttttttttttaaagacagggtcttgctctgttgcccaagctggagtgcagtggcacaatcatagcttactgcagcctccatcctctgggctcaagtgatccttcccatctcagcctccctagtagctggttatcatgggcatgtgccaccacacctggataattttaacttttttttaggctgggcgcagtggctaacgcctgtaatcccagcactttgggaggccgaggtgggcggatcacaaggtcaggagttcgagaccagcctggccaacatggtgaaaccccatctctactaaataaaaatataaaaattagccgggcatggtggcgtgtgcctgtaatcctagctactcaggaggctgaggcaggagaattgcttaaacccaggaggcagaggttgcagtgagctg

SEQ ID NO: 24041 - DNA, 807 bp, Homo sapiens
cggtgctagcctcgggtggactgtgctctaatggacgcagactcggggccgcacagcccagagaaggcagggaaggcttcctgggggagtgagtcctccaggaagctagaggaatgtgctagaacctaccacgaagaaagcaggaaaggcacttcagggagagggaagaacttgtacaatgccccagaggtgggaggcggccttgtgacatttcaaaagagcataactccagtcacagagcggccgacactttaagggctggtggagattaaagtctcagcagggggagaggcgggctgccgtgctgggactctgccaccacttgaagagtggtttgccccagccaagaaggttcaggcctggcctcagaggtcctcctgggccttcctgttcttctgcttctggtgccactgttgtatcttgctggggagcgtctctgaccagaactgcatccaggcctccctgaacttctgtccggcycgtggcactgggttgatctccagatattgttccgcctggttgaattggggccaaggaggcagagccttgctattggggtccctgggtgggaggaatgaatgaggaccaaggcttcctgtgctgtcccccagaggggccgacctgagcatcccaggcccaaagcgagctatgccctgtcactcactcaccctgtccgggcaaagtgggtccactgggccatcatggtgaggcttagctgcttctcctcctctgtggcctctggaaaggctggaaaggtgagagggacagaactgaacgagagtcaggtgggacctggaagggacccaa

SEQ ID NO: 24042 - DNA, 617 bp, Homo sapiens
agagatgatggggactacgtgactctggtctttcctgccctagttcaggacagcttgttccttaactggaggaaaccaggaaarcagcccagaagctgcaggtgagcccatccctgggtgaggactgctgagtccgcgggggtgagaggcagagctgggatttgaagccaaggccatctgcccttgagcctgaggccaccacggccccgtcctgccctgcactgcccaccaatcaggagttagattcaaccacacttctagcattttccatcagaaggccatcattctaaagtttcatggactcccaaaaggtaatagctctctctgggaatcagctgactgaaagcacccgcagcaacaaaaagcgactttaaccttagtgattgggctggtggattttcgtttcgtgacaggcagcagcagcctgtgcattccacagcagacgtgtgtgtgtgagtgttggccacagctgggccttaaactcaactgcacatttcaccaagaaccagacatgctccttattccattacatggtgagaatgctgctctagtgtggatttttttttttttttggagacggattctcgagctgtcacccagactggagtgcagtggca

SEQ ID NO: 24043 - DNA, 617 bp, Homo sapiens
agagatgatggggactacgtgactctggtctttcctgccctagttcaggacagcttgttccttaactggaggaaaccaggaaaacagcccagaagctgcaggtgagcccatccctgggtgaggactgctgagtccgcgggggtgagaggcagagctgggatttgaagccaaggccatctgcccttgagcctgaggccaccacggccccgtcctgccctgcactgcccaccaatcaggagttagattcaaccacacttctagcattttccatcagaaggccatcattctaaagtttcatggactcccaaaaggtaatagctctctctgggaatcagctgactgaaagcacccgcagcaacaaaaagcgactttaaccttagtgattgggctggtggattttcgtttygtgacaggcagcagcagcctgtgcattccacagcagacgtgtgtgtgtgagtgttggccacagctgggccttaaactcaactgcacatttcaccaagaaccagacatgctccttattccattacatggtgagaatgctgctctagtgtggatttttttttttttttggagacggattctcgagctgtcacccagactggagtgcagtggca

SEQ ID NO: 24044 - DNA, 419 bp, Homo sapiens
tctgaggctctgttctgttccattggtctatatgtctgtttcggtagcagtacaggctgtttggttactgtagccttgtagtatagtttgaagtcaggtagcatgatgcctccagctttgttcattgggcttaggattgtcttggcaatgtgggctcttttttggttccatatgaacattaaagtagtcttttgcaactctcatcagcccagtttaatattacctatttattataatgtaatgctgctcggacaactgagaaaatactgttgctttaccccctccagctctgtagcagccacgcagaaatcatagaamtgtaaacatatgctaattacacaacctatgtaggcaatcaatattaagaaaaatttttactgctcggtatttctgtggttgaaaatgtagagtctaatttt

SEQ ID NO: 24045 - DNA, 550 bp, Homo sapiens
aatgaagttcacatagtgcttctaccaccatcataatggttacttccaattcattcccctgaaaacgcattcagaaaagttagtcacccaataccattaaaacataaatccctataaaatttacaactgatcacagtctgtgcctgcttaaagccaaatgtatttaacaattattttcacaattttcacattatttagctcagaattctttaaaatgttacatataaaatagccacaaagggtgactaacagaaccttagcagcacatggatgtttgcacccccaccccaaagttacccaaacatttaacctgtgacctctgtaggaataacacatggagtaaaaagaaagcaaaaattaaatataaataaacaggaattaaagaatgattaacttcatgtgtttgaatactgcttgacattacctgaattgctaaacattttgttatttttggattccagttatttattgtgagcccactttcaagccaggaattactcaagcatttgtcataygttataaaaacaatttctcctggccaggtgcagtg

SEQ ID NO: 24046 - DNA, 520 bp, Homo sapiens
tgtgatgtgtttttttctccgtttgggaatttctaatcccaggcactcctcagtctcattgtttcattacctatgaggtttcatttacttctttgtaaatgtactgacttttggagttacttaagaaccacagttcctaaaacattttatttgggagctcaacttctggcttcctacttaccaagaggcagtaagttataacctctggcctttgtctttacattttcaactttctggatccctaacctctggtcccaagttactacscttgcctatatccactaaccactcactaggtcacaaagttgatggctctggcttgacccagtgaatgagaagtgtcctagatgttttgtttttattttttttttcgcaaatcttcataggcacagttgcctgtttaattttttcttcagcccttcccttagaggagggagccttaagttacctttcaaggttgggggttaggaatctatcataactagtctagagatttctcaccaagggaaattttccttat

SEQ ID NO: 24047 - DNA, 520 bp, Homo sapiens
tgtgatgtgtttttttctccgtttgggaatttctaatcccaggcactcctcagtctcattgtttcattacctatgaggtttcatttacttctttgtaaatgtactgacttttggagttacttaagaaccacagttcctaaaacattttatttgggagctcaacttctggcttcctacttaccaagaggcagtaagttataacctctggcctttgtctttacattttcaactttctggatccctaacctctggtcccaagttactacccttgcctatatccactaaccactcactaggtcacaaagttgatggctctggcttgacccagtgaatgagaagtgtcctagatgttttktttttattttttttttcgcaaatcttcataggcacagttgcctgtttaattttttcttcagcccttcccttagaggagggagccttaagttacctttcaaggttgggggttaggaatctatcataactagtctagagatttctcaccaagggaaattttccttat

SEQ ID NO: 24048 - DNA, 520 bp, Homo sapiens
tgtgatgtgtttttttctccgtttgggaatttctaatcccaggcactcctcagtctcattgtttcattacctatgaggtttcatttacttctttgtaaatgtactgacttttggagttacttaagaaccacagttcctaaaacattttatttgggagctcaacttctggcttcctacttaccaagaggcagtaagttataacctctggcctttgtctttacattttcaactttctggatccctaacctctggtcccaagttactacccttgcctatatccactaaccactcactaggtcacaaagttgatggctctggcttgacccagtgaatgagaagtgtcctagatgttttgtttttwttttttttttcgcaaatcttcataggcacagttgcctgtttaattttttcttcagcccttcccttagaggagggagccttaagttacctttcaaggttgggggttaggaatctatcataactagtctagagatttctcaccaagggaaattttccttat

SEQ ID NO: 24049 - DNA, 448 bp, Homo sapiens
ggacagtcactgcacaagctgggcctgtccgcccaaggtggctaagggccttgtgcaggctgtgcctcccacgctcaggtcagtctattgccacagtcctctcctaaagcacttttacaggccctgactcactgtccctcatggcagtttcttatttctgggattagctggtttaaaaaaaaaaaaatagcttctgggcatgtgacastattctcgggcctttaatgtcagaaataatgatggcgttaaattggagctcattaccacggaatgagacctcattgagccctcttttgggggggttgtttaatgattttttttaaaacctcctcagtaactctgacatggtacaccagggggagaagtgggtgtttggagaagcaaatttttaaataataagaaagatctcctttcattgatgaaagaaaagggtccatcctccattgtt

SEQ ID NO: 24050 - DNA, 710 bp, Homo sapiens
  misc_feature (1)...(710): n = A,T,C or G
cnnnnnnnnnnnnnnnnnnnnnnnnnnnnnnnnnnnnnnnnnnnnnnnnnnnnnnnnnnnnnnnnnnnnnnnnnnnnnnnnnnnnnnnnnnnnnnnnnnnnttgaagaggtccttcacttcccttgtaagttggattcctgggtatttagcatcaactcttagaaaagaagaaaagctgttktctgaaagcaaaaatagaagtatccaccaaggccaggcatggtgcctcacacctgtaatcctagcactttgagttatttatttttttgagtctgagtctcgctctgttgtccaggctagagtgcagtggggtgatctcagctcactgcggcctccgcctcccaggttctagcaattatcctgcctcagcctcctgagcagctgggattacaggcgtgagccaccacacctggcctatcccagcactttgggaggctgaggcaggcagatcacctgaggccaggagttcaagaccagcatggccaacatggcaaaaccccatccctactagaaatacaaaaaattagctgggcatagtggcgcacgcctataatcccagctgctcggaaggctgaggcacgagaatcacttgaacccaggaggtggaggttgcagtgagctgagatcgtgccattgcactccagcctgggcaacagagtaggactgtgtctcaaataataataataaattttagaaaaagaaaaaaaag

SEQ ID NO: 24051 - DNA, 1211 bp, Homo sapiens
ttggtcacctgggtccagaacgtgccctgggaaatggctgtgtgtttaaattttgatagagaaggaatgggttagttaagagtggccatatatatagctcagacatatctggatgtaaaggccttttgattcaacttagaaaaaggaaatcaaattgcttggaagaacatgtgccaacgtttttctttccagaatactggaaagcaactggagccttgggctcaatgtactgccatgaattagactcaaacttccagaacatcattactcttatgtgacagtcttgaccaatttggattgtagctgtttttaattaggctgacagtggcgagaaggcaatccacctcatggagaggctttctctttagaatgtgcatatctatcacctgtgaatgccatagaattcagaaattctccaagcttttgtttttcactctagatttgcaaagtacagtatatactttcatctccatcacacaagggaggacatgacaggttgtatccatctgaagatacttaaaggcagctcacagttctctgtataaataatggaaataaggaaggacaatgggattgtgaacttcccactattataagcactttgtggactaaggctgcacagtcttttgtgttgacataggacayagtctggctaccaaagtccttttatgcatctcctggaaccaaattctagtgaaactgaactattgttaataaatatatctttaatttctctgatactctgcatttattaaaacgtatttatctatgtcaaatttatgtggcatatatataattcaaattttaccaattagtagtcaacccttaggtgaagaaatttttgatacttatatcaaatatttgttgagtacttatgatgtgtcagttactgagttaagtatgaaggataaagcaatgaaggcagaagttcctttagttcagggagcttacagtccagatgtgcaaaacattaacagatacttactattaaaggcaatttagacaaaattaaacacgatacaaaatgacaagtatttaagccaaagtaaatttcctctaggtcttatgattgccaaccttcttgataaatttggtccacataatttataatattctaagttaaaataattactagtttgatattaaccaactatctaaatgctttattactatatgacttagctcctgtctaagaactcaatcttctgcca

SEQ ID NO: 24052 - DNA, 1211 bp, Homo sapiens
ttggtcacctgggtccagaacgtgccctgggaaatggctgtgtgtttaaattttgatagagaaggaatgggttagttaagagtggccatatatatagctcagacatatctggatgtaaaggccttttgattcaacttagaaaaaggaaatcaaattgcttggaagaacatgtgccaacgtttttctttccagaatactggaaagcaactggagccttgggctcaatgtactgccatgaattagactcaaacttccagaacatcattactcttatgtgacagtcttgaccaatttggattgtagctgtttttaattaggctgacagtggcgagaaggcaatccacctcatggagaggctttctctttagaatgtgcatatctatcacctgtgaatgccatagaattcagaaattctccaagcttttgtttttcactctagatttgcaaagtacagtatatactttcatctccatcacacaagggaggacatgacaggttgtatccatctgaagatacttaaaggcagctcacagttctctgtataaataatggaaataaggaaggacaatgggattgtgaacttcccactattataagcactttgtggactaaggctgcacagtcttttgtgttgacataggacatagtctggctaccaaagtccttttatgcatctcctggaaccaaattctagtgaaactgaactattgttaataaatatatctttaatttctctgatactctgcatttattaaaacgtatttatctatgtcaaatttatgtggcatatatataattcaaattttaccaattagtagtcaacccttaggtgaagaaatttttgatacttatatcaaatatttgttgagyacttatgatgtgtcagttactgagttaagtatgaaggataaagcaatgaaggcagaagttcctttagttcagggagcttacagtccagatgtgcaaaacattaacagatacttactattaaaggcaatttagacaaaattaaacacgatacaaaatgacaagtatttaagccaaagtaaatttcctctaggtcttatgattgccaaccttcttgataaatttggtccacataatttataatattctaagttaaaataattactagtttgatattaaccaactatctaaatgctttattactatatgacttagctcctgtctaagaactcaatcttctgcca

SEQ ID NO: 24053 - DNA, 546 bp, Homo sapiens
gaaaaatcactaaaaccaaaagctggttctttgaaaaagtaaactgataaacatctagcaagactgacaagaaagagaaacaaataatcaatatyagtaatgaaagaaaggttatcaccacagaccacatagacactacaaaaaatttaagagaacactaccaacaactctacacacataaatttaacaattttcaagaaatgaactagttcctgagaagccataaaccaaaaaatactcactaagaatgaaagaaaactttatagtcctacaattactaaataaattgaattaatacttaagaagtcagttttattttcaaagtttttgcagaagtaatcagaacggtttcctgtgtgtagtaccctgtggcctacctgggaactttagagtggtctatcctgttggtcattttttaaaggctaatgaatactgcttagggtcagaatcatgcaagaagggctcataggtgatcccagaagttcataaacaaatatatgatgtctcctttttgaattcctctctcttcatctcttctgtacttta

SEQ ID NO: 24054 - DNA, 543 bp, Homo sapiens
gtttcactccttctcccacccagaaacttygctgcatcttcctggatccctagctccttgcacccatgatcctgtctccttcctcagcccggcttctggctgagcagcctgcacttgctgtcttcactcctacacgctgcccccactcctacacgctgcccctgcgtgcttctcacttctctacccttccagccctgcactctggggacctgtgcgtatgtttgtgtgattatcaatctgttgaacccaggaggtcgaggctgcagtgaggcataatcacgccactgcactccagcctgggtaatagagcaagatcctgtctttaaaataataattatgattgggtatggtggcacacatctgtagtcccagctactcgggaggctgaggcacaagaattgcttgagacccagaggcggaggttggagtgagctaggatggtgccactgcattccagcctgggcggcagagtgagactgtctcaaaaaaaaaaaaaaaaatcagtcacttgctggtcttttaatatacatatacgatttactg

SEQ ID NO: 24055 - DNA, 501 bp, Homo sapiens
tatgcctttacgtcattgatggttatttgaaaatgcacctttttaacactgcaatgacattagttgctgttctgtggcacacactagaaatgatagactgttgtgatgatatggtttaaagacaaatgtaaaaatccactgtcaatagactttaagcctgtggggaaaagtaagtatctgaaaccttggaataaaagggatttttaagtgaagccccttatatattgaggaaagggctcaacctcttgagtcaggtggacccaggttcacaggtcatttcagctgttatgtgacctcagttttctcatctgtaaaatggggttggtaactatctctgacagtagggttatgataattatgaataatatacacaaagcttctagcacagtgtccctcacatgacaggtgctatctctgctgggtgtcatcacatgcaggcttggggttcagttcgtaactgatccattattcatttatttcaaggcccagttckgtattcca

SEQ ID NO: 24056 - DNA, 1506 bp, Homo sapiens
aatgtggtttggggctgttacagcctgaattcctcgactttcccttttgggctcacatgagaattgttaggagaatgtgcatgtggagtgcgggcccagcacctgctaccgtctgcgctgtaatggtggctgctcctaagagtcctcagtctcctccccgttgggcttgtgtgtacagccttatcggttgtcattcttcggatccattctcagtttatttttctggtattagctggagggacatctccttaagcctgtactctatggctcaggagtctcaaaaccagtccattttgaagtgagagtatccctaataaaaaggtgagtgtccccactcctgtgccttgttttttttgtttgtttttttttttgagacggagtctcgctctgtcgcccaggctggagtgcattggcggtatcttgtctcactgcaacttctgcctcccgggttcaagtgattctcctgcctcagcctcctgagtagctgggactacaggcacccgccaccatgcccagctaattgtttgtatttttagtagagactgggtttcaccatgttagccaggatggtctccatctcctgacctcacgatccgcccacctcggcctcccaaagtgctgggattataggcgtgagccaccacacccagccactcctgtgccttttgaacctgatttttacatctagctgactcctccctccgtccctttccctctttctttcttcytgatctgatggtgctagatttttgttttcccatttgtctttgttttatgaagatgtgctcctttccatttgtgtatgttgagtacagacataatcatgcccttgcttgcttttttttttttttttttttttttgagacagtcttgctctgttgcccaggctggaatgcagtggtgcgatctgggttcactgcagcctctacctcccagattcaagcgattctcctgcctcagtctctcaagtagctgggattacaggtgcctgctaccacgcccagctaatttttttgtatttttagtagaaacggggtttcaccatgttagtcaggctggtgtggaactcctcacctcaggtgatccacctaccttggcctcccaaagtgctgggattacaggcatgagccactgcccccagcatccctactcattctttgaaaaaaacaatttgttgttgttttgtagagacagggatttgctgtgtttcccaggctggtcttgaactcctggcctcaagggatcccttctgcttcagcttcctaaagtactgggattacaggtgtgagccaccgcgcctagcctccctattcattctgcaagtatcagtctttttacttttgataggacatgttgaagttttggttaaaaatagaagaggatttgaaaatgaagttcaattctagaggttttcgagattcctgcccaatataaaaaacttctgatacattaaaacaatttttttatacttcattttttagagcagttttaggttcacagcaaaat

SEQ ID NO: 24057 - DNA, 780 bp, Homo sapiens
atggcttcaggcttggctgggtctaggagctctaatggggtggccttgatgctgtccctcctcatgccttaactgctttcttttgcaatggccgtattcactgatgggctttcgctgggttgtggccaagctgaaaacagtagcctcaggcttttgcctcaccactggagcaatcccagtagcgcaaactgcacccctttcctagtaatgtctgcaaatgtcccagggctgacctgcatgggccsagcttgtgccctgaatgatcaccatgattctgattggccaggtctcatcattgtgtctcaaggtaagcgggggatcagccctacctgaacctcagtgactcttaaggtagaatggtgctttgcaaaggaaaatccagctgggcatgcaaaaacagcagatgcctaccagagggtgtgaggcaggagcactgagacttggattcttgcaggttctaagggaagccagagagacagaatagaggtttctgtctcaccagcagagacagtgaacaaaaccaaaaaaccgttcccctccatccttttgtggttcctaagtgtgatgattgggttttcatactcatgtgtgaaatgtacctccctcaagccttgttatgatgtggcgggcacattacccttacccatctgatgaaaagaaaaggaaaaacaaaaacttggaaatcagttataggcagcggttatggggtgaattcaaggtcttgttgcgatctgatggagaaagacaggtgtgaaaaggacaggaaaataaaaaggaagg

SEQ ID NO: 24058 - DNA, 780 bp, Homo sapiens
atggcttcaggcttggctgggtctaggagctctaatggggtggccttgatgctgtccctcctcatgccttaactgctttcttttgcaatggccgtattcactgatgggctttcgctgggttgtggccaagctgaaaacagtagcctcaggcttttgcctcaccactggagcaatcccagtagcgcaaactgcacccctttcctagtaatgtctgcaaatgtcccagggctgacctgcatgggccgagcttgtgccctgaatgatcaccatgattctgattggccaggtctcatcattgtgtctcaaggtaagcgggggatcagccctacctgaacctcagtgactcttaaggtagaatggtgctttgcaaaggaaaatccagctgggcatgcaaaaacagcagatgcctaccagagggtgtgaggcaggagcactgagacttggattcttgcaggttctaagggaagccagagagacagaatagaggtttctgtctcaccagcagagacagtgaacaaaaccaaaaaaccgttcccctccatccttttgtggttcctaagtgtgatgattgggttttcatactcatgtgtgaaatgtacctccctcaagccttgttatgatgtggcgggcacattacccttacccatctgatgaaaagaaaaggaaaaacaaaaacttggaaatcagttataggcagcggttatggggtgaattcaaggtcttgttgcgatctgatggagaaagacaggtgtgaaarggacaggaaaataaaaaggaagg

SEQ ID NO: 24059 - DNA, 752 bp, Homo sapiens
tgggctgagttctttcttgttggccagagcaggcctgagctcccagattggagggagggaagccagatatggttcagcaaggtgactgaaatctctcttctgattctggtgtgtgtgtgtgtgtgtgcacgtgtgcgtgcgcatatgcacacacaggtgtgcaygtgtgagaataagaaagagggacagaattggagacagaggcacagggagatagagatagcacagacaaacagcacgagaaggtagaaagagagagaccgagagacagagaaagagacgcccacacacagagatagatatagacggagagggactgcagatctgtatacagaaaggatggaggaacaattggcgtgggtgttaaagctgaggcctctgcttgctggtagaagagctagaataattaatggtcaggccaagaaggggcacaagggcgctgctgcagtgcccagggtcctcagctgggcatgctctacttgtctgagaagggcctggtgggccaagagcaggcaacttaggctactgtagccagccataccagtgggggaagtgcacggggctacgtggaagctgggcccggtgggtcctgaccattggccacctttaccctggcaccccgggagtctgtgtcacattgaaatgaatggcatgtgttgagtaaccactatctaagagggcattttaggtggatgaactcattctatctcatttaatttaaaggcagaatataatagttgttgcaggctgaa

SEQ ID NO: 24060 - DNA, 752 bp, Homo sapiens
tgggctgagttctttcttgttggccagagcaggcctgagctcccagattggagggagggaagccagatatggttcagcaaggtgactgaaatctctcttctgattctggtgtgtgtgtgtgtgtgtgcacgtgtgcgtgcgcatatgcacacacaggtgtgcacgtgtgagaataagaaagagggacagaattggagacagaggcacagggagatagagatagcacagacaaacagcacgagaaggtagaaagagagagaccgagagacagagaaagagacgcccacacacagagatagatatagacggagagggactgcagatctgtatacagaaaggatggaggaacaattggcgtgggtgttaaagctgaggcctctgcttgctggtagaagagctagaataattaatggtcaggccaagaaggggcacaagggcgctgctgcagtgcccagggtcctcagctgggcatgctctacttgtctgagaagggcctggtgggccaagagcaggcaacttaggctacygtagccagccataccagtgggggaagtgcacggggctacgtggaagctgggcccggtgggtcctgaccattggccacctttaccctggcaccccgggagtctgtgtcacattgaaatgaatggcatgtgttgagtaaccactatctaagagggcattttaggtggatgaactcattctatctcatttaatttaaaggcagaatataatagttgttgcaggctgaa

SEQ ID NO: 24061 - DNA, 1519 bp, Homo sapiens
gctcacttcccaaactgtgtgaactaaatgtattaatataacattgcagtgagtgcatttgcctcttattcctcatctttgcagaagttctgggaaaggggggggatttgctgactcggcaccttctgcatacctaattacctggggaattttgcgttagaaaacacttaacaccggcattacaagagaagcacagaaccccggacttgaaaggatctcagccattttgatttgtagcctcatcctaagatacatgtcataacagacattcaatgctcatgtgtcgctgcacggtaaactctttggaaaaaggtcagaaagttttcttttgtaaacaaaacattcacctgccctacaatcaaacaattccattcctaaatatttacccaagagaaatgaaaacgtgtctatacagacatggatacaaatgttcttcctagctttattcataatagtttcaagttggaaactaaccaagtctccaccaacagcagaagaaatttaaggtggtatattcagacaacagaatacacacagcaatgaaaagaaatgaactgctgataaatgcaacgacatggatgaatctcagaaacattatgccaagtgatagaggccagatcccaacagtacatagtgtatgatttcattggaatggagtctcagacaaacagaacagatcttgggtgaaaaatgtcaaaatacgtacctttatgatacatgtaccaatatgatacatgtagcaatacgtgtaccaataggatccatggtgggctgttcagttgaagctggggccctggagggaaggcagccaccgtcagagatgggcccaraaacactgtggcttttctcttcctcctgcccttcaatcattgctgacctctccactgaccagaccagcttgccctgggagcctgggagatgcaggccgcagtcacatggtcagtgatcaagctgagaggcaaacctaggtctcccttgctcctaagctaacgttgccagattgaacaaaaacacaggatgtacagttatttgaatttcagataaacaacaaatgatttttttagggtatatcttttgcaatatttgggacatagtttaccctaaaaaaattatttcttatctgaattttatctggtaaccctattaaactctttcagcaaaagactttgtttttattttttaaattattatttttgagacagggtctcactctgttgcccaggctggagtatagtggcacaagcacggcttactgcagcctccacctcctgggctcaagtgatcctcccacctcagccttctgagtaactaagatcacaggtgcacaccaccacacctagataattttttttttttttggtagagaagggatctccctattttgcccaggctggtctcgaactccggggcccaagtgatcctcctgccttggcctcccaaagtgctgggattacaggcgtcagccactgtgtctggcctctttcagtgaaaaactctactgacactgaggccactgtca

SEQ ID NO: 24062 - DNA, 738 bp, Homo sapiens
tacacaatttcttgcttttgttcttttttttgagacggagtctcgctctgtgcccaggctggagtgcagtggcatgatctcggctccctgcaacctccgcctcccgggttcacaccattctcctgcctcagcctccgtagtagctgggactacaggcacctgccaccatgcccggctcattttttttgtatttttagtagagacggggtttcaccgtgttagccagggtggtctcgatctcctgacctcgtgatctgccygcctcggcctcccaaagtgctgggattacaggcgtgagccaccgcgcccggcctccatacaatttcagaacaatttcagaaagttcatggactgactacgagacctcatctatgcagtctgagctaaacgctcctacttccagaatcgaaggtcgctggtagaagttaaaatagtttaaatgggttcttcaaaagtaagctggtttccctgcttcaaagcaaatgaaaaggtagccccctgctgttccactgttatccagtgagctttggagtgttaaggattatgcttcggagtataagggattagaaaacgctgccgtgagaatgagaggcaataaactcagacttcagctaagcgacttcccagtctagctcgtttcttagaatgcctcgcagggatgtctgcaaatgtgttaccatttaggaaaaacagaaatggcacaaaacccaaaaggtacatgaaaaagtcaaacaaagg

SEQ ID NO: 24063 - DNA, 864 bp, Homo sapiens
ataaagaatattatctactgatttgtcctgccatgttttgttattctgagggaaaaataccttaccccatgggaagaatagggcataaaatcctctatgtgttgggaagtttaccctaggcctacattttacgttgattaaatttcattctattacttcatcactcaggatactacactaaacttttcttctcctttgtttataccttgaagrcatttattggctattatcatggctccctagctaccttggttgttgtttgggcaggcagtttattctaaatgtttatttttatacttatctctttagttctgcccttattattttatattgtttttccatctttggcttatgtctacctaatgtcaggctttgttccataaggcttaagagagttctttgagccatttgggctgctataacaaaatgccacagattgggtggtttataaacaacagatgtttacttctcacacttctggagactggcaagttcctgatcaaggtgccagcagattgagtgtctggtgagatcctgctttctggttcatagatgtgtcttcttatgttcttatgtggcacaagggttggggaagctctctggggtctcttctgtaagggcactagtcccattcatgagagttccaccttcaagacccagtcatctcccaaaggcctagcaccatccccttggtgattaggtttcaacatctgaattctgcggggactcaaacattcagcccatagtaacttcctttcgttttcctgtttcttaaggtagaaattactacaagggaccaagagcaatgttgtcacagggaaggataaattaggacattcacctggagtcttttaccttaggggg

SEQ ID NO: 24064 - DNA, 864 bp, Homo sapiens
ataaagaatattatctactgatttgtcctgccatgttttgttattctgagggaaaaataccttaccccatgggaagaatagggcataaaatcctctatgtgttgggaagtttaccctaggcctacattttacgttgattaaatttcattctattacttcatcactcaggatactacactaaacttttcttctcctttgtttataccttgaaggcatttattggctattatcatggctccctagctaccttggttgttgtttgggcaggcagtttattctaaatgtttatttttatacttatctctttagttctgcccttattattttatattgtttttccatctttggcttatgtctacctaatgtcaggctttgttccataaggcttaagagagttctttgagccatttgggctgctataacaaaatgccacagattgggtggtttataaacaacagatgtttacttctcacacttctggagactggcaagttcctgatcaaggtgccagcagattsagtgtctggtgagatcctgctttctggttcatagatgtgtcttcttatgttcttatgtggcacaagggttggggaagctctctggggtctcttctgtaagggcactagtcccattcatgagagttccaccttcaagacccagtcatctcccaaaggcctagcaccatccccttggtgattaggtttcaacatctgaattctgcggggactcaaacattcagcccatagtaacttcctttcgttttcctgtttcttaaggtagaaattactacaagggaccaagagcaatgttgtcacagggaaggataaattaggacattcacctggagtcttttaccttaggggg

SEQ ID NO: 24065 - DNA, 545 bp, Homo sapiens
ccttgccctaggccattgccgggcagagccgtggcctccccacagggtagcccaaggcyccttcctacgtcaaacatggcccccagagaaaccgaggcttccctgaaaattccccatcccccagccccactgccacggtaccaactaggatcccctcgggaacaggggatcagctgatccagagaattagctcaaggtggctggtgcttggaggactgtgagggaatgtggtggagatcgcatttgtggcttctttgggatggaaggagtgagggaggagccggcagtagggtgggcagcagacgcactccgaagctccttgcggaaggcgcaccgagcccagagcgagaggatggggcctaggttctgtgtctgtacccagtcgcctccctgggcctcttttgcctactgctctcatggggtactgtctccgcccccagggctagaccccttgaagaaggcgggagtgagcttccaggtaggggtgcaggtggttgccagcagcatagactggcagtggaagagtctgcagccaagaaggacct

SEQ ID NO: 24066 - DNA, 545 bp, Homo sapiens
ccttgccctaggccattgccgggcagagccgtggcctccccacagggtagcccaaggctccttcctacstcaaacatggcccccagagaaaccgaggcttccctgaaaattccccatcccccagccccactgccacggtaccaactaggatcccctcgggaacaggggatcagctgatccagagaattagctcaaggtggctggtgcttggaggactgtgagggaatgtggtggagatcgcatttgtggcttctttgggatggaaggagtgagggaggagccggcagtagggtgggcagcagacgcactccgaagctccttgcggaaggcgcaccgagcccagagcgagaggatggggcctaggttctgtgtctgtacccagtcgcctccctgggcctcttttgcctactgctctcatggggtactgtctccgcccccagggctagaccccttgaagaaggcgggagtgagcttccaggtaggggtgcaggtggttgccagcagcatagactggcagtggaagagtctgcagccaagaaggacct

SEQ ID NO: 24067 - DNA, 1169 bp, Homo sapiens
gaattttttgagattgtaaatatcaaaggagttagattgtgttctgacatggttgtagactttcacctggattattgatattctacctctaataaatttttaataggctgtatgagtttttttttttaatggacttaagaaaacagttttaggtgttcaggaaaatagaggagaaactacagcgttcgcatatactccacacaccccactcccagtttttccagctatgaacatcttttattaggatggtacatttgataaaccaacattacattcttattaactaaagtttagtttacattaggctttattccttctcttatacattctgtggattttgccaaatgcataataacatgtatccaccactacagtatcgtccagaatagcttcactgccctaaaaatcctctgggttccccttattcacccctccccaccaaccctgacagtcactgatctttcttttcagttttgccttttccagaatatcatatagcttggatcatacagtaatgtaattttttcagactggcttctttcatgtactatgcatataagattcctccatatctttttttttttttcttttttaagacaatctcagtcttcgcccaggctggagtgcaagggcacaatcacagctcaccacagcctcaacctctcaggctcaggatcctcccatctcagcctctcaggtagcaggactacaggtgcrcatcaccttgcctggttaattttttgtatttttgtagagacaaggttttgccatgttgcccaggctggtctcaaactcctgggctcaagcaatcttcccatcttggcctcccaaagtgctgggattacaggtgtgagccattgtgtctggactcctccaggtctttttgcagcttgttagcttttttttttttttttttttttcaataaatgcccgtgcttattacaagatagaaacatgaagaattccttaggtactgtttttttttttttttttttttttgagacagagtctaaccctgtcacccaggctggagtgcagtggtgtgatctctgctcactgcaacctctgcctcccgggttcaagcgattctcccgcctcagcctcctgagtagctgggattacagatgtgtgccaccacacccagctaatttatttatttatttattttg

SEQ ID NO: 24068 - DNA, 1693 bp, Homo sapiens
  misc_feature (1)...(1693): n = A,T,C or G
tattaatgccaggcaaaattgacaaaatattttaagataaaaattattattagggcaaagaaggatattttataattataaaagtgtcagttaatcaagaagatataaaaataattaaagtgtatgtacctaacaacacagccccaaaatgcatgaagcaaaaatacaccgaattaaaggaagagactattcaaacttaatagttggacgcttcaataaaaaggagaatagaaaaacaatctgccagggtcatgatagtgccagctctcaaatctgggtctagggtaaaagagaaataaaactaaaacctgtccgaaaaaaattcaatcacagtgaacctgactgggaaaggagtagaagagagggaagagccagtatccaggcagctggggaacccaaaacaattccccttagggctactccctccctggtatctcctgatgtctgacctgaccctcccctccattaagaatagatgtcactttcctccgttctcctccactctcctccactcactgctacttctcccactccacatcaacaaactgagtcccaaaagcttcttaaatatcagccctatggcgctcagagctcggaaatgctgaaagtccttcagtaccagatgccaacttagagaggacaaaggagtaggaaagactgagcagtgacccctacatccatgtgccactatcctatagcacatttgagactattctgaagagcaagttaaactcacataaaatagaaatttttatcctaaaaaatatttcatatgaaacatttatggaactgaaaaagtactatacttcaatctggagcaaaatgactttggctctcactctgaaaataaatgtttaaatcatacttgatggaacaaagtcagctgaaactatgcacattggattcaccaggagacatgtgtacacagtgggctgcctctcctacataaaaaggtcttcatggatatacaatgggtcctcatagaaactgantnntttgccacagatttggggaactgagagcttttttcttcctccaggagggcacaacttccttctattttccagttttgtgctctacctctttaattttacttaaaaagaatgaccctgaaaaacacattagtaattactagatgccrgaaaatgatccttctagcataaaattggaacatggaactattttatcagtgttaactagacctgaattatcaaatttcaaacaatattataataccaaaagctgattttagattatattacagctcatttcatagagcaccaaggaagtggaagaaaatataaatgtgcttcttaacctgtgtgacaaacctacctcaatgattcaagtgaaagttgtggattcacatgttcgaggcacataaaaaaataatcttgtatgttttaatatctaactcaaggactatcatccagcatctctcatgctgtgctcattcacacactacagaaaggtaactcctctttggcagagctatgaagtatatctaaattaaacaggctaatcaagtgactggattatgtgtaaacctcctcaaataaaatagtataaaaaaatatatcatggtagagtttattattgtcacattatcatagtaaccactaggaatttagtcagttaaaaatatgtcaaaacccagcctacaaaatgggaaaaaatatttgcaaactatgca

SEQ ID NO: 24069 - DNA, 566 bp, Homo sapiens
taaagtcatstagttatatacaccaattctcaacagacacagttttttttggaaaggcatattaaacagactaagatgtgtactacccattagccaaagataattttattgatttttctaacaagtcttcaaatgttacattctaacatcttagcaaattatttccaaatactgctggaattacatgtaactatcaggaaacaaaagggcttctcaacaacttgtgcgttctacattatctggccagtttccggacaattataatacaattgtgctccaaagtaggagagttccatgaatcaattacccctaaaatatatttctgtatatttaaggagttctaagcattgggttaaattccaaacagactctgaatacaagcatttatttagtaagagaggttagaataaatcaatcctaaattaggcacagctgccctccccccattgatcaaaaagacaggaaattacatttatttaaaaagttaatgttcctaatatattcaaatctaactaagccccaaaacggtctgacatcaaatcctccataaaagaggaaattctcta

SEQ ID NO: 24070 - DNA, 450 bp, Homo sapiens
ggaaccatcaagagagatgasacgtccacaggtatcctagaagagaatcacgtactaggccataagtaggactaacaatctaaaatacgccttctaattacatggctccatgactctaagaggtacaggtttatgaatcacttttaagataagagaaagaccttttgacaatttttaaggaatagattttctagatataagatgctgctttagactagagggcagcaaacattttcttaatgtgccagtgagcaaatatttcagaccacatggtctttttttgtggctactccaccccgttctagtgcaaaagcagccagacgatacacaaacgaatcagcaggtctgtgttccagcaaaactttatttacaaagcaggcagtggctggatttagtttatgagtgatagtgtgccactgcctgctttggaggatgctgggtgctgggaag

SEQ ID NO: 24071 - DNA, 450 bp, Homo sapiens
ggaaccatcaagagagatgagacgtccacaggtatcctagaagagaatcacgtactaggccataagtaggactaacaatctaaaatacgccttctaattacatggctccatgactctaagaggtacaggtttatgaatcacttttaagataagagaaagaccttttgacaatttttaaggaatagattttctagatataagatgctgctttagactagagggcagcaaacattttcttaatgtgccagtgagcaaatatttcagaccacatggtctttttttgtggctactccacccygttctagtgcaaaagcagccagacgatacacaaacgaatcagcaggtctgtgttccagcaaaactttatttacaaagcaggcagtggctggatttagtttatgagtgatagtgtgccactgcctgctttggaggatgctgggtgctgggaag

SEQ ID NO: 24072 - DNA, 1316 bp, Homo sapiens
acttccacggatccctgaggggagagttctgttgaggttggtgggggtgccctccaagactcctggttgtggggaggggtggaggctgcctggtgtggcagctgcccagggctggtttctggagcacagctcagcagatgcctcaggaacctgtctggcaacaacattcctccgccactcagagcagccagctgtcactcgcagcccgtgtggttttgtaaggcgcagacaaggaacgtcagctgcttcccagcagggcccgtgagtcacttcggcagctctgagcccagagtttcccctgtggcggccaaaacctttgcctcttggcccagcttctgtcctgtgaccaaaggcgggtcttctgaggccttcctcaagaggaagccaggaggggcaggccccaggatcctgaagacacacgggaagacagatcccaccgcacttccttacttcctcaggcttctgggtttggggcaaggagtgtcgtgatttgggttgacactttccsggcctcggttttctcacctgtgaatggggatgttgtgagaacttgatgaactattagaagtgggagcaccctcccctttcctctccccagcagctcaggtagcaggtcaaatggttcagagccactggtaagaggatttgaccacatccttcctgtgggtacgtggatggccactcactaacatcaggaccaaggaggcctcaggaggaaaagggacagcactcctgaagaccctcaccccaggtgaagttcaagaatgtaaaagcctgtttgtagcaggggtgacccagccgagttcatcctcaaatggaccccggggtatccgggcagcactcgccacagggcacagacttaacccaggcaccaagcactgcatgtgtgcctgaggtgggggagtggcaggaaaggagtctgggggtgtttgggggtgtgtgtgtagagagtcagaagaagttggtgatcccaaggacccaggcaacttggccgtgggacaagccatggctgggtggagttgagggagtagacagatatttgctccccttctcccaggccccgagtggagtgtttagcaggaatacccacttcacttacgtttttggagcctccgtttccaacatcaggtgcagcagccatgtgggggcacccccagcctccctggtgagggtgactaaggcatcagtgttggtcttggagggcatcctggtagaagagtcaggccaggtgctgatgtggtcccagatcagccaggttgggggtgatgggcagagtcttgtaagcagcccctcgggctttggaaaatgcttggagg

SEQ ID NO: 24073 - DNA, 571 bp, Homo sapiens
gtgagctggacacagtgagaccctgtctcaaaaaaactaaaagatagccctgcacagtggttcacatctgcaatcccagcagtttgggaagctgagatgggaggattgtttgagaccaggagttcaagaccagcctgggcaacatattgagaccycatctctacaaaacagcagcagaaacaaaagcaaacaacaacaacgtacacaaacaaaaaaacaaagaaaggagggcagcccgagctgttcagctgagaattgccatggttctgagctgagcttgggacgcggttttcctttgcgggcaatcacagtagggggctagatgcccattaaggtagttagtgcttatcttccccagactctattcaattccaatgcaatgccattatctcagaacagatagaagggaaatggacttactggccaggagctgctagcgtttctgcctctgccaggaggaacagcccggtaggagcatcctctgcctgtcatcctgagaaaccccattcgccagcagggatcagtccgttactcacttttgacactctcgctgtagagatggtggcagcaa

SEQ ID NO: 24074 - DNA, 571 bp, Homo sapiens
gtgagctggacacagtgagaccctgtctcaaaaaaactaaaagatagccctgcacagtggttcacatctgcaatcccagcagtttgggaagctgagatgggaggattgtttgagaccaggagttcaagaccagcctgggcaacatattgagacctcatctctacaaaacagcagcagaaacaaaagcaaacaacaacaacgtacacaaacaaaaaaacaaagaaaggagggcagcccragctgttcagctgagaattgccatggttctgagctgagcttgggacgcggttttcctttgcgggcaatcacagtagggggctagatgcccattaaggtagttagtgcttatcttccccagactctattcaattccaatgcaatgccattatctcagaacagatagaagggaaatggacttactggccaggagctgctagcgtttctgcctctgccaggaggaacagcccggtaggagcatcctctgcctgtcatcctgagaaaccccattcgccagcagggatcagtccgttactcacttttgacactctcgctgtagagatggtggcagcaa

SEQ ID NO: 24075 - DNA, 571 bp, Homo sapiens
gtgagctggacacagtgagaccctgtctcaaaaaaactaaaagatagccctgcacagtggttcacatctgcaatcccagcagtttgggaagctgagatgggaggattgtttgagaccaggagttcaagaccagcctgggcaacatattgagacctcatctctacaaaacagcagcagaaacaaaagcaaacaacaacaacgtacacaaacaaaaaaacaaagaaaggagggcagcccgagctgttcagctgagaattgccatggttctgagctgagcttgggacgcggttttcctttgcgggcaatcacagtagggggctagatgcccattaaggtagttagtgcttatcttccccagactctattcaattccaatgcaatgccattatctcagaacagatagaagggaaatggacttactggccaggagctgctagcgtttctgcctctgccaggaggaacagcccggtaggagcatcctctgcctgtcatcctgagaaaccccattcgccagcagggatcagtccgttactcacttttgacactstcgctgtagagatggtggcagcaa

SEQ ID NO: 24076 - DNA, 554 bp, Homo sapiens
cagtaaataatgaagacttaactccatttgttttttgttttctttgttgttcttgtttgggggcttattattttttgtacaaaaaatcctggtaaggaaggatggctccacagggattacctccgagaacacaggatccaaagccgaacaataggtctttacgttatctggaagaatctcttcttttgcctcctgtaattggtgatatcatcattaggcctrtacatgacttctgaacgctgctgtacacagcacttcatttagctgggcttatggagattagatcatgcacaggaagctggctccttggctaacaggctccagagaggagtcaggaggcttaagggatgtgaaaaattagggctgatttttaagagacaggattcactggaaaagcacagagatttttccagctcatgaaagtgcctccatgatctttagtttcatgaacaacgttgattcctacttcaaaactctttctataaataagggcctctttgagcttcccttcccttccttttattgtgttgtattgtattttattttttatagtg

SEQ ID NO: 24077 - DNA, 550 bp, Homo sapiens
tagccttattgaaaggtacaactaaaacatgcagcattacgattattaataaaattcaccatcctcacacacttttttttttttttaatttttttcataggcagtagtcaacatcctcacacacttaaccatgtagagccagtacagatctaggtgaacagtgcaattacttttctttttttttgagacagggtcttactctgtcacccaggctggagggcagtagcatgatcatagcttattgcagctttgaattcctgggctcaagcgatcctcctgcctcagcctaccacrtagttaggactgtaggtgtgcactaccaagcctggctaatttttaaatttttttgtagagatggggtcttactatgttgcccagctaggcttgaatcctggccttaaacaatcctccctccatgacctccaaaaattctgggattacagacatgagccactgtgcccagccctacagtataatttctttgaacatttatagaattagggagaataggacatgtccatgtggtggtcacatcttaagagtgatgaaa

SEQ ID NO: 24078 - DNA, 531 bp, Homo sapiens
aaaaaaaaaaaaaaaaaaaaacccacaaacagaactggaaagggtttagtccaggacatcacacagagtatgcactcaataactcaagacttcgtgtcatcagtagaaggaaaaagaggaataaatagtagttgtaaaactgctagtcagagtagtaggactggtaaccatggcagtaattttaaaagttatagtagtagtaacaattgtataagcaagtagtattagyagtaatggtagcaatagtaggagtactgatggtagcaataaaagtaatagcagtagtaataataggaatattccagctccagatcatattacctctgtgaggttaaccaagtcatttaaccttcctgagcctcaggctcatcacttgtaaaatggcagtaaaaatatctaactctcatggatcttatccataaaaaatcagatgttgtaggtaaaactctgcctggcccaccacaggctcagaaggcattaatttccttccccatcacccttcacctgtttataatctctgcttattccctg

SEQ ID NO: 24079 - DNA, 1009 bp, Homo sapiens
tcccatctcagcctcctgagtagctgggactrcaggtgcatgccaccacacctggctaacttttatttatttttagtagagaggcagttttgctgtgttgcccagactggtcttgaactcttgagctcaagaaatccttccacctcagcttgacattacaggtaagagccaccgtgtccggcccccctttcttcttttttaaagtggggtattaaggctcagaaaagagtgtttctgccactgcagaggattgctgacattattagttgctcactctgtccaaggcattgtgctcagctctttgtacagattgtttaaccctcacaagtctatgaatagagtatattacccacttcattttaagtaggaaattgaagctcagggaatcgtagcagagggccccagttcacactgctgatcagtgatgcgactgggatcaccacagcccatctggttcagaagcttgttctcctaaccaggatgtgagagacattcttgtcctaggcagcacgttggtggcagaggtgggatctagactgaggctctcattctgtaccctctctggccccaaggaaggaaaggggaaggagaagggcctttgggactgggtggatgtaacactttctgccacctctactcttcctgctatagattaaaacagaagctctgaattgcagccacaaatcaataatgaaaagctaccagaccaagccctttcttgtttagtgttgtgtcttctgtgtcaacatctctggaacatagtcaatggcagtacccagtagaagccatatggatactttttctcaagtgttgaaataaattaatggtgtggccatggttctcgtacttcaggtccctgtgagcccctggggtcctacacaacttggggtaatgctatggtcacctgcatcccctcctctccagccctcacctggttttctcttctccttccaagaaaaaacacccataccattcttaacatctctggaagctgggggtcaggagaggg

SEQ ID NO: 24080 - DNA, 1009 bp, Homo sapiens
tcccatctcagcctcctgagtagctgggactacaggtgcatgccaccacacctggctaacttttatttatttttagtagagaggcagttttgctgtgttgcccagactggtcttgractcttgagctcaagaaatccttccacctcagcttgacattacaggtaagagccaccgtgtccggcccccctttcttcttttttaaagtggggtattaaggctcagaaaagagtgtttctgccactgcagaggattgctgacattattagttgctcactctgtccaaggcattgtgctcagctctttgtacagattgtttaaccctcacaagtctatgaatagagtatattacccacttcattttaagtaggaaattgaagctcagggaatcgtagcagagggccccagttcacactgctgatcagtgatgcgactgggatcaccacagcccatctggttcagaagcttgttctcctaaccaggatgtgagagacattcttgtcctaggcagcacgttggtggcagaggtgggatctagactgaggctctcattctgtaccctctctggccccaaggaaggaaaggggaaggagaagggcctttgggactgggtggatgtaacactttctgccacctctactcttcctgctatagattaaaacagaagctctgaattgcagccacaaatcaataatgaaaagctaccagaccaagccctttcttgtttagtgttgtgtcttctgtgtcaacatctctggaacatagtcaatggcagtacccagtagaagccatatggatactttttctcaagtgttgaaataaattaatggtgtggccatggttctcgtacttcaggtccctgtgagcccctggggtcctacacaacttggggtaatgctatggtcacctgcatcccctcctctccagccctcacctggttttctcttctccttccaagaaaaaacacccataccattcttaacatctctggaagctgggggtcaggagaggg

SEQ ID NO: 24081 - DNA, 1009 bp, Homo sapiens
tcccatctcagcctcctgagtagctgggactacaggtgcatgccaccacacctggctaacttttatttatttttagtagagaggcagttttgctgtgttgcccagactggtcttgaactcttgagctcaagaaatccttccacctcagcttgacattacaggtaagagccaccgtgtccggcccccctttcttcttttttaaagtggggtattaaggctcagaaaagagtgtttctgccactgcagaggattgctgacattattagttgctcactctgtccaaggcattgtgctcagctctttgtacagattgtttaaccctcacaagtctatgaatagagtatattacccacttcattttaagtaggaaattgaagctcagggaatcgtagcagagggccccagttcacactgctgatcagtgatgcgactgggatcaccacagcccatctggttcagaagcttgttctcctaaccaggatgtgagagacattcttgtcctaggcagcacgttggtggcagaggtgggatctagactgaggctctcattctgtaccctctctggccccarggaaggaaaggggaaggagaagggcctttgggactgggtggatgtaacactttctgccacctctactcttcctgctatagattaaaacagaagctctgaattgcagccacaaatcaataatgaaaagctaccagaccaagccctttcttgtttagtgttgtgtcttctgtgtcaacatctctggaacatagtcaatggcagtacccagtagaagccatatggatactttttctcaagtgttgaaataaattaatggtgtggccatggttctcgtacttcaggtccctgtgagcccctggggtcctacacaacttggggtaatgctatggtcacctgcatcccctcctctccagccctcacctggttttctcttctccttccaagaaaaaacacccataccattcttaacatctctggaagctgggggtcaggagaggg

SEQ ID NO: 24082 - DNA, 1009 bp, Homo sapiens
tcccatctcagcctcctgagtagctgggactacaggtgcatgccaccacacctggctaacttttatttatttttagtagagaggcagttttgctgtgttgcccagactggtcttgaactcttgagctcaagaaatccttccacctcagcttgacattacaggtaagagccaccgtgtccggcccccctttcttcttttttaaagtggggtattaaggctcagaaaagagtgtttctgccactgcagaggattgctgacattattagttgctcactctgtccaaggcattgtgctcagctctttgtacagattgtttaaccctcacaagtctatgaatagagtatattacccacttcattttaagtaggaaattgaagctcagggaatcgtagcagagggccccagttcacactgctgatcagtgatgcgactgggatcaccacagcccatctggttcagaagcttgttctcctaaccaggatgtgagagacattcttgtcctaggcagcacgttggtggcagaggtgggatctagactgaggctctcattctgtaccctctctggccccaaggaaggaaaggggaaggagaagggcctttgggactgggtggatgtaacactttctgccacctctactcttcctgctatagattaaaacagaagctctgaattgcagccacaaatcaataatgaaaagctaccagaccaagccctttcttgtttagtgttgtgtcttctgtgtcaacatctctggaacatagtcaatggcagtacccagtagaagccatatggatactttttctcaagtsttgaaataaattaatggtgtggccatggttctcgtacttcaggtccctgtgagcccctggggtcctacacaacttggggtaatgctatggtcacctgcatcccctcctctccagccctcacctggttttctcttctccttccaagaaaaaacacccataccattcttaacatctctggaagctgggggtcaggagaggg

SEQ ID NO: 24083 - DNA, 1009 bp, Homo sapiens
tcccatctcagcctcctgagtagctgggactacaggtgcatgccaccacacctggctaacttttatttatttttagtagagaggcagttttgctgtgttgcccagactggtcttgaactcttgagctcaagaaatccttccacctcagcttgacattacaggtaagagccaccgtgtccggcccccctttcttcttttttaaagtggggtattaaggctcagaaaagagtgtttctgccactgcagaggattgctgacattattagttgctcactctgtccaaggcattgtgctcagctctttgtacagattgtttaaccctcacaagtctatgaatagagtatattacccacttcattttaagtaggaaattgaagctcagggaatcgtagcagagggccccagttcacactgctgatcagtgatgcgactgggatcaccacagcccatctggttcagaagcttgttctcctaaccaggatgtgagagacattcttgtcctaggcagcacgttggtggcagaggtgggatctagactgaggctctcattctgtaccctctctggccccaaggaaggaaaggggaaggagaagggcctttgggactgggtggatgtaacactttctgccacctctactcttcctgctatagattaaaacagaagctctgaattgcagccacaaatcaataatgaaaagctaccagaccaagccctttcttgtttagtgttgtgtcttctgtgtcaacatctctggaacatagtcaatggcagtacccagtagaagccatatggatactttttctcaagtgttgaaataaattaatggtgtggccatggttctcgtacttcaggtccctgtgagcccctggggtcctacacaacttggggtaatgctatggtcacctgcatcccctcctctccagycctcacctggttttctcttctccttccaagaaaaaacacccataccattcttaacatctctggaagctgggggtcaggagaggg

SEQ ID NO: 24084 - DNA, 1009 bp, Homo sapiens
tcccatctcagcctcctgagtagctgggactacaggtgcatgccaccacacctggctaacttttatttatttttagtagagaggcagttttgctgtgttgcccagactggtcttgaactcttgagctcaagaaatccttccacctcagcttgacattacaggtaagagccaccgtgtccggcccccctttcttcttttttaaagtggggtattaaggctcagaaaagagtgtttctgccactgcagaggattgctgacattattagttgctcactctgtccaaggcattgtgctcagctctttgtacagattgtttaaccctcacaagtctatgaatagagtatattacccacttcattttaagtaggaaattgaagctcagggaatcgtagcagagggccccagttcacactgctgatcagtgatgcgactgggatcaccacagcccatctggttcagaagcttgttctcctaaccaggatgtgagagacattcttgtcctaggcagcacgttggtggcagaggtgggatctagactgaggctctcattctgtaccctctctggccccaaggaaggaaaggggaaggagaagggcctttgggactgggtggatgtaacactttctgccacctctactcttcctgctatagattaaaacagaagctctgaattgcagccacaaatcaataatgaaaagctaccagaccaagccctttcttgtttagtgttgtgtcttctgtgtcaacatctctggaacatagtcaatggcagtacccagtagaagccatatggatactttttctcaagtgttgaaataaattaatggtgtggccatggttctcgtacttcaggtccctgtgagcccctggggtcctacacaacttggggtaatgctatggtcacctgcatcccctcctctccagccctcacctggttttctcttctccttccaagaaaaaacaccyataccattcttaacatctctggaagctgggggtcaggagaggg

SEQ ID NO: 24085 - DNA, 586 bp, Homo sapiens
gaaaaatgaggcccagtggggcacagtggctcacacctatatgccagcactttgggaggccaaggtgggcagatcacttgaggtcaggagtttgagaccagcctggccaacatggtgaaaccctgtctctactagaaatacaaaaattagctgggtttggtgacaaacgcatgtaatcccagctgctagggaggctgaggcaggagaatcacttcaacccggaaggcggaggttkcagtgagctgagatccagcctgggtgacagagcaagactccatctcaaagcgaaacaaaacaaatgagggtcctcatcagcgtgcctttgacactgtcctctggtcctggtgatctgaatacatcaccacagaactgccagggtacgtgtttcctagcccatagcgagtcccagtgaaagcagagatgagaaagaaaggagggacacaaggtctgggtcctgagttccagtccgtgggggccctggtgctactgctgtagttcatgaaacattcccttcgattctttgaactctctcatacctttcccttaaattcttctttttcccttatgtcaagcttctttcagtaac

SEQ ID NO: 24086 - DNA, 586 bp, Homo sapiens
gaaaaatgaggcccagtggggcacagtggctcacacctatatgccagcactttgggaggccaaggtgggcagatcacttgaggtcaggagtttgagaccagcctggccaacatggtgaaaccctgtctctactagaaatacaaaaattagctgggtttggtgacaaacgcatgtaatcccagctgctagggaggctgaggcaggagaatcacttcaacccggaaggcggaggtttcagtgagctgagatccagcctgggtgacagagcaagactycatctcaaagcgaaacaaaacaaatgagggtcctcatcagcgtgcctttgacactgtcctctggtcctggtgatctgaatacatcaccacagaactgccagggtacgtgtttcctagcccatagcgagtcccagtgaaagcagagatgagaaagaaaggagggacacaaggtctgggtcctgagttccagtccgtgggggccctggtgctactgctgtagttcatgaaacattcccttcgattctttgaactctctcatacctttcccttaaattcttctttttcccttatgtcaagcttctttcagtaac

SEQ ID NO: 24087 - DNA, 586 bp, Homo sapiens
gaaaaatgaggcccagtggggcacagtggctcacacctatatgccagcactttgggaggccaaggtgggcagatcacttgaggtcaggagtttgagaccagcctggccaacatggtgaaaccctgtctctactagaaatacaaaaattagctgggtttggtgacaaacgcatgtaatcccagctgctagggaggctgaggcaggagaatcacttcaacccggaaggcggaggtttcagtgagctgagatccagcctgggtgacagagcaagactccatctcaaagcraaacaaaacaaatgagggtcctcatcagcgtgcctttgacactgtcctctggtcctggtgatctgaatacatcaccacagaactgccagggtacgtgtttcctagcccatagcgagtcccagtgaaagcagagatgagaaagaaaggagggacacaaggtctgggtcctgagttccagtccgtgggggccctggtgctactgctgtagttcatgaaacattcccttcgattctttgaactctctcatacctttcccttaaattcttctttttcccttatgtcaagcttctttcagtaac

SEQ ID NO: 24088 - DNA, 586 bp, Homo sapiens
gaaaaatgaggcccagtggggcacagtggctcacacctatatgccagcactttgggaggccaaggtgggcagatcacttgaggtcaggagtttgagaccagcctggccaacatggtgaaaccctgtctctactagaaatacaaaaattagctgggtttggtgacaaacgcatgtaatcccagctgctagggaggctgaggcaggagaatcacttcaacccggaaggcggaggtttcagtgagctgagatccagcctgggtgacagagcaagactccatctcaaagcgaaacaaaacaaatgagggtcctcatcagcgtgcctttgacactgtcctctggtcctggtgatctgaatacatcaccrcagaactgccagggtacgtgtttcctagcccatagcgagtcccagtgaaagcagagatgagaaagaaaggagggacacaaggtctgggtcctgagttccagtccgtgggggccctggtgctactgctgtagttcatgaaacattcccttcgattctttgaactctctcatacctttcccttaaattcttctttttcccttatgtcaagcttctttcagtaac

SEQ ID NO: 24089 - DNA, 614 bp, Homo sapiens
aaaaaaaaaattagccgggcatggtggcggctgcctgtagtcccagctacttgggaggctgaggcaggagaatggcatgaacccaggaggcggagcttgcagtgagccgagatcgcgccactgcactccagcctgggcgacggagcgagactccatctcaaaaaaaaaaaaaaaaaaaaaaaatagttcccaggcccctgttagacttcatgctccctggctttccctctctcctacaaatattagaatttgttgctcgcctgctatatsttggggcctgcatgctgtgtgttgtgaggagggcaggcaaagctcattgcccttgggatttgttacctggcaagaaagcaaacactgaaccagtaatgataagtaatgactgattttgaaggaaccatacaggcacctaggaatacagaaagggatttccttcctgagttgggggatggaggaaggtttctttgaagaagtagcatttgagcctgcttcctcgagggtgagtaggagaaaagacagtagggcttcatggacaaagagacagaatatacacaggcgaagaggagagaaagcgacggtgagcttgaaaggttcaaagaagccgagacagctgcaac

SEQ ID NO: 24090 - DNA, 1095 bp, Homo sapiens
tcctcctacctcaacctcccaagtagctgggactacaggtgcccgtcacctcacccagctaatttttttttgcattttttgtagagatggggtttgccatgttgcccaggctggtctcaaactcttgggctcaagtgatccacccgccttggcctcccacagtgctggcatataaatctattttaatataattattttaggcaaataaaattgttcccagaggaatcaaagggcttaaactcaatatacccttcccccaattttgttttgggtcagaatgatttatgcaaatataaaaaatgtattcttctaaagccatcattgggatagatatgtgtgtatgctaattcatgaaagttggacctaatttggaatatgtagtatgcttgtttaccctaattacttacaaaatacatatttaaaaaagtaaaagatggatgaaaggctttctacgtcctcattctcttataacaactattcttattgtcagtattctcccagtggaaaagggtatttaacatacaggttttctaagaactcaagagaaggacgtggaaatctgatacttttactagctggctgtgttatcttaagcaagtactattaactgattgagtccagtttcctcatatttcttcctgagtgttttatatatgccctgtttaactttagagttagctttgaggttctgatgatactagtgtgttggggctcagaaactgacactccaaaatacgacattgtgacatgttgagctgaagaaacctcaagatctctctaatcttccccctgctactcaccatctyttccaaagagactgaagttccttcatctgcctaatatccagcctcaccaaggagaataattgttttttcttcctctccctgttatttccttatttattgtggaaaagaagaccaaaatgtgaccacacctgaacagattttttttatgagtataatgacagtcttcaaagatcatttaaattccaaagagagctgtttccaagtttcctgctccaatcattctccccagtaattatttattacccatcaatagaatttttttctcctactctcataacctgttttacca

SEQ ID NO: 24091 - DNA, 757 bp, Homo sapiens
atgcccgtggcgggagctcagtgacctctgctcaaccccctatccttgctagacccaaatttctcctttggacgtatcccgggaatccagagccccgcagcctgtgactttagaaagaaagaggcaggctccttcttggctcagtcctgagtggaacttccaaaggcagggctgggatgacttcatgtttggattagggaatttcagaatgggacaaagcccatctttatttcagagcmgatgacctaggtctgagtgggtgacctccctcctaactgatgggagatgacatctaaactcccgatgctgagtaacaagcaatgtagacaccaagggcgatgaagcagccattcagcatttcctggcacctgccagctgccgcccactgtcctgggcacccaggacaccagccctgcggtggaggctctggcctggcactttacacctttgcttgaacatgagaaccacctggggagattccacaaacgcccgtgtttgggctccacctgagaccaattagaggcagtcctgctctaattggttaattacaatcaatctcccaggtggatttgcaaccagggctgagagtactaggctggtggatactaaaaccccacatttttgtttggttgatttttttttttttttttttgagacagcattgctctgtcgcccaggctggagtgcagtagcacaatctccgctcactgcaacctccacttcccaggtttaagcaactctcctgcctcagcctccc

SEQ ID NO: 24092 - DNA, 1121 bp, Homo sapiens
ccttctaatcataaattcttacctttgtttatggcctacactaaagtttcagaagtcttaaatcaaagccttgtattttatttaattaattaatttgttaagacagagtcttactttgtgacccaggctgcagtgctgtggtgcgatctctgcttactgcaatctctatctcctgggctcaagcgatcctttccacctcagcgccccccacccaaggagctgggactacaggcacatgccaccacacctggctaacttttgtattttttgtagagacagggtttcgccatgttgctcaggatggtctggaattcctgggctcaagcagtctgcccacctcagcttcccagagtgctgagattacaggcatgagctacaaagccttgtgttttagacattagatttcccagtactctcctgaagaacagtaattatgattatgaagatttcaaagatactatggtaagatctgatcgtctttgaaagaattatagtaatgtagctcaggacttccttttatactgctttgtactacctgttcacaggtgactgtcaggtgatttcagtaacaaactcagacaaatgcatgacatttaaactgagttattgaagtcattgatcttgctttattaaagttgaccggttggtaacaaacatttacttttacaaaattaatcaacatgagtttgatgtgatgagagaattatattgactggaagtggtaggcatgaaacatttcctaagtaaaacttagaaaagagaccttagttaaccaataccctcttggtttgtttgcatgttaaaagatgtctgcatctgagcagttgaacttaaatataaagttgagctcagatacaaaggttctttagaactttaaaagacatgggtgaacaaaacccaaactaatcctctgatgtttacttagaaacaaaaacctaaatgaaattcaaaatagatatctgaatttaaatttgtgtataaacattagattgaaagactagggtctggaacagacagaaattccacacatacttttctgggcttsgaaaacttggtggagtgggtcaggcatggtgtggctcatgctggtaatcccagcactttgggaggctgaggtgtgt

SEQ ID NO: 24093 - DNA, 770 bp, Homo sapiens
agtagagactttccacagttcagcttgaatggctgctataaagtgaggctcactccattttaaaatttgttttatactattttaatggtttcagcttttattttagattcaggggtacatgtgcagtttagctacataggaatattgcatgatgctgaggtttggggtatagatggtcccattacccaggtagcgaacacagcacccagtagatcgtttttcagccctgtctccctcctcccctcccatstctattagtcccagtgtttatcattcccatctttatgtccatgtgtgctcagtgctcggctcccacttagaagtgagaacatggagtatttggtatcccgttcctgtgtcaatttgctcagtataatggcctccagctgcatccgtgatgtgcaaatgacatgatttcattatttttcatggctatgtagtattccatggcatgtatggaccacttttcctcatccagtccgccactgatgggcacctaggttgactccatgcctctgctattggctcactccatttaaaagtgaagaaaggggttcctgtcacccttgccacatctggagtcctgtctccagccactgggaatcttgaatggtcacatgggacaccactgctagtcacatcaatgtctttaacattaataatgtgagttcacagctaagggcctgtaccagagaccaaaggctgatggcagcttctgggcctcatgcttgcaggtgggggacagtaaacctcagaacaggtgaaaaccc

SEQ ID NO: 24094 - DNA, 677 bp, Homo sapiens
ctgaccttgtgatctgcctgccttagcctcccaaagtgctggcattacaggcgtgagccaccatgccccacctaatgtttgcatctcaattgtaggtagtctttctttatatgcatttacttcatcccagacagccaaaagattaccttccaggactctataaaatgccctaagaggtattcaagattctatccaagtccatttttctggaaagagggtccctacatccatcagagcctcaaaagcttcagcagccaaagaggatttggaaatcaaaccacagggttccaaaggccttttccctccgggtgagagtcccatttccatgaagtgtggaaggagtcgggaactggaggttccttagggccctgcacatctcaccaagatgaaggattcaggccaagtagactccagttcagggttcatccactaactcaggctgggggatgggggacattacactttgctcttgaaccttggcttcttccccmaagatccacacttgtggcgtggtcaggagggccaaatggccacgagggtgcagagtgaaaggaatgcatgtccaggatcaaccctccagagatggttggtttggttagcactgaaaggtgggcaagatgctcccatgggcccttccttcccagaagcaccatcactccgtcagctcagcacggatc

SEQ ID NO: 24095 - DNA, 550 bp, Homo sapiens
aagagatgcattcaattcacagctatggaagttttaaattgatttttttttccccaaaagaagtcagaatgtattcattttttctcgtcatttccttcttagcttagagttaccccttgtggcttcctaatttcattgctaccacattgtccgagtcttcatcacctgaaacctgagttactgtacacttaatgcttgtctctcctgtttctggttcattctatatactgtatacttcagcacacatttatttaccatggtggtgatagtggtgataagattttagttctagactagaaggcataatccatcaaaaagtgcacaagagaggtattggtttgtaatttttagaacactaactttaaaatagtcccccacccagttaaaaaataattgtggacctataacrtatacaatactgctttagatggtgaaaacatttaatatatttattgaattgaaatagtttgttgatttaaaaattctgctatgatggtaggatagggtaatgggacaattctagagaggagcacatctggtatgtggcatg

SEQ ID NO: 24096 - DNA, 499 bp, Homo sapiens
tgcatatccacaccccaccttcccatttccctcacacccaggcacttcgttttatttcttaaacacagcaagctccttccggcctcagcctcaaggcttttgcctctgtggcaacttctgcctgaaacctttcctcctggtcatcacacgtcagcctctctctctgagtctcagctcaaatgccgcctcctgagaggctgtccctaaagcagcactcacatcacaggcactctataacccagaatttttcaaaatgttattttactcacagcacttattattccctgaatattaatgtgtattgcttattgtctttctctcctcctacacaaaacacactcacatactcactaggatgaaaattccacgagggtggggagactcatccgtcttgctcacccagggrtgtgtagggcacagtcaaaaaatatttgcttagtgaataaataacatggcacaaaactgcagaccccagtggttagaaaactaggggcctttt

SEQ ID NO: 24097 - DNA, 1001 bp, Homo sapiens
ccataggtgacattgccacggcaaaattattaataaccccctttcactcacccaaaaaattccaagttggacaatatattatatggccaccctaatattaacaaaagctctgaaaataatatcctgcctttctgcatatatataaagaatctcaaatctgytgagtagaggccagactctgcaaagccggctggtgcctgtgctttcaggggccactggagccttatcatatcagtttctggtaatcatgtgtaaagtgcattgcaaacggcgagcctaaaatcacctcccatatgcagccatcgactctgcctgcgcctaatcacagaaggctaccgcaagcccagagttttcaccagagtatcccccatcactctaaaatacagcagcctcaagaaatagcagttgttttctccagtttctataactgctgtgtattatgtgtcgcactgaaaattagaaagataggtactcctgaaaaatccaaagcttagattttttctcatttttactttcagttagaataacgagctctttcttccactccactgcataagagatgacaattaaaagctgactttttctctgcaaagtacttcactgttttcaacaccaagttttatgaaagagcaaaaaaaaagagattagtgtattgttctatatacataccatcacactgtccattttaatatttgaagccttaaagtaatgagtaggctttgcgttttgttttgtaaattctgaagcatttgtgtgtgtgcgtgtgtgtgcatatacatatgtctacatatggatagataaatggaataataaaatccatttaaataaaaagttagaagatatataaaaaagaataagacctgctctgtgttattcagacatttttaacctaataggggtggcaatgaacaaataattcaggacaagagaaaatgttaaactgtgcagattaaaagaccaaagctctatccaatagtgtcatatgatacagacatcaagga

SEQ ID NO: 24098 - DNA, 1001 bp, Homo sapiens
ccataggtgacattgccacggcaaaattattaataaccccctttcactcacccaaaaaattccaagttggacaatatattatatggccaccctaatattaacaaaagctctgaaaataatatcctgcctttctgcatatatataaagaatctcaaatctgctgagtagaggccagactctgcaaagccggctggtgcctgtgctttcaggggccactggagccttatcatatcagtttctggtaatcatgtgtaaagtgcattgcaaacggcgagcctaaaatcacctcccatatgcagccatcgactctgcctgcgccyaatcacagaaggctaccgcaagcccagagttttcaccagagtatcccccatcactctaaaatacagcagcctcaagaaatagcagttgttttctccagtttctataactgctgtgtattatgtgtcgcactgaaaattagaaagataggtactcctgaaaaatccaaagcttagattttttctcatttttactttcagttagaataacgagctctttcttccactccactgcataagagatgacaattaaaagctgactttttctctgcaaagtacttcactgttttcaacaccaagttttatgaaagagcaaaaaaaaagagattagtgtattgttctatatacataccatcacactgtccattttaatatttgaagccttaaagtaatgagtaggctttgcgttttgttttgtaaattctgaagcatttgtgtgtgtgcgtgtgtgtgcatatacatatgtctacatatggatagataaatggaataataaaatccatttaaataaaaagttagaagatatataaaaaagaataagacctgctctgtgttattcagacatttttaacctaataggggtggcaatgaacaaataattcaggacaagagaaaatgttaaactgtgcagattaaaagaccaaagctctatccaatagtgtcatatgatacagacatcaagga

SEQ ID NO: 24099 - DNA, 486 bp, Homo sapiens
gaggatattttgcttgttcgttcccatttacacagagaagcctggagagtgttttggaatagtacaataaagactttttyacttcagtgaccaaacaactctcttgtcctcccatttctgtcctcttttcttgggaatagtaactccttctgtgacttcagtctcaaacttcaataggatattttccaaggaagtccatattcttacaagatcttaccctctggcatcagttgaataaatcatgcctggaaaatgtgacatgatggaccaatcacagtccttccctgagacttcatactaagagaaaaactggggccgggtatggtgattcacgtctgtaatcccagcactgcgggaggccgaggcgggcggatcattggaggtcaggagttggagaccagcctggccaacatggcgaataaaatactaaaaataaaataaaaactatctctactaaaattactactctctctactaaaaataaaa

SEQ ID NO: 24100 - DNA, 1307 bp, Homo sapiens
ttatttgactagtatacttctttgtactccctccccaaagatagatataaaaatttagttaaaattattttractgtagaagttcataatttaaatcatatatggtaaggaaaacaaaataaaattaaacaaaaacttacatgcatgtggaacaaatttagtaactaaatttatacaaggccaaagcacctttgcactcgtggccaagtacattgccatgtaagatatgaatgtgtctcttctctgataattttatttgcagtgagtctggaaaagcttcataatgagagtgaggttttagaaaaccttgaataataaaagaggcctgaccaggttatgggaagtattatatgtcagaataagttataagttctcttttaatgttataacaaattgcaattttctgtcatttggagcctctgttgacatgcttttcaagtttcagcaggagcttcttgcagagtaagttttgtaagcttattcagtgattccagggatatagctgtcacgatagtatccctgatatttgagtaatagcattactttacattaatgccatcctatattagcttgatccaaaaatcagtgagttccaaaaccactcctgagacttgttattggaaaggaggaatatatagaatgtagaaacatagtctaaaaagatagtagaaagatgaggcttacttctgagagaaatgttaatttgaactccataggttggcagcaaaccttaaggattgcagaaaaagtatttgcttatctaaacactgttgtctatctgtttaaaatcttttactttcgatttctacagttttaagctttatttcctatggcatttctttgaaactttgttcagtaaacattttatgcccaggactttgatgaggcacaattttggaaggaaaataaagaagataatagagtttccctgtaccaatgcctgcccctaaaaactgtacagtctagctctcatagcttacaagctctcatagcttatccaaatttgaatgtaaacagtttttctttaagaaggcttcattaagctggaagaactatcactttgtatatggttatgtccctagcctggatggatcatgactgatgccttctattacatttcattagtattcatgatggtactggtgtagctgctatgagtgaaagcttggcaaaaagaaacccaagaactgtatgaagtagaatatgttagagatatttgatccctttctcctttttctttgctgctcaaatttggttacaaaactttcattttgaagctatttaagagagttaaaaacaaaagtaag

SEQ ID NO: 24101 - DNA, 1307 bp, Homo sapiens
ttatttgactagtatacttctttgtactccctccccaaagatagatataaaaatttagttaaaattattttgactgtagaagttcataatttaaatcatatayggtaaggaaaacaaaataaaattaaacaaaaacttacatgcatgtggaacaaatttagtaactaaatttatacaaggccaaagcacctttgcactcgtggccaagtacattgccatgtaagatatgaatgtgtctcttctctgataattttatttgcagtgagtctggaaaagcttcataatgagagtgaggttttagaaaaccttgaataataaaagaggcctgaccaggttatgggaagtattatatgtcagaataagttataagttctcttttaatgttataacaaattgcaattttctgtcatttggagcctctgttgacatgcttttcaagtttcagcaggagcttcttgcagagtaagttttgtaagcttattcagtgattccagggatatagctgtcacgatagtatccctgatatttgagtaatagcattactttacattaatgccatcctatattagcttgatccaaaaatcagtgagttccaaaaccactcctgagacttgttattggaaaggaggaatatatagaatgtagaaacatagtctaaaaagatagtagaaagatgaggcttacttctgagagaaatgttaatttgaactccataggttggcagcaaaccttaaggattgcagaaaaagtatttgcttatctaaacactgttgtctatctgtttaaaatcttttactttcgatttctacagttttaagctttatttcctatggcatttctttgaaactttgttcagtaaacattttatgcccaggactttgatgaggcacaattttggaaggaaaataaagaagataatagagtttccctgtaccaatgcctgcccctaaaaactgtacagtctagctctcatagcttacaagctctcatagcttatccaaatttgaatgtaaacagtttttctttaagaaggcttcattaagctggaagaactatcactttgtatatggttatgtccctagcctggatggatcatgactgatgccttctattacatttcattagtattcatgatggtactggtgtagctgctatgagtgaaagcttggcaaaaagaaacccaagaactgtatgaagtagaatatgttagagatatttgatccctttctcctttttctttgctgctcaaatttggttacaaaactttcattttgaagctatttaagagagttaaaaacaaaagtaag

SEQ ID NO: 24102 - DNA, 1307 bp, Homo sapiens
ttatttgactagtatacttctttgtactccctccccaaagatagatataaaaatttagttaaaattattttgactgtagaagttcataatttaaatcatatatggtaaggaaaacaaaataaaattaaacaaaaacttacatgcatgtggaacaaatttagtaactaaatttatacaaggccaaagcacctttgcactcrtggccaagtacattgccatgtaagatatgaatgtgtctcttctctgataattttatttgcagtgagtctggaaaagcttcataatgagagtgaggttttagaaaaccttgaataataaaagaggcctgaccaggttatgggaagtattatatgtcagaataagttataagttctcttttaatgttataacaaattgcaattttctgtcatttggagcctctgttgacatgcttttcaagtttcagcaggagcttcttgcagagtaagttttgtaagcttattcagtgattccagggatatagctgtcacgatagtatccctgatatttgagtaatagcattactttacattaatgccatcctatattagcttgatccaaaaatcagtgagttccaaaaccactcctgagacttgttattggaaaggaggaatatatagaatgtagaaacatagtctaaaaagatagtagaaagatgaggcttacttctgagagaaatgttaatttgaactccataggttggcagcaaaccttaaggattgcagaaaaagtatttgcttatctaaacactgttgtctatctgtttaaaatcttttactttcgatttctacagttttaagctttatttcctatggcatttctttgaaactttgttcagtaaacattttatgcccaggactttgatgaggcacaattttggaaggaaaataaagaagataatagagtttccctgtaccaatgcctgcccctaaaaactgtacagtctagctctcatagcttacaagctctcatagcttatccaaatttgaatgtaaacagtttttctttaagaaggcttcattaagctggaagaactatcactttgtatatggttatgtccctagcctggatggatcatgactgatgccttctattacatttcattagtattcatgatggtactggtgtagctgctatgagtgaaagcttggcaaaaagaaacccaagaactgtatgaagtagaatatgttagagatatttgatccctttctcctttttctttgctgctcaaatttggttacaaaactttcattttgaagctatttaagagagttaaaaacaaaagtaag

SEQ ID NO: 24103 - DNA, 1307 bp, Homo sapiens
ttatttgactagtatacttctttgtactccctccccaaagatagatataaaaatttagttaaaattattttgactgtagaagttcataatttaaatcatatatggtaaggaaaacaaaataaaattaaacaaaaacttacatgcatgtggaacaaatttagtaactaaatttatacaaggccaaagcacctttgcactcgtggccaagtacattgccatgtaagatatgaatgtgtctcttctctgataattttatttgcagtgagtctggaaaagcttcataatgagagtgaggttttagaaaaccttgaataataaaagaggcctgaccaggttatgggaagtattatatgtcagaataagttrtaagttctcttttaatgttataacaaattgcaattttctgtcatttggagcctctgttgacatgcttttcaagtttcagcaggagcttcttgcagagtaagttttgtaagcttattcagtgattccagggatatagctgtcacgatagtatccctgatatttgagtaatagcattactttacattaatgccatcctatattagcttgatccaaaaatcagtgagttccaaaaccactcctgagacttgttattggaaaggaggaatatatagaatgtagaaacatagtctaaaaagatagtagaaagatgaggcttacttctgagagaaatgttaatttgaactccataggttggcagcaaaccttaaggattgcagaaaaagtatttgcttatctaaacactgttgtctatctgtttaaaatcttttactttcgatttctacagttttaagctttatttcctatggcatttctttgaaactttgttcagtaaacattttatgcccaggactttgatgaggcacaattttggaaggaaaataaagaagataatagagtttccctgtaccaatgcctgcccctaaaaactgtacagtctagctctcatagcttacaagctctcatagcttatccaaatttgaatgtaaacagtttttctttaagaaggcttcattaagctggaagaactatcactttgtatatggttatgtccctagcctggatggatcatgactgatgccttctattacatttcattagtattcatgatggtactggtgtagctgctatgagtgaaagcttggcaaaaagaaacccaagaactgtatgaagtagaatatgttagagatatttgatccctttctcctttttctttgctgctcaaatttggttacaaaactttcattttgaagctatttaagagagttaaaaacaaaagtaag

SEQ ID NO: 24104 - DNA, 499 bp, Homo sapiens
tctacatgcagccctgcttcttaacccatcataagtttgagcaggaagaataaaagaatgaaacttagtggaccccacttttaagatgccaaatacactttcctttctttgtaggattggatataggaaaacattatttgtatacccctaaattttaaagaacttcttgggtgagaagccttgmtcatgccttatattttcagatcagatcttttcagactttcttttaaaaaatgcagtcattaaaatgttcacttttggtccctgttttcttccttatgacacctgctacatgattataaaaccccacacctctgaggaattcacttttaaggaaataagtattaataaaaattgtaactgtatgtcagagaaaacattttctgtcatctctgagacatttgggtaccaaggatcccaagattctaaagaaaagttataaatatctacctgtaagacttgctaaaagttggccaaaaccttaattgggactcttatg

SEQ ID NO: 24105 - DNA, 499 bp, Homo sapiens
tctacatgcagccctgcttcttaacccatcataagtttgagcaggaagaataaaagaatgaaacttagtggaccccacttttaagatgccaaatacactttcctttctttgtaggattggatataggaaaacattatttgtatacccctaaattttaaagaacttcttgggtgagaagccttgctcatgccttatattttcagatcagatcttttcagactttcttttaaaaaatgcagtcattaaaatrttcacttttggtccctgttttcttccttatgacacctgctacatgattataaaaccccacacctctgaggaattcacttttaaggaaataagtattaataaaaattgtaactgtatgtcagagaaaacattttctgtcatctctgagacatttgggtaccaaggatcccaagattctaaagaaaagttataaatatctacctgtaagacttgctaaaagttggccaaaaccttaattgggactcttatg

SEQ ID NO: 24106 - DNA, 633 bp, Homo sapiens
tcgaacaattcttttgacattcttcacaagaatttgttatccccttcactcttgctgctcgatagaatccgaaacagtgcttggaatgaacagcagcatcttgtacatatgcagggtatacatttgactttctctgtagaaaacacctttttgcaggtgatgtttttctgacacaatttaggttctacagttgctaaaccaaattctgttatttcctaattttgagaaaaaggattaggaaaagaaatacaagctaagcaatttttgttaccaacagagatataccaaaagcatagatatgctattcttcaattgcttggtsaattatgccttaccctgaatcattctacaaagacttcactgagcatacttcaatttagaagaataaccataagacctccaattagaactataattaaaagtcatttggggactaataaccaaggcttacaatgttatctgagttgatgacagtggagaagagatgaggttgcatggttcagcttctggtcagaaatgccagctcgttattatactccagtaaatttcatgcactactatatttatagctactataaactgaaaatataaaagacagaaaaagtggagatatagtgatcacatgatgggcct

SEQ ID NO: 24107 - DNA, 593 bp, Homo sapiens
ttgataagccacctagtttatggtattttgttatagcaggataaactggctaagacacctacaaaagttgggaattctcaactagattttgagataacaaattgtttagctattctagatctagaaatgcttctctttagggacaaatttttgagatagctttgcaattcctttcttttccaagaatctaaagstaaaacaaacacacagaaaatcaaaacctgcttttaatagattttcttttaggctaaaattattattagtgtgtgttgggctcaacaacttaatccagaactgagaataaactgcttctctagtgtcccattcagaaatcaggaatgagaatacatggcaggaaaatgactaccaaaatcggaataaacttgaggttggccagaaataaaaccacatacagccaactgatctttgacaaagtggacaagaacgtactgtggggaaaggacaccctttccaataaatgttgccagtaaaactggattgccatatgcaaaaggatggaattggaccccaattctcaccatatacaaaatcaactcaagatggattaaagacttacatgtaagactggaaac

SEQ ID NO: 24108 - DNA, 593 bp, Homo sapiens
ttgataagccacctagtttatggtattttgttatagcaggataaactggctaagacacctacaaaagttgggaattctcaactagattttgagataacaaattgtttagctattctagatctagaaatgcttctctttagggacaaatttttgagatagctttgcaattcctttcttttccaagaatctaaagctaaaacaaacacacagaaaatcaaaacctgcttttaatagattttcttttaggctaaaattattattagtgtgtgttgggctcaacaacttaatccagaactgagaataaactgcttctctagtgtcccattcagaaatcaggaatgagaatacatggcaggaaaatgactaccaaaatcggaataaacttsaggttggccagaaataaaaccacatacagccaactgatctttgacaaagtggacaagaacgtactgtggggaaaggacaccctttccaataaatgttgccagtaaaactggattgccatatgcaaaaggatggaattggaccccaattctcaccatatacaaaatcaactcaagatggattaaagacttacatgtaagactggaaac

SEQ ID NO: 24109 - DNA, 542 bp, Homo sapiens
gtctcccttttaaagaaacttatgagataaaatatgcaaaaacagatagaaggaaactacttcaagccagacgcgatgggtcacgcctgtaatcacgcacttcgggaggccaaggcaggtgggtcacttgaggtcaggagttcaagaccagcctgaccaacatggtgaaaccccatctcttctaaaaatacaaaaattagccaggtgtggtggtgggggcctgtcatcccagctactcaggaggttgaggcaggagaatcacttaaaccgaggaggcgatgttgcagtgagccragatcactccactgcactccagcctgggcaacagagggagactccatctcaaaaaaaaaaaaaaaaagaagaagaaaaagaatgaaagaaattaaagacacaaacaaatgggaaaacattcacaagggaaaggatggtcttttcaacaaatggtgttgtgaaaactagacatccacatgcaaaaaattaaaataaagttggttcctaacctacaccatttaaaaattaactcaaaatggacctaagtc

SEQ ID NO: 24110 - DNA, 935 bp, Homo sapiens
tcctgcagaccctccagccccagccattactagatggagcagagagagactaccaagtgagccctctatgaatttctgccccacaaaagcatgaacaaaataagtggctgttttaaacctctaagtgttggtgtagtttattgcacaaccgtatgaatggaaatgaagaatattaaagcaataactgaaaactaagaatttgaaaattcatagaatgttgtttcctagggtaagactgacttcagaaaaaaaaggcatagacatgatttcagaaaatgtgatgaaagtccttttggggaaatagaaacaatgaaagcagaatcctatttgaagtctcacttttttcattagctgcagtgtaatggaaaacagccaccctgaatatccaatttcccccaatactttaattcttttcttagactgaaagttttaacaatccaccgcttactacaagttaaaaaaatacataatgatttttaaagcttttcttatttctggacagcagattttgaaggtgaagctttaatcacatgctagtcttataatcactgctggttttcgactgaagtattacaaattgggctttagttcaatttaagctgcatgggccaaatcctacccttggttattataagcaattcccattgaaatcattagtagttgtacatgtgtaacaaggagataatttggccacatgtgctttagtctccatgtgtatcaagcataggcacagaggctgggctacacacggaaaacatcttgtgctatttggaataagttatctttttgctataatgagttcatgtcaacatgatgaaaagaaaatgcaaatgtaaggagaagcagcacttcctcccatagctttccatgtcctggtggctcctggcagygctgactctataagcagttgcccctcctattggtaacaatggata

SEQ ID NO: 24111 - DNA, 596 bp, Homo sapiens
ttgcatttctactatgtgctaaaacaacgaaaatgaaaaagaaattagacccaaagccacgtaaatgtcaataaatacttatatctaggatacaaagagacctcttacaaatcaataacaacaacaacaaaaaacaaaaacgcaacacaagccaatgggaaaaaaatgataaagtagttgaacagacattaaagtataaaaggctatcttcaaagaaatgcaaastaaaccataatgaaataacagcacactccacagaatgaataaaatgaaaaatacaaaaaaatccagtgtcagtgaggatgtggggcaactagaactctcatacattattggtaggaactattttgtgaaattgtttggcattctcttttaaagctgaacttgggcctaccctatgatccaccaattccactcataagcatatatccaacaaaaaatacacatatcatcagaatagcatactagaatgtttacagtgttaccctgcataaattatctaaaacttaacactactgaaataacaaccaataatagaatggataaatttcagtatagtcacacaatagaatattaaataacaatgtgaatctatg

SEQ ID NO: 24112 - DNA, 639 bp, Homo sapiens
ttcttgtctcatggggtacggcttgcgtaggggaagattcctaatttctggccatggatctagaaacattatggaaagaaaaggaagttttccaatgaatgtaacacatctttgtgtatctctactgagacaatcctactgaaattattttaccttttttgacttccttccttccttccttctttcctttcttccttcctttctttcttgctttctcctttcctccccttctccctccctccctttattccttccttccttccttaattgttttcctttctttcttccttcctcccttgcaagacacaaattcaaaaccacccaattcatgagtcgatgcaccctgtattgaatggagagttgcaccctctgtccatttcactrcaagggaactccctcttactaggaacccctaactctttagtggctgatcactaacaaagatatggctatgcgtcttcactttctgttttctttccagaaattggtttagcaaaagaaaaggtaacatatttccttttctgtttttgaactttttattaacagtttttttttttcagctgagtgtaacatgctgcattatagataattgcttttaaactaggtccacttctcattcctctttgaatttccattgta

SEQ ID NO: 24113 - DNA, 1220 bp, Homo sapiens
ctcccacctcagcctcccctcccaagtagctagaaatacagatgcatgccaccatgcccagagagcatttacaataataaattattaagtagtaaagctcttttttccactgtttctgctaggcctcttggctatcttgagttccccagaacaaaagcaaatgctcaggaaatattttatgatagttgacatactaatatttgatttgttgacatgtttgaagatatggaagtccaaactaagaaataaagaattcctctttttaggaaatcacctcaggaatttcctaaaattatgcctatagtacttttaaaaatagtctgtcttacagaactctaagtattctaataatgatagtattagtgaaataaaggtgtcrtaccaattccatcactgtgtttataatatccaggattttcactctgcctaacttcccaaactggcctaacacatgtcttatggtcagtggcaaagtggacattaaacttgctagaactcctcagtactaatatgctttcaaaaagcttaccatctagtcatagataatacagctgccaattttaagcttaccctttcagccctatcaacaaaaaaagggctttcagtcaagcaaaagtacttaacaaagctatccagtgagagttcagagattacaaggaacaatctttactcaggcagaaggaaacctgcaaagactttcagaatgaacaatacagatcaggcatatgtgaagagtgaatgtgaaagatggaaaatcttcccaagcctaccacccaattctgatcatttgatagtagcaattcccataactcattcatcctggctatttggatctttcaaatcatataattgacctgaatctttgtggtgtctcctttaggaaaccaactctagaaagcagaggaatgtgtcaccaattctgcataagtacttcattttaagctccattttcctggctcctcttcatcatgatcatcttcctttatctatcccacagcccctgcagaacatgtcctcaaccaggacaccaagttactgaaaagtcacaaatgaactttataggtcgacaaaggctgagaagaccccaatcttcacagaggaggagagaatgtccaatagtcaccgcaatggctgctaccaaaaataaaatgtcctctttcatttctctgaacttctctaatctcatctatgaaagatgacatatttggagggtcaaggtg

SEQ ID NO: 24114 - DNA, 1220 bp, Homo sapiens
ctcccacctcagcctcccctcccaagtagctagaaatacagatgcatgccaccatgcccagagagcatttacaataataaattattaagtagtaaagctcttttttccactgtttctgctaggcctcttggctatcttgagttccccagaacaaaagcaaatgctcaggaaatattttatgatagttgacatactaatatttgatttgttgacatgtttgaagatatggaagtccaaactaagaaataaagaattcctctttttaggaaatcacctcaggaatttcctaaaattatgcctatagtacttttaaaaatagtctgtcttacagaactctaagtattctaataatgatagtattagtgaaataaaggtgtcgtaccaattccatcactgtgtttataatatccaggattttcactctgcctaacttcccaaactggcctaacacatgtcttatggtcagtggcaaagtggacattaaacttgctagaaytcctcagtactaatatgctttcaaaaagcttaccatctagtcatagataatacagctgccaattttaagcttaccctttcagccctatcaacaaaaaaagggctttcagtcaagcaaaagtacttaacaaagctatccagtgagagttcagagattacaaggaacaatctttactcaggcagaaggaaacctgcaaagactttcagaatgaacaatacagatcaggcatatgtgaagagtgaatgtgaaagatggaaaatcttcccaagcctaccacccaattctgatcatttgatagtagcaattcccataactcattcatcctggctatttggatctttcaaatcatataattgacctgaatctttgtggtgtctcctttaggaaaccaactctagaaagcagaggaatgtgtcaccaattctgcataagtacttcattttaagctccattttcctggctcctcttcatcatgatcatcttcctttatctatcccacagcccctgcagaacatgtcctcaaccaggacaccaagttactgaaaagtcacaaatgaactttataggtcgacaaaggctgagaagaccccaatcttcacagaggaggagagaatgtccaatagtcaccgcaatggctgctaccaaaaataaaatgtcctctttcatttctctgaacttctctaatctcatctatgaaagatgacatatttggagggtcaaggtg

SEQ ID NO: 24115 - DNA, 609 bp, Homo sapiens
atagtttaaagatatattcttcagttgtcttaaatttaatttttggagaatatatatgaagatgctgaatacatgaaacacatctctactggtttagctgcttattgctgtttgtagcttttcttatggtgaattacgttacatcactgaatgcttaggacaaaaatgtgcagtcatgcttgtgtctccctttggttgcaaaggtagcataagtaactgattcggagagagattaactattagtgtttaattttggaaaagcaagtaatgcatgtaatttaacagaatggtgcttttctttttaattcccatccccccgacatttcttatcttcctatgacttctgcctcatcactcattttattttcagaattctaaaattcataatactctttaaaatgaaactatcatttttcctgactagyttagtattggaggtaaatagataactgcttgagataccttttggtctaggacgttataattctgtgtggtacattatagttttaagcgttgtacgttgtggattatgcctgcagatttatacatattaggggcaaatagagcaccaaatatttaatgatattcttgtttgcttacattcctaaa

SEQ ID NO: 24116 - DNA, 760 bp, Homo sapiens
tgcatacagttggctatgcagcagtaggcccttttggtgtattgtatagaaaatgagccatttcattgtttgggaaacttgtgtttcctccccttccccccatttttagtatctgttaaaagaagaaagcttttggctacttaaaaaaacttggttatgtttagtttggtgccttttgatctggtcatgacaatgggagcaatactcttatgcttgctacttgtttcatttaaactgaaaagtccggaaaaaatatattagtacgcaggagtgctaacttgcaaatgagtttttcttgactgctaataactcaagcaaaaagataattatgtgttataaactgtgcatgcggaaagtgaaatgaaattcatccgcttcatattttttaggaaaattgataaggcatcgctgttaatatttttcacattaccttttggatttcttaattcagatattttctctccacaattttgagagaaaattaagaggggttgctgyccaaaactggggagtcttggaatcaagttgtgattgtatgtttatataaaaactcagtgtgacctcagcaagtcacagcattttttcaatttgatgatctctattttaaagtgagaaagtttttacttgcagagtgtttctgaatcctatgttaatcttttttaagttctgattggaggctctagtgatacgatttttagggcaggctacatttagctgtattttttccattatattttgaagtcagaatggtattgcaagt

SEQ ID NO: 24117 - DNA, 760 bp, Homo sapiens
tgcatacagttggctatgcagcagtaggcccttttggtgtattgtatagaaaatgagccatttcattgtttgggaaacttgtgtttcctccccttccccccatttttagtatctgttaaaagaagaaagcttttggctacttaaaaaaacttggttatgtttagtttggtgccttttgatctggtcatgacaatgggagcaatactcttatgcttgctacttgtttcatttaaactgaaaagtccggaaaaaatatattagtacgcaggagtgctaacttgcaaatgagtttttcttgactgctaataactcaagcaaaaagataattatgtgttataaactgtgcatgcggaaagtgaaatgaaattcatccgcttcatattttttaggaaaattgataaggcatcgctgttaatatttttcacattaccttttggatttcttaattcagatattttctctccacaattttgagagaaaattaagaggggttgctgtccaaaaytggggagtcttggaatcaagttgtgattgtatgtttatataaaaactcagtgtgacctcagcaagtcacagcattttttcaatttgatgatctctattttaaagtgagaaagtttttacttgcagagtgtttctgaatcctatgttaatcttttttaagttctgattggaggctctagtgatacgatttttagggcaggctacatttagctgtattttttccattatattttgaagtcagaatggtattgcaagt

SEQ ID NO: 24118 - DNA, 760 bp, Homo sapiens
tgcatacagttggctatgcagcagtaggcccttttggtgtattgtatagaaaatgagccatttcattgtttgggaaacttgtgtttcctccccttccccccatttttagtatctgttaaaagaagaaagcttttggctacttaaaaaaacttggttatgtttagtttggtgccttttgatctggtcatgacaatgggagcaatactcttatgcttgctacttgtttcatttaaactgaaaagtccggaaaaaatatattagtacgcaggagtgctaacttgcaaatgagtttttcttgactgctaataactcaagcaaaaagataattatgtgttataaactgtgcatgcggaaagtgaaatgaaattcatccgcttcatattttttaggaaaattgataaggcatcgctgttaatatttttcacattaccttttggatttcttaattcagatattttctctccacaattttgagagaaaattaagaggggttgctgtccaaaactggggagtcttggaaycaagttgtgattgtatgtttatataaaaactcagtgtgacctcagcaagtcacagcattttttcaatttgatgatctctattttaaagtgagaaagtttttacttgcagagtgtttctgaatcctatgttaatcttttttaagttctgattggaggctctagtgatacgatttttagggcaggctacatttagctgtattttttccattatattttgaagtcagaatggtattgcaagt

SEQ ID NO: 24119 - DNA, 2893 bp, Homo sapiens
tggaaatctcatgagtgaaaaaaacaaaataaaaattataggtacaacctgataatagtcatatgaaacattcacatgggaaaagacctgcaggggatatacaaagatcatagttatggagttatggtagaattatgaaatgttttttatttttcattttttggttatgatactcctttttataattaaaatatattaatgcaacttataataaacatatttatataaaactaagaacttaattttatttgggaatttattactgggaacatgcaaattcatatacctaaaagactcttgctgtcaagtgttagatgtgaaaaacttgtgtgttttccttaattttatgtaattactaaatatgtcagtaagataaatgttatttaaaacctgtaggtaataaactaaaaatcctacattccttgacactcaccagttgactagtttgctgaggaaatagcttttgaaaatagatgatgtgtggaggtagtagaagtggcagttggaaagatgggtttcaagttgcttatgttatgtatgscctttaaaatgaagatgtgaaaggatttgtgcctattattacttataaccatgttaagtaatttagccttaatgaaagaaccgtattgcagggagttctgtaagttaggctgtattaatcagaactttttttgtatgcacattgagaaaatagatcagcaagttttctaattgctcatatctaattacattcctgctgttgaactgttttgacatcctggaaaagggtgagtcacaaaagaggaaggaactacacttatgatccattgtaaacacttttgggtgtggtgatgtgtttgtgtgtatcctagaacaaattatctcatttaatgcatggaggctatcaggtaggtttttgttgttcattctaacctgtaaggtgaaatttcttgtggttgcttctaactgctagtattgaagatactcctgaaagaggaccaaaagtagtgaaggaatacttttgcattgtgaggatgaaaccctattctgtagtcatttttgcatgaactgacttattaaaactaacgttttaatcacatagtatactattgcttttcattgttcatgagtaataacattgattcagttaaatagcaataattagaaaaaaatgattaaaataacattttcattgaaattgtgaatacacatgcttaaattagaaactacttttaaacacaaagccaactttataaagaacagagttttggaaacttcctggaatgcccctcttttccaccttcatagtttcaaaactttggcaagtatcccagttgtatgcttgttgatgaccctttctttctgctgggctccccagttccttgtttggtactagcacatgtatcaaacagggaatcagcacatgccccagatccctgtttgatccagcacatgtagataggccttgtggttctttgaagggacacagagatagtgaagagtaagatgtaagtgctgaggcttagtacaggacagaccttgggagtgcagaaatcagcctgctgtgttatttgcctgctgttaagtgcagttcctgctggactggaggtgaagtgagaacagcaggctcttgcctcacattttggcttattgcctggccttgacagtgagtccctccttatatattttgtaccgtaggcactttcctctccctactctcagcccagccccccctttttatttttattttattttatttttatttttatttttttgagcacttttgcccaggctgcagtgcagtggtgtgatcttggctcactgcaacctctgcctcccaggttcaagcgattctcctgcctcagcctcctgagtagctggggctacaggcgcccaccacgacgcctggctaatttttgtacttctggtagagacggggtttcaccatgttggccaggtggtctcaaactcctgactttgtgatctgcccgcctgggcctcctaaagtgctgggattacaggtgtgagccaccgcgcccggccagcccagctcttttgtgtattactgcgttagcaagttaccccattttattttctctaagggagaaactattatttttgccctaaaactccataatgaagggcttttttttttttttttttttgagacagggtcttgctttgtcacccaggctggagtgcagtggcaggaaacatggctcactgtagccttgacctcctgggctcaaacgatcctcctgcctcagcctcccgtgtagctgggaccacaggtgcacaccagcatgcccagctgattttttgattgatagattgaatttttttttttttttaatagagacaaggcctcatttcgttgcctaggctgatctcgaattcctgggctcaagtgatcctcccaccttggcctcccaaagttctgggattacaggtgtgagccactgtgcctggcccaaaagaaagtttttaaattggttcttgtatatatgactttacttggccagtgctatcacagatttgcacatgaatgttagagaatatttggtttataatattcacaaattacaagattacaatttacaatattataagattcacagtatttcttatgtatttaaagtagtttgatttatatagtttcataacaacataagtattgtggaaacaatttagattaacaaatatttcttggttgctttttactctaggttttctaactttttgacttaaaaaagttctctaaggtatattttgatttgttgtacttactaaaaaattaatactttctactgctgttgttttttacagcagttttctgtgctgtgttttacatttgttattgatgataagaatgagaagtggatttgggaggcaaattgccagggtcatgcatgaa

SEQ ID NO: 24120 - DNA, 839 bp, Homo sapiens
tttgcatttaaaattgttaatattgcacccaacagtatgtctttgacacatttgcattgtcaatctttcccacaatttgcaaaaacaggagagaaatctgaaactaacagaattacacaagctaagttttctgtaaaaaaagaaaaaacttacaattttttatttacaagttaaggaaaagttgtaaacgttcaggattttacttccacagaataaaaagccatacattcttttatcatacctagaaaatgaacatatacacattgtgattacctcataggaattcaacaggactgatattgtgaacattcacagcccaatggtaaaaaacagaattctcgaactatggaaactagtgtgtgaaagacacagaatgagaaaaatgtctggaaaaaaattactttctcctctttgaggagtttccataattacctaaagtyatcttcaaatttaaaaggacacaccattccccagtcttaggaatgtggctgccaataaccttttctctcgacataagacaagtgaaaaagagtgaggtctttgttcaagtccctgataaaatactttgcatataggcaggcacaaaagtttgctttccaaaagaaagctttgcaaaatattctgcaatttattactgatatcctcagtttttaaaaaccccctttttaagcccataaatatttatatgctttaaaaaatgagagtagggaatcaaatcatttggtactatgggaagctgctaaaataatatttgatagtaaaagtatgtaatgtgctatctcacctagtagtaaactaaaaataaactgaaactttatggaatctgaagttattttcct

SEQ ID NO: 24121 - DNA, 606 bp, Homo sapiens
tggctccctgttagtcagggaagatgaacctagaggaagtagaaggaagaagagtgacatgcaggaagcttccctagaaacattctcattagccttccttgggtctgtgcctcgatacaccagcccatcatcatcatgatcatcaacaccattatcatcatcattgtgctctgtagcagccacagacctggcagttctcaatggccatttacagaatgcccacatgtgctgggctctgtgagagactatacagacactggacaatcaagtgaagagtgattctgcttgcaaatggacagtgaagagagtgcttcccatcccttcgtatttgcctttgatgactaagaatgaggcacattgttgcctgtggagttaggaaaacaactttccaatgacccactttcccatatctcttagctattgcagctcatacaatctcagggctggaaaagatcctagaaatgatcagactcrctttgcaaaaggacatgaaagtccagagaagctgtgactcacctgaagtcagggaactcatcaatgagaacaggaacaggagcctgggttacctactttcaagctcagcagactttccagcataccaccatg

SEQ ID NO: 24122 - DNA, 615 bp, Homo sapiens
ccctgtctttgttatttttttcttttttctttttccttcatccattggctgtttttctcctgtatcagtggttctcaacagggagagatttgacaatgtcaggggacatttttggttgtcataactggacgaagggcactcccagcaaggaaggtcacaaaacattctgtaagacacaagagagcccctgcctaataaatagttacctgaacaaaatgatcaatacttccaaggttaagaaatcctgatctatgtcttttggggtttctcacaagtcttctttctgtayataatgcaactgttgtcataatataacaagtataaaaaaattctctgtagttttgaagagcaaaaattctgagtcaagagacttgttttctatataagaaggtcttagagacttgctacttgaccttgaataagtcattaaatctatcaggaacctcatttcttcaagaaaaagttgttggtaaggttttggccatgcttcctaggtaagtaattaattcattaaagaaacttcatattgacaaacaaataaataaaacagcatagacaccaccctctcaatattgagatgtaggttgggtttagaattcaggcatgatagaccct

SEQ ID NO: 24123 - DNA, 994 bp, Homo sapiens
tctgggtgtccacatcctgtagttttggacctgttcttctctctgccctcaacctaacagctgatggggcatccaccaggaagcgcatccgtgggcagggaggaggccgtgggcagccttgtcctgtatgtgagacactgctcagactcggtgaccccctgttcattaacgtgggaggaaaggaaaacaaaattcactgtgaacatctatacatcatcaaagaaaaagcaatgagaaaaaacaggaagtgaagcccagctctaatagtttatttctacttggaaataaataaaacttaatatgcctgatgtgttatgtaaatacaacaaacatattttaaaaactataaaaattatgtaaaggcacatggcttacactaaaagaaacatttaaaataacaacacccttgaaatgcaatcccaaaacacagcatacattttatttcagttccatgtatggactggttttatttaaatgtctgtattaggtttcactatttggttgtttaaatggagcatttaaaatcttattgtattacaacttatatcaacataatcatcttgctgtttttctgtatccccttaaaattccctaaacaaatatttattaagagcccagggtgtatcatgccagaactcaggcagtcacagacataacctgtttcatttttcattttgatcaacagaattatgttttctgttaagcttgttgtttttagttcattagattctagacgtcattacagatcaaagacgaaaaatttctatcatctttaagccacccccacaacactcactactgaattkgaaccaaaatcttctcctagaaatcctcgttggcggctcgatagtaagagctgccatgtatcaggctcacctgaggacagacgctggttaaaccaagttgaagttttaattcttcccatcttcaaagactgagcatctttgctctttttgctcataagtgaaacactccaaagtcatttgccaggatc

SEQ ID NO: 24124 - DNA, 807 bp, Homo sapiens
tggtgaacagccgggacagctcaaatactagtggagtgcagctctctgcccagcccagcaggtgactgtgcctcagtgtaagctaatctaatctgcaagatgacagacctcaaaacggcccatacaatgaaatgcccatggcttgcaaaactttaattcatgcagaacctttcctcacaaacaaaatcttacacagcaccccatcttggcttcagcagaaccaggaaaaataaaaaattggcaggggaaggaaataaacagaacaagtggtatctgaatttatttgatatattctggttgatggcattaattatgacatttaaagtcaccatgaggacaactcattagtaatatcagtrtgttaaaatatggtgcataacatttttaatatatgtacagtcatgcactgaataacatttcagtcaatgaggaaacacatgtgcaacagtgatcctgtaagattataatggagcatatatagagatctaatatatggcacttaatgttggcatggcagatcaagtatgggaaatgactgatatttagtaacagtgctgggacatttgattttccataataaaatatataaatgaaaatatatatcccatctagatttgttgaaatacaccctatgatgttcacacaagaatgaaattgcctaatgatgcatttcttaaaacatgtccccatcattaagtgacccatgactgtatacacacacacatatggtgacacttaaatcaaatgattgcagtattcctgaaacacagaacattttgcaaacaatttacctacattcataacatt

SEQ ID NO: 24125 - DNA, 783 bp, Homo sapiens
tcctatccctgccttccatcttagctttccagcatactcttcccaggttctttgggctactgacaagcactccagacccaaatacacatgctcccacctgaggctgggaaatgtaccaagaactgcatagaaaatatactggacaaaaggcactccagtctcacagatctccagtcccacagtctatatcaccagttttagctgtttgaagttttagaattccttttcaaaaccatagctagcatttctttggctagagaaaactgtgtgaaatgcagcctaccataggatcactgattacaacatgcattcaacattcaatacatattgactgagcaactattaggttgaactatgtgacattattgacattcgactgcytctgacctatcaaaatggcaataaagctcaacttaatatttactctatgccaggcagtaggctaaggaaggatttgggacaccatgacaaacaacacagaagtaacccctatcttaatggaacttaaaatctagttgattaaaccattacttacaaaagtacaatctaacttcaggattgtaattaattataaatgcatttatttgtttactgcctgacttctttgctagcctataaactacacaaagatgagggttatgtctcctccatttcacacactggcaaagcatatagcagaatacatcatatatttgttaaatgtattgattagtgttacaacagacaattgcatgtgctatggaagcatttggcagagagatctaatctaatcttggaaggtga

SEQ ID NO: 24126 - DNA, 526 bp, Homo sapiens
attattgtaaaatctgcaaacaatgtagatatgtagagagtcccttccttggagcttgaccttgtcagacaggtatagatgagtgttccggggcagccgtaaaaactgccagagactgggctgcttataacagaaacgcatggtctcccagaagcccacattcaaggtgtccaaaggcctggctcctggaggctctggaggagagcctgttccctgtctctcagcttctgccggttgccagcaagtgttgccgttcattcactccagccactgcctccatctgcacacagcaaaacagcgtatcctgaagtgctcaaccttatagccattattttaaaatatccggaacacacaggaccgtgggagtggctgttggagaaattttcatgaaggaagaaagattacaactaagttttaaaatgctagttttgtttgttttgtctkggagaggaggtaaaagtgggagtaaaaatagggagtttggtgtaaggtgggaaaagcaaaggaaccccgcatggatgggctg

SEQ ID NO: 24127 - DNA, 585 bp, Homo sapiens
tttcacgctctaaacccagataacttttcaaacccaagttctgttgattcccctactttgagtgctccatagatgctcatttgtctactaaacactgccccaggcaattaaatattccaaagtgaccagcagaatttttatgttaattctgacattgcgttgttagtacaagtgtttttcccccttcaaatttatgtctttgttactgataaatgtaactgataatgcgtttttcagctatgttgccaagcatatttatataaaaatatactcagattgttttcagaatttgacaaagatgatagcaacaatgataatcttatttgttttataccaatctttatgtgttattttcatcatttcttacatattggggcctaccatacattgtacggtgaaattagtgctatgcatcatggtagaaatataaattggcaaaagtaatttagaaaatagttcccttgtttcttaaaaaaattaggctgggtgtggtggctcatgcctataatcccagcactttgggaggcagagatrggtggatcacctgaggctgggagtttgagactagcctgaccaacacagcaa

SEQ ID NO: 24128 - DNA, 618 bp, Homo sapiens
tgacctttgaaaaactcagcacagatagtggcacttaggaccaagggcaggagatccctaatcccatcaccatggtgatagggcataaacattccagggtgaaggcacaatccacactgtgagktccaactgctgccatgcagacaggtgggcttttacaagtacaggaaggtcatcaaaggctcagtgttttgtttcaaaaactgaatcccaagcctacacattattatgctggcttcttaaaataagttatgagatgggaaatagggcacccacaaatatatatatacataaaattatatataatatagtatatatatatatatatatatatataatttgggaatttgggaataaactgaatcccaattcacactgggactacaccagctgccaccatgcctggctaattttttgtatttgtagtagagacagggtttcactgtattggccaggatggtcttgatctcctcaccttgtgatcctcttgccttggcctcccaaagtgctgggataacaggcctgagtcaagatacatattttttaaatgaagaaaaatttcaaagatactctgcttggtacaataatcaaatatataaattgaggaataaaacataa

SEQ ID NO: 24129 - DNA, 618 bp, Homo sapiens
tgacctttgaaaaactcagcacagatagtggcacttaggaccaagggcaggagatccctaatcccatcaccatggtgatagggcataaacattccagggtgaaggcacaatccacactgtgagttccaactgctgccatgcagacaggtgggcttttacaagtacaggaaggtcatcaaaggctcagtgttttgtttcaaaaactgaatcccaagcctacacattattatgctggcttcttaaaataagttatgagatgggaaatagggcacccacaaatatatatatacataaaattatatataakatagtatatatatatatatatatatatataatttgggaatttgggaataaactgaatcccaattcacactgggactacaccagctgccaccatgcctggctaattttttgtatttgtagtagagacagggtttcactgtattggccaggatggtcttgatctcctcaccttgtgatcctcttgccttggcctcccaaagtgctgggataacaggcctgagtcaagatacatattttttaaatgaagaaaaatttcaaagatactctgcttggtacaataatcaaatatataaattgaggaataaaacataa

SEQ ID NO: 24130 - DNA, 618 bp, Homo sapiens
tgacctttgaaaaactcagcacagatagtggcacttaggaccaagggcaggagatccctaatcccatcaccatggtgatagggcataaacattccagggtgaaggcacaatccacactgtgagttccaactgctgccatgcagacaggtgggcttttacaagtacaggaaggtcatcaaaggctcagtgttttgtttcaaaaactgaatcccaagcctacacattattatgctggcttcttaaaataagttatgagatgggaaatagggcacccacaaatatatatatacataaaattatatataatatagtatatatatatatatatatatatataatttgggaatttgggaataaamtgaatcccaattcacactgggactacaccagctgccaccatgcctggctaattttttgtatttgtagtagagacagggtttcactgtattggccaggatggtcttgatctcctcaccttgtgatcctcttgccttggcctcccaaagtgctgggataacaggcctgagtcaagatacatattttttaaatgaagaaaaatttcaaagatactctgcttggtacaataatcaaatatataaattgaggaataaaacataa

SEQ ID NO: 24131 - DNA, 618 bp, Homo sapiens
tgacctttgaaaaactcagcacagatagtggcacttaggaccaagggcaggagatccctaatcccatcaccatggtgatagggcataaacattccagggtgaaggcacaatccacactgtgagttccaactgctgccatgcagacaggtgggcttttacaagtacaggaaggtcatcaaaggctcagtgttttgtttcaaaaactgaatcccaagcctacacattattatgctggcttcttaaaataagttatgagatgggaaatagggcacccacaaatatatatatacataaaattatatataatatagtatatatatatatatatatatatataatttgggaatttgggaataaactgaatcccaattcacactgggactacaccagctgccaccatgcctggctaattttktgtatttgtagtagagacagggtttcactgtattggccaggatggtcttgatctcctcaccttgtgatcctcttgccttggcctcccaaagtgctgggataacaggcctgagtcaagatacatattttttaaatgaagaaaaatttcaaagatactctgcttggtacaataatcaaatatataaattgaggaataaaacataa

SEQ ID NO: 24132 - DNA, 618 bp, Homo sapiens
tgacctttgaaaaactcagcacagatagtggcacttaggaccaagggcaggagatccctaatcccatcaccatggtgatagggcataaacattccagggtgaaggcacaatccacactgtgagttccaactgctgccatgcagacaggtgggcttttacaagtacaggaaggtcatcaaaggctcagtgttttgtttcaaaaactgaatcccaagcctacacattattatgctggcttcttaaaataagttatgagatgggaaatagggcacccacaaatatatatatacataaaattatatataatatagtatatatatatatatatatatatataatttgggaatttgggaataaactgaatcccaattcacactgggactacaccagctgccaccatgcctggctaattttttgtatttgtagtagagacagggtttcactgtattggccaggatggtcttgatctcctcaccttgtgatcctcttgccttggcctcccaaagtgctgggatwacaggcctgagtcaagatacatattttttaaatgaagaaaaatttcaaagatactctgcttggtacaataatcaaatatataaattgaggaataaaacataa

SEQ ID NO: 24133 - DNA, 1130 bp, Homo sapiens
tatcctggcctgcccctgttcgtggcccaagcaaaaagattatgattttattttctattgtgaaattacagaaatagatatatgtagatctgtagaaagtacgcttttatagtactaacaattttctgtagttacaattttcatggtgtctactggttgagagatgataggacttattcatggaatttacactctggtggtttgataaatatataacatgttgaaarggagtttcgtggaaaagtaaacgttattcatcagggttttagtttctcttatatttgctttcagctgagaatattgtaagttgtttgtttgatttttatttattttttcatttatttggcttttttctagatgctttacctaatctaatccaaataagaacagcacttaacaactctaaatatggcatagggggaaatatgtatatccttttctttatattatcttttgtttcacatgctgagggctgtggaaggcaaaatgtggtgaggtgctattttatagcatggttaatgcttatcagtaattttttccctctgaccttctgcctcagacaattaattttcttgaactgctcacacactggcagaacatggaggggggataatgttagtactagtgaatataatcttggaagaaaagctgtgcaattattcaaagacctaatcttatctcttgtttcatttttatatcacaagtctacatttaaaagtattagatatcctgttctgctgtcccacaccttcaaacctcagtaaataaatgctgttaagtgccaccaggagtgaaagagcttgtaatgagaagtgtgaggagatatgtgctccattcatcattctgttcaggccaatattgaggctcttgttatcagcaggattcgtggcgatgtcatcacggctggcataaatcttctgtcagtgtgggtcggactgatgccctattaaaaccctgctttcacctaatcacagaatgacctttcgatgtctttaattaacctctgacctgaaccatgccaatgtcttgttggtaggtaaatctatggcatgacatttgcttatgacactgcatttgtcttgctttaatcatcatagctttcagattatggcttgaatgaaatacagttg

SEQ ID NO: 24134 - DNA, 1130 bp, Homo sapiens
tatcctggcctgcccctgttcgtggcccaagcaaaaagattatgattttattttctattgtgaaattacagaaatagatatatgtagatctgtagaaagtacgcttttatagtactaacaattttctgtagttacaattttcatggtgtctactggttgagagatgataggacttattcatggaatttacactctggtggtttgataaatatataacatgttgaaagggagtttcgtggaaaagtaaacgttattcatcagggttttagtttctcttatatttgctttcagctgagaatattgtaagttgtttgtttgatttttatttattttttcatttatttggcttttttctagatgctttacctaatctaatccaaataagaacagcacttaacaactctaaatatggcatagggggaaatatgtatatccttttctttatattatcttttgtttcacatgctgagggctgtggaaggcaaaatgtggtgaggtgctattttatagcrtggttaatgcttatcagtaattttttccctctgaccttctgcctcagacaattaattttcttgaactgctcacacactggcagaacatggaggggggataatgttagtactagtgaatataatcttggaagaaaagctgtgcaattattcaaagacctaatcttatctcttgtttcatttttatatcacaagtctacatttaaaagtattagatatcctgttctgctgtcccacaccttcaaacctcagtaaataaatgctgttaagtgccaccaggagtgaaagagcttgtaatgagaagtgtgaggagatatgtgctccattcatcattctgttcaggccaatattgaggctcttgttatcagcaggattcgtggcgatgtcatcacggctggcataaatcttctgtcagtgtgggtcggactgatgccctattaaaaccctgctttcacctaatcacagaatgacctttcgatgtctttaattaacctctgacctgaaccatgccaatgtcttgttggtaggtaaatctatggcatgacatttgcttatgacactgcatttgtcttgctttaatcatcatagctttcagattatggcttgaatgaaatacagttg

SEQ ID NO: 24135 - DNA, 1130 bp, Homo sapiens
tatcctggcctgcccctgttcgtggcccaagcaaaaagattatgattttattttctattgtgaaattacagaaatagatatatgtagatctgtagaaagtacgcttttatagtactaacaattttctgtagttacaattttcatggtgtctactggttgagagatgataggacttattcatggaatttacactctggtggtttgataaatatataacatgttgaaagggagtttcgtggaaaagtaaacgttattcatcagggttttagtttctcttatatttgctttcagctgagaatattgtaagttgtttgtttgatttttatttattttttcatttatttggcttttttctagatgctttacctaatctaatccaaataagaacagcacttaacaactctaaatatggcatagggggaaatatgtatatccttttctttatattatcttttgtttcacatgctgagggctgtggaaggcaaaatgtggtgaggtgctattttatagcatggttaatgcttatcagtaattttttccctctgaccttctgcctcagacaattaattttcttgaactgctcacacactggcagaacatggaggggggataatgttagtactagtgaatataatcttggaagaaaagctgtgcaattattcaaagacctaatcttatctcttgtttcatttttatatcacaagtctacatttaaaagtattagatatcctgttctgctgtcccacaccttcaaacctcagtaaataaatgctgttaagtgccaccaggagtgaaagagcttgtaatgagaagtgtgaggagatatgtgctccattcatcattctgttcaggccaatattgaggctcttgttatcagcaggattcgtggcgatgtcatcacggctggcataaatcttctgtcagtgtgggtcggactgatgccctattaaaaccctgctttcacctaatcacagaatgacctttcgatgtctttaattaacctctgacctgaaccatgccaatgtcttgttggtaggtaaatctatggcatgacatttgcttatgacactrcatttgtcttgctttaatcatcatagctttcagattatggcttgaatgaaatacagttg

SEQ ID NO: 24136 - DNA, 1130 bp, Homo sapiens
tatcctggcctgcccctgttcgtggcccaagcaaaaagattatgattttattttctattgtgaaattacagaaatagatatatgtagatctgtagaaagtacgcttttatagtactaacaattttctgtagttacaattttcatggtgtctactggttgagagatgataggacttattcatggaatttacactctggtggtttgataaatatataacatgttgaaagggagtttcgtggaaaagtaaacgttattcatcagggttttagtttctcttatatttgctttcagctgagaatattgtaagttgtttgtttgatttttatttattttttcatttatttggcttttttctagatgctttacctaatctaatccaaataagaacagcacttaacaactctaaatatggcatagggggaaatatgtatatccttttctttatattatcttttgtttcacatgctgagggctgtggaaggcaaaatgtggtgaggtgctattttatagcatggttaatgcttatcagtaattttttccctctgaccttctgcctcagacaattaattttcttgaactgctcacacactggcagaacatggaggggggataatgttagtactagtgaatataatcttggaagaaaagctgtgcaattattcaaagacctaatcttatctcttgtttcatttttatatcacaagtctacatttaaaagtattagatatcctgttctgctgtcccacaccttcaaacctcagtaaataaatgctgttaagtgccaccaggagtgaaagagcttgtaatgagaagtgtgaggagatatgtgctccattcatcattctgttcaggccaatattgaggctcttgttatcagcaggattcgtggcgatgtcatcacggctggcataaatcttctgtcagtgtgggtcggactgatgccctattaaaaccctgctttcacctaatcacagaatgacctttcgatgtctttaattaacctctgacctgaaccatgccaatgtcttgttggtaggtaaatctatggcatgacatttgcttatgacactgcatttgtcttgctttaatcatcatasctttcagattatggcttgaatgaaatacagttg

SEQ ID NO: 24137 - DNA, 623 bp, Homo sapiens
gtgaagtggtagaaatatatagaagatactgacagcaaggaatattcctcagagttatttgctctattctgagcagctatttcctaaacatgtgctttacttgagctggctgcgctttgtgaacaaacatctgcgggaacaccgtgcagcacagtgttatgtgccatgtgcctgctttcctaggtagctaaccctcaccaagtgtgatatgctgttggcgaaacacagctactatcccaaaactgcttttgagatgcagtagctttctctggagagrgagtggcaccccttctgtgatgttcttcagtaataaagggagtgaatgaagagccggggaggagaagcaaaggttctttttacactttacacccttaccctcagagcgggtggatcttctgcaggtttttaccctcagggcgggtggatcttctgcaggtggatcttctgcagggtggtgttttaatgataataactggagttttcagttgggagaagtgaagagcagctgtttctgggtatcagcctaacaaagctgggaaacatttcatgaaaccatttgtccagtcttcggtgtagaatagtctcttgagttgtgactcccagctttgcagctggctagctat

SEQ ID NO: 24138 - DNA, 3040 bp, Homo sapiens
ccaggcttagagccccaggtggctaacattatctagttagaatttagtaataggacatcccctgccttgtctaaatccatctggcccttcccctctggggggttcagatagggaggattgggaccttctataaatttgcttcttgaataaacttgactgaaaacgttagttttaagagaaggttaataatagcacagatggaaaggggaggcagaaggaaaatggatctgtgacaggctgtacaaataaatgaccctcaggaaacactggtggggtctctccagaatctggactagaagtcggaaaccccggtcaaggttcccagtgctggtgggctcctcctgtctctagactatcacaataactgttggggtctccacctaacaatctttaaatttcttttcaggtctgaaatactacatttccatgacaatatttctaaaatacaaccccttcccggaagactgatcatatctggttattgacaaggggtcatgctgccaccctctctgctgccactggctgctgggagcttgtgggcagctcccagggactaaccctggcattatttctgtgggaccaccagctccagatttcctcagaaattggagggcaaaaacattttaaggaatgtgggccctgcaggctaaaacatcaaaatattttaagagcaaaacaaaacaaaacgaaatgaaacaaaacaaagctagtgaaaaccaaaacaaaccaaatagccttgtagttaactgaattttctccactttttcaatttttttttttttttttttggtgggggaatgtttttctttcctaaaaacgttttgtcagggaacagatgaggtattctattaaaatgcatttgctgccactatagggatgcttcatagatcaacatgagaaattcctccccaaactcctccccccaccaaaaaaaagtgtcaacaagtatcgttccatagatgatttgggggaagttttgtggttctctaatctgtgattttcaaatggtggtgtgtataagactcacctggaaagcttgctaaacacgaagatccttgtctcagcctcagtaatctgattgcacaggtgtgggacagggtccgggagygtgggtcttttatgaggttcccaggtggttttgatactgatggtttaagaccaccatccaggatcctgcactgagggaaggtaggtgatgcagtctctatccaggcccatcctgagggtggtggcatgaacctccacccctgcccaattttcactcaggtttcagattaatatcaagggcaaccctgatgtgatcagtatctcaacaacagagggtaggatacaatttaagggcatagttggagaagttcaaaaatctatctttaaatccctgtttgctagctttgtgacattgggcagtaatatggttaggctttgtgtccccacccaaatttcatcttgaattgcaatcctcataattcccacaatccgcatgtgccaagggagagacctggtggaagtaattgaatcatgggggcagtttcccccgtgctgttctcgtgttagtgagttcttacgagatctgatggttttataaggggctcttccccggcttcacttggcacttcttcctgctgccttgtgaagaaggtgctttgcttccccttctcgttccaccgtgattgtaagttccctgcggcctgcccatccatgctgaactgtgagtcaattaaagctctttcctttgtaacagcatgaaaacagactaatataggcaggttgcttgtattagataaccttcctgtctcgacctcctcgttgttaaaataatccatagaaagcccctgggttgaggtaagcattcaacaaaagttagctcttattatggtggtaggagttaggatatgggaggcatggtgaaagtgaagtttgtacacagaaagtaacaagtgtaggtgagtatgtcaaaatattggaagctttgtgcacaacccttgtttgtgggagtgtaaaacggtgtagctgctgtggagaacagaaaaacaagtggagcttggatcccaagggttgcagatgacaggggtgaaagatatcccatcctgtcccaggccaacttctgtggctccctggtgccctgagtggcagtaaaagtcaaatgtcacatgggggtggggtccaaagcttggagcctgagcaggagagaaaagtggttctcagcttggcatgcacacgatggaggtgactcaatgtcaagtttctgagcatttgagggcacctggtgacataatggaactcatagccaggtgtcccatctccaagtccaccttaactatatcctgggctgttctcaacacaccagcccctgggcagcccccagcacttggggtgttggctaatgcctcctagaaatggctttctgggagtgactcagcaaacaaggggttgttgcttccagagggccagcagggctttgttagtagattgctctggagccaacacatatgctctagttttttccaggtgcctatcaaaatttgtgcacaaacagtgcaggcatgaggtatgtgaaataaattccatatcgttttcctgtatgcaaaagccctgtaccttgactttgacagagacagcaaacccttctccccagtgatgtgtctgagtttcagagcatgaattgagcctttttgagctcttaacaatgttttgtttcagtcagtggtaaagtctgctgacaaggaaatacgaataaatttgaagagtaaaataagggggaattttcctgtatggaagacagaaaaatcaaggtagtcagtctagctgctgatacctcccgacattgatgatggagaggaggagaaagtcggctctcgaaacttaccgatccgttttccctttccctgcatcctttttctcttttctccaaccgcttacttccacgagatgataaggaggaagggaacaaacacaagagcagagcaaggaattgtctttttggggataaatctctgattttaatcatattttgaatttctaaagttacctttcagtcttg

SEQ ID NO: 24139 - DNA, 541 bp, Homo sapiens
agctgtgcccatttgcagtttcttccatggtgtgtcagagttcatctcactccctctaacaccaggaagtatcacattttattccctatcttagaaacttaagaaatgacattttactgtattataatatatatttctttgacaattaatataacctgtatggcctgctttatgtactcagggtacaaatgtgatcaatttgctctagtttttacaaagggttatttaaacattattgccaatatttgcaagaggtttaatatgtccatcytgagacctcccggcaacacccccatctcagcctcatctgacagtccacagagtggaattggttcaacttccaaatgttggagaaggagataactggagtctcagcagcatcttctgccagaggttgccaatgggtctctgttgtagaccgttcttatacagttcaggtccttatctgtggacctttcacttgctcacccattggtgccaagttcacagtggtgctaatttggctgggtgttggggaggggcatgcttatagcatccacca

SEQ ID NO: 24140 - DNA, 541 bp, Homo sapiens
agctgtgcccatttgcagtttcttccatggtgtgtcagagttcatctcactccctctaacaccaggaagtatcacattttattccctatcttagaaacttaagaaatgacattttactgtattataatatatatttctttgacaattaatataacctgtatggcctgctttatgtactcagggtacaaatgtgatcaatttgctctagtttttacaaagggttatttaaacattattgccaatatttgcaagaggtttaatatgtccatcctgagacctcccggcaacayccccatctcagcctcatctgacagtccacagagtggaattggttcaacttccaaatgttggagaaggagataactggagtctcagcagcatcttctgccagaggttgccaatgggtctctgttgtagaccgttcttatacagttcaggtccttatctgtggacctttcacttgctcacccattggtgccaagttcacagtggtgctaatttggctgggtgttggggaggggcatgcttatagcatccacca

SEQ ID NO: 24141 - DNA, 541 bp, Homo sapiens
agctgtgcccatttgcagtttcttccatggtgtgtcagagttcatctcactccctctaacaccaggaagtatcacattttattccctatcttagaaacttaagaaatgacattttactgtattataatatatatttctttgacaattaatataacctgtatggcctgctttatgtactcagggtacaaatgtgatcaatttgctctagtttttacaaagggttatttaaacattattgccaatatttgcaagaggtttaatatgtccatcctgagacctcccggcaacacccccatctcagcctcatctgacagtccacagagtggaattggttcaacttccaaatgttggagaaggagataactggagtctcagcagcatcttctgccagaggttgccaaygggtctctgttgtagaccgttcttatacagttcaggtccttatctgtggacctttcacttgctcacccattggtgccaagttcacagtggtgctaatttggctgggtgttggggaggggcatgcttatagcatccacca

SEQ ID NO: 24142 - DNA, 1119 bp, Homo sapiens
cttgaggcacttctgagcaatcatagggttatatggaacccagtttgaaaactaacactttagcatgttttaaatgctggggtggaaaagtttgcaatttccagacatggttctgactgtatgacttctttgtcctctgtcctctactctcccctgctgttcaccacctcaagtctcaaactctgaactcctcctccctaaacatagcctctttactttatagcaacagctgttatttattcaagctattattattttccaggcatgaagctaaggtcaagggctaatcctacaatatagatattctcattcatattttacacatgatgaaatagagactcagaaaagctaaatgactttcctaaggtaacacaactagtaaatggaaaatctggtgttccaatttgtgtctgtctgatcatgaaagctcacgaccttaacaagcacccactagtaccctcatcttcctctttcttctgaatctgattttaccttcattaggactctgaaccttagtttttctctattctctttaattctatcttggtttggattttttttttttaatccagaaacccttagctgtgtatgtcatgcctttgccagtatccaaagttttcttattctcctaactctttgaatttcacctgcgttgacaatccccaaccgcacacaatgccccaatgtctgcattctatttccaatacttatttccagtgtctatttttaagtatgctgttgtggtgaattaagatgagaccgtctgagtgtagtaagtatccacgccctcctttctcaactgggtcctcacttctgcaggaaactcctttgaattttattccatctgtcaattctctgttatgtcgccttcatactcactatgccgtaattaagccctcatctcatctgttcttcatcattttatcrcagcttataattttatctttagctttactttaggtctttcaaggtgagctctcttaaataattaattcttttatcattacagttgtttgaaaacttgctccaaatagtggtcgttcaaacagggtaaagtctgttttctttctcttatgtatagttaggaagagggaagttcagggttctatgttggctcaa

SEQ ID NO: 24143 - DNA, 1119 bp, Homo sapiens
cttgaggcacttctgagcaatcatagggttatatggaacccagtttgaaaactaacactttagcatgttttaaatgctggggtggaaaagtttgcaatttccagacatggttctgactgtatgacttctttgtcctctgtcctctactctcccctgctgttcaccacctcaagtctcaaactctgaactcctcctccctaaacatagcctctttactttatagcaacagctgttatttattcaagctattattattttccaggcatgaagctaaggtcaagggctaatcctacaatatagatattctcattcatattttacacatgatgaaatagagactcagaaaagctaaatgactttcctaaggtaacacaactagtaaatggaaaatctggtgttccaatttgtgtctgtctgatcatgaaagctcacgaccttaacaagcacccactagtaccctcatcttcctctttcttctgaatctgattttaccttcattaggactctgaaccttagtttttctctattctctttaattctatcttggtttggattttttttttttaatccagaaacccttagctgtgtatgtcatgcctttgccagtatccaaagttttcttattctcctaactctttgaatttcacctgcgttgacaatccccaaccgcacacaatgccccaatgtctgcattctatttccaatacttatttccagtgtctatttttaagtatgctgttgtggtgaattaagatgagaccgtctgagtgtagtaagtatccacgccctcctttctcaactgggtcctcacttctgcaggaaactcctttgaattttattccatctgtcaattctctgttatgtcgccttcatactcactatgccgtaattaagccctcatctcatctgttcttcatcattttatcgcagcttataattttatctttagctttactttaggtctttcaaggtgagctctcttaaataattaattcttttatcattacagttgtttgaaaacttgctccaaatagtggtcgttcaaacagggtaaagtctgttttctttctcttaygtatagttaggaagagggaagttcagggttctatgttggctcaa

SEQ ID NO: 24144 - DNA, 538 bp, Homo sapiens
tgaaagacaaaattactatttatgtgcagtttatgtaaatttttgcagtccttaagcacgaaattataaaatggtatgacccttccattaaaaagacttaagcagttctagcctgcacagagcctagatgatcagaggtcccttctctcagtcttgaacagacttgcaaggggttgatcctaagtcacactttctaaaaggccgttggtaaggtctaggatgaagcaatgctgaaaaatcatgtcttatgagccargggagtctgtagcctggaaaacaaatgactaaagtgggaatgtagtggttgtcttgtgttaatgagaggtgaagccagctggacttcctgggttgagtggggacttggagaacttttctgtagctagctagaggtttgtaaaacgcaccaatcagtgctctgtagctagctagaggtttgtaaaatgcaccaattagtgctctgtaaaaacacaccaatcagtgctttgtagatagcaagaggtttgtaaaatggaccaatcagcaccctgtaaaatggacc

SEQ ID NO: 24145 - DNA, 538 bp, Homo sapiens
tgaaagacaaaattactatttatgtgcagtttatgtaaatttttgcagtccttaagcacgaaattataaaatggtatgacccttccattaaaaagacttaagcagttctagcctgcacagagcctagatgatcagaggtcccttctctcagtcttgaacagacttgcaaggggttgatcctaagtcacactttctaaaaggccgttggtaaggtctaggatgaagcaatgctgaaaaatcatgtcttatgagccaggggagtctgtagcctggaaaacaaatgactaaagtgggaatgtagtggttgtcttgtgttaatgagaggtgaagccagctggacttcctgggttgagtggggacttggagaacttttctgtagctagctagaggtttgtaaaacgcaccaatcagtgctctgtagctagctagaggtttgtaaaatgcaccaattagtgctctgtaaaaacrcaccaatcagtgctttgtagatagcaagaggtttgtaaaatggaccaatcagcaccctgtaaaatggacc

SEQ ID NO: 24146 - DNA, 537 bp, Homo sapiens
ttgttatggcagcaatcaaaatctaaagctaaacctttagcgatttggatccaacttatgtatccaaaacatcccagtgctctgaaacaggaatccactgctgcagtcaagtgggtctcctttcagtccctaaacatgctcatttgtttttaatcccacactgyttctccactcaaaccatttttcctgccataccaattcaaatctggtgctctaaggctgagtcagatgcaagtctcaactctttcaccttttaattggttgctcaatatgactttccacttagggacttccaagtgtcacaacatgcttccaaaaattatatatttgtgggccgggcacagtggttttcacctgtaatctcagtgctttggggagctgaggtgggaggatagcatgagcctaggagttcaaggctgcagtgaacaataatcatagcactgtgctccagcctgggcaacagagcaaggccctgtctctgaagaaaaaaaaaaaagtacatgcttttgtcaagtgtctttatcattttctcttcca

SEQ ID NO: 24147 - DNA, 489 bp, Homo sapiens
cccagtattcttcaaaattatctgtttctcattagactacagatttcattaatcctttgtgaaatatatggcaaatattttcaagaattatcaatgctttggtttaaaatgcccaggctttttatctcaggtaagaaggtagtccccactcaaaaattcttaaaatcttctcctatattgcctgttaattctctttttatgatttactcattaaaacatctgaaaatgatttttgtatgctaagataaggatttaatttttttctttgtttttatgactaggcagccattttttcctgaaatcatttgttgaaatcatttctctcccaactgactagaaatacctccttaatatmgtaaattctcaagtgtacatgcatcttttctttagactcatctgttgctttgatctttttgtctcttcctttaaaaataccaatctgctttgatattacgttttctagtaattcataggacaagtccctcttca

SEQ ID NO: 24148 - DNA, 1141 bp, Homo sapiens
gcgtcgctcaagctggcgggagttccccgcagggatgctccacagggcaggcctaagccscctaaggggctgcctcgactgtccgtcaattacctcgcttcccagtcagggaaccaagaaatatagcaggatgagtcacagacaaaactcctcagacaccagattaaagcaggaagaggttttttattcggccaggagcgttggcagactcgcgtcttgagagccgagctctccgaaaaagaaattcctagcccttttaagggcttacaactctaaggggtctacgtgaaaaaatcataatagatcaagtaagcgtgggaaacgtgactgggggctatatacatcagctaacagaacaaaaagttttacagtgctttctcatacaatgtctggaatttacagataacaccaatagttttggtcaggggttaataatattattattatcttagccaccagggccaggtggtggtgccaaggtcgtctagctatttatcttacttctgtttctttccaactttttgctttctcccttttctcctgtcttataaactagggaaaaggggaggttggggagaaactgagaaggacaacaggagaagtggtgacctcataccataatcctagcattttgggaggccgaggtgagagaatcgcttgaggccaagagttccctaccagtcctggtaacatagtgagaccctatttctaaaaaaaaaataaaaataataaaaaaaataaaaaaaaaaattaaataaataaataaataaattagctgggcgctgtggcgggcacctgtagttcccagctaccgggaaggctgaggagggaggatcgctgcttgagcacagtaggtggaggctgcagtgagcagagatcgcatcactgcacccctgcctgggggagagtgagacccagtctcaaagaaaaagcaagaacaaacaaaagtggtctctggaacaaacctggacaaacaacccttcgaatagaggcaaatttctcttcctggagaagccgtgccactggcaactccccagggggccagctcgggaaaagccagctgaaacgagaggacgttcaccgttcctcgcctcgatccaccggacttcagaaggctacacgcggcaggcgccgctcggga

SEQ ID NO: 24149 - DNA, 662 bp, Homo sapiens
tttctccacatggaaaaacacaaacctccttggtgatggtatggaaaagagccttgtaagatgcaggctgttggattgctcagctccaagaccaagttacactgagtaccagaggagagagctatgcttttctgagaccatgatcagaaatagcagtcccagaacattcaagattacttgaatatgcaactttgctgaattgactgtagtcagtgactgaagaattcattagtactcrgaagcactctggtgcttgcagacttcaagaactatttttatacccaagctacaataatttgtttagaccctcagtctcctccctaatactgtctctagggtcacaatgtgtttactttatttgcaagtgtgtttcacagttgcacctgaaagccccatttctagagcattccctccttaaaaagaacctacactttgtttaagctcctcctgagtttctctcatcttaaagcagtgtttgcaaacatataaattatgtaatttctccttcttcatgtatgtacatttttcattaggtcttcatgaactctctacatttcatgaatttgatggcttttattcatgtgtttctcctaacttagcctgatgatttccagtgttatatcctccacccctcatttttttctagattaagtggtgccctg

SEQ ID NO: 24150 - DNA, 637 bp, Homo sapiens
ttttttccccttatcacaagactgaaatgaaaattgatgcaatcacatgatggaatatttgttcaatctgacagattaatggtctaggaagaaaaaattaattttgatttcaccaaagaaaaacagtttgttgaaaatcaatcagytctcatacatagctaagaaaatattcactgcttttcaagccatcaaatgcttttaataaatatctaaaacaaggtggttaaaatgtcaactagcacttttattaagtatttttctggatttaaaaagagaaatgtcatagcatatcctatcttctagatttgtattctcttggtcaagagcaagcatgagcaagcctctgaagagctgcatctctaactgcaagcatccccacgtacttatatatatatgagcaggcactggccctctcttttctgacattccctgaagtgttcaatattaacaagctgttcattgaactaggaacaaattggttggaatcatatttgctatgttttattaaagcataggcaaaattacaatttcaaaactacaagggatctgattccaaatgttatttttgtatatgatgaattttaaaaagtgttaaagggtgatccaaagttgcctatctattcattagcatgtcttg

SEQ ID NO: 24151 - DNA, 624 bp, Homo sapiens
tccctgctttatcttttccccatcttcatttcatgattttatcataattttttaatacttgtatgagagttctccagagaaacagaaccattaaggtgtctatatttgcctgtctgtccatctatatctatctatatctrtattatctatctatctatctaatctatcatctatttattttaaagaattggctcatataattatggaggcttgtaagtccaaaatctgtagggtaggctggcaggcaggagacccaggaaacattggtgttgtagttggagtctgaatgctgcctgctggcagaattccttcttctttgagggaagtcagtcttttctttttgaaaaggaaaccttttattttaggttcataggtacatgtgcaggttagttatataggtaaattggtgccatggggctttgttgtactgattatttcatcatccaggtactaagcctagcacccaattgttattttttctgatccccttcctcctttctccctctaccctcaactaagccccagtgtctgttgttcccttctctgtgtccatgtgttctcactgtttagctcccacttataagggaaaacatgcactatttagtttttttgtttctgtgttag

SEQ ID NO: 24152 - DNA, 624 bp, Homo sapiens
tccctgctttatcttttccccatcttcatttcatgattttatcataattttttaatacttgtatgagagttctccagagaaacagaaccattaaggtgtctatatttgcctgtctgtccatctatatctatctatatctatattatctatctatctatctaatctatcatctatttattttaaagaattggctcatataattatggaggcttrtaagtccaaaatctgtagggtaggctggcaggcaggagacccaggaaacattggtgttgtagttggagtctgaatgctgcctgctggcagaattccttcttctttgagggaagtcagtcttttctttttgaaaaggaaaccttttattttaggttcataggtacatgtgcaggttagttatataggtaaattggtgccatggggctttgttgtactgattatttcatcatccaggtactaagcctagcacccaattgttattttttctgatccccttcctcctttctccctctaccctcaactaagccccagtgtctgttgttcccttctctgtgtccatgtgttctcactgtttagctcccacttataagggaaaacatgcactatttagtttttttgtttctgtgttag

SEQ ID NO: 24153 - DNA, 576 bp, Homo sapiens
ttctaatatttgtagtttctgagtagttggttcctgaccatgctttggatttactcatgcttgactcttttcttcattctgcccacttgaaacttctaagggaatctgctttgaaattagaccagttcatgaaggcttgggaactatttcacagcagttagagggaagaaatgcatccatcagttacattccatgaatgctttctagacgttgaactcatacctgcaacaaggcaccaggcatgagttcagtgagctaacagcttggccacatgctttggcttttgtgaaatacttttctcctagacttttccctgtggggttragtggacaattggaggtcacagggccttttgtccagatttccagcttcttctctgaggagtgggcccatatttcttgtgcaggtgcagaaatggcttcttggttaggggaaagctgtgttgttgaaactggtggtgttggtgcttaacaaagaggcataggtgtcatcctgggctgccgctggccactcaggtaagcctcctcccactaaggtggggtcaaggtttgtaaatctagaaacttcaatctctgg

SEQ ID NO: 24154 - DNA, 527 bp, Homo sapiens
tttgtattggtttcctgtggttaccgtaacaaggttaccacaacctgtggcttaaaacaacagatcttkgttctctcacagtcctggagacaagaggtctgaaatcaaggtgtcagcagggttgatgtcttctggagtttcagagggagaatatgttccttgcctctctcctggcttctagtgactccaggcattcttggacttgtagcacataactccaatctctgcctccattttcacatctccttctctatttgtgtttgtgtcttgcttgtcactggatttagagttctcctggataagccacgatgacctcatctcaagactcctaattatatctatgaagatcctttatccaaagaatgtcacaatagcacgttctttagggacatatcttttgggggctaccattcaattcactatacatttttttttgcattttgaagagacaaaaatcagaacaattttatttctgtagctatacatgatgatcatggtatagtatactggaatccacttgcatttcc

SEQ ID NO: 24155 - DNA, 543 bp, Homo sapiens
ctgtgtatacatttatggggtacatgagatattttgatacaggtaggtaatgcataataatcacataagggaaaacggggtgtccattccctcaagcatttatcttttctgttacaaacaatccaattatacccttttagttatttaaaatgtacaattaaattatttttgagtatcatcattccattgtgttagcaaataccatgtcttattctttctaactacttttttgtgcccattaaccatccccacttccttctccccactccccactacccttcccagcctctggtcaccatccttctactgtctatattcatgagtacaattgtgttaattttttgcttccacaaataagtgagaatatgtgaaraacatttgtctttctgtgcctggcttatttcacttcacataatggccttgacttggccttcttgatcccccatctcctggcaggtgaagcctctggtttaccccctaattataatgcaatgctagtaggacctagtaaagaaaatagcagagcagggtagggtgtgatgt

SEQ ID NO: 24156 - DNA, 856 bp, Homo sapiens
cagcatttggaaagggccaagaaaggaayattgggtatggaggagcggggaagatcttaaatcccaacagaaggtaagaggagaggacaaagatagtcaaggaggtgggaaggtggcagtggaatgtggaacctgtgtccatgcccaagacgtttttaaaggaagtgcctgggaaccactggcctggaaaattgtacccagagggcttgggctgggcaaaagaaaaggtcgtcaccgcccgttgggtgccacctctgtgtgagtagatttgccaggctcctggcctcctgaactcctcatctggctttaatccttttctctgcttttgcatattcttcccccagaatgtccacctgtgggagagctgagggaccctgggggcagaagcgaggggcttcctgagtctctgggcttgcttctccctcaggacatctgaacctggatatctgtcttagtccattttgtgttactatcacagaataccaccaactgagtaatttataaagaaaagaaatttatttctcacagttctggaggttgtgaagtccaatatcaaggtactggtgtcttgtgagggccttcttgctgcatcatcctagggcagaaggtgggaaagcaagagagtacaagacagcaagaaagggccaaatttccttttataacaaatccccttttctaataacaacattaatccattcattaatattgttactaaccacctcttaaaggtgtcacctctcaacactgttgcattggggattaagtttctaacacttgaagtttgggagacacattcaaaccagagcagaatccctgcccgtttgggctactgactcctccctgggatgctctgaga

SEQ ID NO: 24157 - DNA, 856 bp, Homo sapiens
cagcatttggaaagggccaagaaaggaacaytgggtatggaggagcggggaagatcttaaatcccaacagaaggtaagaggagaggacaaagatagtcaaggaggtgggaaggtggcagtggaatgtggaacctgtgtccatgcccaagacgtttttaaaggaagtgcctgggaaccactggcctggaaaattgtacccagagggcttgggctgggcaaaagaaaaggtcgtcaccgcccgttgggtgccacctctgtgtgagtagatttgccaggctcctggcctcctgaactcctcatctggctttaatccttttctctgcttttgcatattcttcccccagaatgtccacctgtgggagagctgagggaccctgggggcagaagcgaggggcttcctgagtctctgggcttgcttctccctcaggacatctgaacctggatatctgtcttagtccattttgtgttactatcacagaataccaccaactgagtaatttataaagaaaagaaatttatttctcacagttctggaggttgtgaagtccaatatcaaggtactggtgtcttgtgagggccttcttgctgcatcatcctagggcagaaggtgggaaagcaagagagtacaagacagcaagaaagggccaaatttccttttataacaaatccccttttctaataacaacattaatccattcattaatattgttactaaccacctcttaaaggtgtcacctctcaacactgttgcattggggattaagtttctaacacttgaagtttgggagacacattcaaaccagagcagaatccctgcccgtttgggctactgactcctccctgggatgctctgaga

SEQ ID NO: 24158 - DNA, 856 bp, Homo sapiens
cagcatttggaaagggccaagaaaggaacattgggtatggaggagcggggaagatcttaaatcccaacagaaggtaagaggagaggacaaagatagtcaaggaggtgggaaggtggcagtggaatgtggaacctgtgtccatgcccaagacgtttttaaaggaagtgcctgggaaccactggcctggaaaattgtacccagagggcttgggctgggcaaaagaaaaggycgtcaccgcccgttgggtgccacctctgtgtgagtagatttgccaggctcctggcctcctgaactcctcatctggctttaatccttttctctgcttttgcatattcttcccccagaatgtccacctgtgggagagctgagggaccctgggggcagaagcgaggggcttcctgagtctctgggcttgcttctccctcaggacatctgaacctggatatctgtcttagtccattttgtgttactatcacagaataccaccaactgagtaatttataaagaaaagaaatttatttctcacagttctggaggttgtgaagtccaatatcaaggtactggtgtcttgtgagggccttcttgctgcatcatcctagggcagaaggtgggaaagcaagagagtacaagacagcaagaaagggccaaatttccttttataacaaatccccttttctaataacaacattaatccattcattaatattgttactaaccacctcttaaaggtgtcacctctcaacactgttgcattggggattaagtttctaacacttgaagtttgggagacacattcaaaccagagcagaatccctgcccgtttgggctactgactcctccctgggatgctctgaga

SEQ ID NO: 24159 - DNA, 1221 bp, Homo sapiens
cttgagcctgggaggcagagggtgcagtgagccatgatcatgccactgtactccagcttgggcaacagtctttgctgtctcaaatagaaagcaaaagtgctcctggtaggggcatttggaaatgttgggagcatggctgatggatgcagtgaccgggggaaagctatggccaaggcagtgcagggatcaaaccccaactccaaaggctctgagagggaatctcttcattagagaaacacaagattccttcccagagggggagaacgcagatgttcatgtgctcatgaggctggacagagctacacagattggtacctattcccagattgcagaaatggtccctacattctatttagttatttatttgggagatgaggatgtagataggaagaattcttaactatcagatgagaactctataaccagctgaaatgggggtatactgccttcatttttagaggtctttaagaagaaaaaagtgatactttcccctctagttttgcaaccactcagagaggcaaggtgaggccgaggttgcctctagtttatccattcccacctgcctcccgccaacccgcacccttccagccatctcttcattgagctcctaccaggtaccactgcactcagtttagtgcattggggaaactaatacatacacctgtggaaaattcaggaataataaaaggtaataatttgctaatttttatttatttgctaaatacatgctaaaatttattgtgtaaacagcataacatttaacaggaaccaaatagtatctggtagaaagtaattttttccttccgtttcccagtttctgtgtccccttccagagatggtcacagttcacaagaggaatggttctgcctggtgcagagggcaaccctgtagctggagcgagcagggaaggcttctccaaggaccttccaccatggagagaatccaggtggaggactggggtgggamtgggaggagtgaggggagaaagcggtggccaggattcagcaggggaagaagcctagcacacacagaatcctgaggggagaggcctagctggaagaaagggtacatgctcaggactgaccaagagaaagggtggaaagagggcccaggacggacgccaggctgagacatgtcctgctagccacagaaaacatggaggaatgcttttacataggagaatggcatttaggaatgttaacctgacatcctcagcatgat

SEQ ID NO: 24160 - DNA, 1062 bp, Homo sapiens
aagtctgaaatggccacttacagcatcattccaaatatgtgatattctggaaaatgcaaaacggaggcaggaacatcaccatttgttgccagggataaataggggtggcaaaagagggaagggagagatagaattaggaggagcacaggggattttgagggcagtgaaacgcttctgtataagactgtgatggtggatacatgacacatgtagttgtcttaaaccacagaacacaaagagtgaagcctaatgtaaaagatggactttaggtaataataacattggcttcttcaattttcatcatgttcacatgtaatatgttcttgcataagttgtaggatacactacacaaagtcaatatggtttttttggtttaaaacaattattttctttgaaacagggtcttgctatgttgcctaggctggcctccaactcctgagtccaagctatcctcctgctttggcctccctaaatggtaggattacaggtatgaggctcagcacctggccagtcaagatgtttaaaacagtggaaactatgctgggcgtggtggctcacgcctgtaatcccagcactttggaaggctgaggtgggtgaattatgaggtcaggagttcgagaccagcctggtcaatatggtgaaaccctctctctactaaaaatacaaaaattagttgggtgtggtggtgtgtgcctgtattcccagctactccggaggctgaggcagaagaattgctagaacccgggagacggaggttgctgtgagccgagatcatgccactgccctccagcctgggcaacagagcgagattctgtctcaaaaaaaaaaaaaaaaaaaaaaagccaggaggaactatgagcctggaagaaaactgcgggaactctgtggattatctgctcaatgttttggggaaataaccactgttctaaataataaaacccattaaataagaargtgaattaactatcattccatataaggttcataactgagttaaaataaaatccaatatgaaatatcacatattggttatcatttgcatgaaaaacatgcaaaaataaa

SEQ ID NO: 24161 - DNA, 1044 bp, Homo sapiens
actccttgcaggaggggatgggtgggtgattgacaggttcttgaaaaccatggagtaagtcattctccaaagaaagttggaagattggaatgtaaacatcaaaaaggacaggcaaaaaggctgaacagacacttccactatagacactttgtgacagttgataaaagtctggttcctagcttgagatttgtaagagacattttgaggaagtttttttttttttttaattttttatttttagagatggagtctcactgagttacccaggcaggagaacagtggcatgatcatagttcactgtaggcttgaactcctgggctcaagtgattctcctgcctcagcctcccaagtagttggtactacaggtgcatggcaccactcctggctaattaaaaaaaaaattttttttatagagacagggtcttaatatgttgctaggatagtctcaaactcctgagctcaagcgctcctcccgcctcggcctcccaaagtgctgagattacaggcatgagccaccgcacttgtccgtgagggaagttctgataccagtttgtatcctgtcttgttgctgttttatttctggcacttaacatggcgccttattgttgaattaatggacaaaagaattttaatggatgaatgggtgaattctaagtcggtttgctactataaggtttatctytgatcagcacttcatactcagtttctgcaaggataaggaaagcctgagaaagaaatgcaagaatattaagagacatcatgggtttctatagaagggttaatttattttagtttctgcatcggggatttgcccaaccctcccattccttgaacttgttctgtgatacactgcttttgtctcactaggctcacgtactaattgggccaccccggtgagtacactgtggatgaaaaaatcactgtggctttttctgccattgcttttcctggagaaggggtatctctgatgtttttttgccttcttgtctttctgtctgccctcaggttcacccaagcagcactgactataacctaatgtggaca

SEQ ID NO: 24162 - DNA, 1044 bp, Homo sapiens
actccttgcaggaggggatgggtgggtgattgacaggttcttgaaaaccatggagtaagtcattctccaaagaaagttggaagattggaatgtaaacatcaaaaaggacaggcaaaaaggctgaacagacacttccactatagacactttgtgacagttgataaaagtctggttcctagcttgagatttgtaagagacattttgaggaagtttttttttttttttaattttttatttttagagatggagtctcactgagttacccaggcaggagaacagtggcatgatcatagttcactgtaggcttgaactcctgggctcaagtgattctcctgcctcagcctcccaagtagttggtactacaggtgcatggcaccactcctggctaattaaaaaaaaaattttttttatagagacagggtcttaatatgttgctaggatagtctcaaactcctgagctcaagcgctcctcccgcctcggcctcccaaagtgctgagattacaggcatgagccaccgcacttgtccgtgagggaagttctgataccagtttgtatcctgtcttgttgctgttttatttctggcacttaacatggcgccttattgttgaattaatggacaaaagaattttaatggatgaatgggtgaattctaagtcggtttgctactataaggtttatctctgatcagcacttcatactcagtttctgcaaggataaggaaagcctgagaaagaaatgcaagaatattaagagacatcatgggtttctatagaagggttaatttattttagtttctgcatcggggatttgcccaaccctcccattccttgaacttgttctgtgatacactgcttttgtctcactaggctcacgtactaattgggccaccccggtgagtacactgtggatgaaaaaatcactgtggctttttctgccattgcytttcctggagaaggggtatctctgatgtttttttgccttcttgtctttctgtctgccctcaggttcacccaagcagcactgactataacctaatgtggaca

SEQ ID NO: 24163 - DNA, 542 bp, Homo sapiens
tggagcgaattaacaaccttcttcacatggtggttgtgatgaataagcagtttgctttgtaaatagataagcaagtacaaataattattataatttttctctatratttgtccttttttgttttttattgatgtccctccagctcacagcactctactcttttatgagaatgttctcaatttatctgtctgcttttctgcaaagatgccctccttggcctaatgtcatgttgaatttctgtattaaaaatttctggagtgcatgtgtgtgtgaacttaagagagactacctgaatagcattctctaacccggttgtcctttctgcttctgtaggggaaacccaagaagaagcttattgacaggaagaacacggtaattgacttttaaaagttgagaaatgctttccatgtgcataatgtgtgaccatgcacagactaagcataataccttatataaccatttttagtttggttcagcttgaatagtaacataaaaattttttctattgaaaaagtgttttgtcgccactttttacaagctaa

SEQ ID NO: 24164 - DNA, 542 bp, Homo sapiens
tggagcgaattaacaaccttcttcacatggtggttgtgatgaataagcagtttgctttgtaaatagataagcaagtacaaataattattataatttttctctataatttgtccttttytgttttttattgatgtccctccagctcacagcactctactcttttatgagaatgttctcaatttatctgtctgcttttctgcaaagatgccctccttggcctaatgtcatgttgaatttctgtattaaaaatttctggagtgcatgtgtgtgtgaacttaagagagactacctgaatagcattctctaacccggttgtcctttctgcttctgtaggggaaacccaagaagaagcttattgacaggaagaacacggtaattgacttttaaaagttgagaaatgctttccatgtgcataatgtgtgaccatgcacagactaagcataataccttatataaccatttttagtttggttcagcttgaatagtaacataaaaattttttctattgaaaaagtgttttgtcgccactttttacaagctaa

SEQ ID NO: 24165 - DNA, 574 bp, Homo sapiens
aaaaaaggcaaacagccttaataccgttatgaaaatagtctgacttcacagacactctgacatagtctcggggactcccaagattttgataaatactgttcatcatttagtgaacaaaggtaatatgtacaaggatgttcatcaagaagtgttttattaataggaaaaagtagaaataaaccaaatgcccaacaaaaaaaagccagagcagagaggtcaaataaaagtacagtcatgtagttacatattaggcagcaataagaattttaaagtcaaactgtttcctgacatgaaaaaatatccccaataatataatgggggggaattctccaatatcatacaatatggtatggccactgtgtatgtaaaacatacrtgtacacgtgtgcccaggatataagccaaactgctacaatggtagttatctgttcacacagaattaattatggatttatggtcttctttattcttccttaaacttttaaaaaactcatttattagagtaatagcttgattatctataccaaactaatacatgatcattatgaaatattattgcaatacctaaaagcac

SEQ ID NO: 24166 - DNA, 610 bp, Homo sapiens
agtgctgtcaggcagggaaggcggagctgggcaggggagtcaggcaggcagggaaggcggagctgggcaggggagtcaggggagccccagggaaagcaagtcctgcttggtcctgccagctgctccccggacctacgggtctgggagtcaccaggctccaaggagtgaccccccaaccatggtcagagcaccccttgctcatgggcgggcgtagggagccaaggaaggaaggtcctgggtgtgggcatggaaaggctcttcatggagacctctgcttgcccttcggggctcacccaagcttcctgactgatgctggggcctcactgctgggcctcacgtggaaagagccactgcacacccctggggctgggggatttctgtctgagccacaatgctgctagtggcaaagtatgcagagtagaaaaaaaagcggggtccccacatatcccggggctcctgtggtgcagccrgaccccaagaccctcccgctgctgagaggacatgcaggctgtcgtgggcacctggccctcctctgtgtctgtcccagccccacatccacaccagggactgagccagtgcgggcagaggcccgcctgcggccacagccctt

SEQ ID NO: 24167 - DNA, 1073 bp, Homo sapiens
atccttgagtgtgcctttggggaggcaacgaacccaaaagggacccctgagagcccagccctctcctgtgggaggtactgacctgtggatggaaattcctccctcattcataactgaggcgcattagaagcctgaggtactttctgtaagggctgcctgtcacagccccacagttcaaccacggcacctgtctgtgactctcctttcctgccctgtcctcttcggatgggcacacagctccaggaagacacggaccccacacagacagcctagtttgcattatttaagacaggtgcagtgcatcacaacaaaagaaagctgcaagaaatccagacccacttctgtttagctttgagtgagttggatgatattggggaacacctttctaataatatttctcttagaatgatgctgaaattggcttatgtgttctgggcacctagtacctgagggctcagaggggaaggtgtcccctaatgggtcccgcctggtgtcttagactccacccttccagcgccccactcactgcctctgatcctcagggggagcccctctctaggttgtgcaagaacgtttcttccttctccatagccaactgtccggtctattccagaaagtgcgtcttacaacctgcacccccaactagaaatctgcacatcttgcagtgggggagggagtgtggtacccaggagaggactattctgctttgagtgtctctaggccgcccctttagcctcttctgggccccctgctggcctcaccaagaaccacagacgcgctatttttattctgatgaagaacagtgccgaaatgtctttcgacttgacgagacacaaaatttaggtgctgagagagatacttcaatttcaagcttaaagattactttgggtcccccaggactcagaagcaatttagagctgataccctgaacaagagaaaggttagaagattaagaccaactgctgtttggataaatggttggtaattgcccatatccgcaattatacactggcacataatatcttttccactacctttctcctctcctgagtcccatcrggattgattcggaa

SEQ ID NO: 24168 - DNA, 518 bp, Homo sapiens
tccttatgggaaaatatgtatttaaaaggatactgaatcttacatgacagaatatggaagaaaaaaagtggcttattcaggtaaaaatactatgcttctcacaccagagggagaacattttttaaaactttaattaatgctgtgggtggatttatatatttggaaytgtagcaattccatcaaagaagaaaatatatttttacctcctttgaacatctgtgggtttaaaaattccattttaacaggggactcagaaaaaataggatttttctttacttgctttatcagctttctgtgtcttgcattttttatttgcaagatgatttatgccatttcatgagctattttaatttaggctattgggccatcttttgattattcatataatcccaaacaatacaaacctccctccttctttctcacttgaaaatgaaaaacaacgtgaggagggatggagttaatgtctatgaaagattcaattattatttatacaaaaatccacaaataaaaacattttt

SEQ ID NO: 24169 - DNA, 578 bp, Homo sapiens
tcactgcaacctctgtctcccaggttcaagcgattctcctgcttcagcctcccgagtagctgggattacaggtgtgcatcactgcacctgggtaatttttgtatttttagtagagacaagggttttgccatgttggccaggctggtctcaaactcctgacttgaaatgatctgcctgcctcggcctccgaaagtgttgcgattataggcgygagccactgtgcctggtctattctgcctttcttatacaatttctttctttgagtaatgggttgagagaaattctctatgtagaagaatttcagctgataagccaagaatgacagaattagactatttccaggctctaaagatataatccaggtagagtcagacaatgcttataaatggtgataatatcacaaaaaagagacataaccagacatttatgtatgttctgatcaaaacaaacaccgattttcaggaaatgcaggggacaaaggaagatgttaatgatacgatagggatgcaaacagcaaaatctagagtatattaaactctacatgacagatggctggtttttaaaggaaaggaagaaaa

SEQ ID NO: 24170 - DNA, 572 bp, Homo sapiens
cctgaaaccacaaacctttgctatgtcattacaatcacatctatcattcttcctaactcatgaatcacattctgtacctggaaatggtccctgagcttaaaataatacccacacataaaagaatctgctattataacttacagtcacaaaatattagtgatgttctataaaccatgatcaaagcagaatcaacaagatgagaaaatgtgtacaccatcaatagtaacttgtagacacacacgcttcttatatctcacaacaatgtaaacatacgtaacactactgaactatacacataaaactgcttggggaaactcactattttttgagttccactaacaattagcatattttgctgaacctcagttctacatattttttttatttttctttctaaaktttttccccactcttcttcattcaacccaggcatttttcatttgggaaatctaccatagtgggggacacagctgttgactggatgagcagaaaagatatgcttgtgacaatcagaaagtttcaaggtctttgaagttatataaaaatagacctgaagacatcagagaaataca

SEQ ID NO: 24171 - DNA, 479 bp, Homo sapiens
tctagtgacacatgtgtcctatgttgaaaagattgcactagtaacatcagaaaggattcttctatttaacttgcagggtgtcatcatgctgctgccttaatataagtcttcaaaggttctttcccttcctttccattaccttcattgaagtgaatttgttttactctccttcctaaataatgacatgctggattgtggcagcrgtgagtaatctaaaaagatagcccctctttcatggcaaggaagttatgttggaactgttagggactgctaggacacattgctatttccatgattagacaaattgttgttggaaaactaccaacagagactggtttcatttgcctgttgccttgagtgaggaagtctaagaacatcaagaagttatcaaggagccagaataatttaaaaccatcttggtgttttggaaggggtgttgtttattgcttaatgacatgtgagttttactcctctggtgg

SEQ ID NO: 24172 - DNA, 479 bp, Homo sapiens
tctagtgacacatgtgtcctatgttgaaaagattgcactagtaacatcagaaaggattcttctatttaacttgcagggtgtcatcatgctgctgccttaatataagtcttcaaaggttctttcccttcctttccattaccttcattgaagtgaatttgttttactctccttcctaaataatgacatgctggattgtggcagcggtgagtaatctraaaagatagcccctctttcatggcaaggaagttatgttggaactgttagggactgctaggacacattgctatttccatgattagacaaattgttgttggaaaactaccaacagagactggtttcatttgcctgttgccttgagtgaggaagtctaagaacatcaagaagttatcaaggagccagaataatttaaaaccatcttggtgttttggaaggggtgttgtttattgcttaatgacatgtgagttttactcctctggtgg

SEQ ID NO: 24173 - DNA, 479 bp, Homo sapiens
tctagtgacacatgtgtcctatgttgaaaagattgcactagtaacatcagaaaggattcttctatttaacttgcagggtgtcatcatgctgctgccttaatataagtcttcaaaggttctttcccttcctttccattaccttcattgaagtgaatttgttttactctccttcctaaataatgacatgctggattgtggcagcggtgagtaatctaaaaagatakcccctctttcatggcaaggaagttatgttggaactgttagggactgctaggacacattgctatttccatgattagacaaattgttgttggaaaactaccaacagagactggtttcatttgcctgttgccttgagtgaggaagtctaagaacatcaagaagttatcaaggagccagaataatttaaaaccatcttggtgttttggaaggggtgttgtttattgcttaatgacatgtgagttttactcctctggtgg

SEQ ID NO: 24174 - DNA, 463 bp, Homo sapiens
ggctaacatggtaaaaccccatctccactaaaaatacaaaaaattagccaggcgtggtggcacacacctgtagtcccagctactcgggaggctaagacaggaaaatcgcttgaacctgggaggtggatgttgcagtgagccgagatcacaccactgcgctccakcctgggcgacagagcaagactccatcacaaaaaaaaaggaaaagaaaaaggaaaaggagactgagatgggttctaggttaagagagggagaagaagagaagtaaatgctaccattgcctttgggaagaggtccagacattgggatccagttatggtgcttgctcaaggtgtatgctttaggcaaagggtcattctagtggcagtgctggcctggtttgttataaggtggacagttgtgccaatgcagaagggtgctttaagcacatgttgactttaagccaccacaatttatattcaaa

SEQ ID NO: 24175 - DNA, 463 bp, Homo sapiens
ggctaacatggtaaaaccccatctccactaaaaatacaaaaaattagccaggcgtggtggcacacacctgtagtcccagctactcgggaggctaagacaggaaaatcgcttgaacctgggaggtggatgttgcagtgagccgagatcacaccactgcgctccagcctgggcgacagagcaagactccatcacaaaaaaaaaggaaaagaaaaaggaaaaggagactgagatgggttctaggttaagagagggagaagaagagaagtaaatgctaccattgcctttgggaagaggtccagacattgggatccagttatggtgcttgctcaaggtgtatgctttaggcaaagggtcattctagtggcagtgctggcctggtttgttataaggtggacagttgtgccartgcagaagggtgctttaagcacatgttgactttaagccaccacaatttatattcaaa

SEQ ID NO: 24176 - DNA, 573 bp, Homo sapiens
atcatgaccaggtacggggctcacacctgtcatcccagcactttgggaggccaaggcaggtgtatcacttgaggtcaggagttcgagaccagcctggccaacatggtgaaaccccatctctactaaaaatacaaaaagttagccaggtgtggtggcatgcrcctgtaatcccagctacttgggggcctgaggcaggaggatcgcttgagcccaggaggcagaggttgcagtaagccaaagattgcaccaccgcactccagcctgggcaacagagcaagactctgtctcaaaaaaaaaaaaaaaaaaaaaagtaaaagactcgtaggatgtttgcagagagagtaaaacaataaaacagcattcagaagcacagaacacattttgaggagtttggatttccatacctgatccccaaagccaggaaagccctgctaccacttgccaaggcatatatgaactctgaatatcctgagcctgatgttgtgtataccaggcacaaagcaaaactaagcaaggatgattttgttaaaactgtaaacttttaaatattgtacagattgctttaactagaga

SEQ ID NO: 24177 - DNA, 866 bp, Homo sapiens
ccttctttttcttctttgtcttcttcttcgtcttcttcttcctcctctctctctctctctctctctcatgtgtgtgtcccaatcaagcagcactgctggcagggacccaatgactcttgcttctgctattcccactgtggttaatctctaggtaaccttgccatcccctctagcttctcgcttcttgtatcatcgtgtaactaattccgtgcattaaatctcctctgttttaaatagtgtctgtattcttggtttagcctggactggtacagaggaggtaatggattagtgagaaatattggaataaggacatattttgaaggtggaaaagacagaattgatgaggcattggatatgtggtatgaggaaagtgcttaaagctcaaaacagcccatttccttgcaacttccccaataaagtgcttctcggtcttaccagtctcagattgcaccatcatttacctagtagctcaaaacaaaaatctgcagcttatactttattcattktattcttcatcaaatccatttataaagcttgatcccaacttttgggatatgtgggaacttgtctggaattataagaatccaggtacacctcatcataacttatcaaaaagctcagactggaaacagagccaaattcagacactactgatagtttcaaaaactccagtgaacttcacaaagactgtactttgagaaagaaaccagattctgtatgtaggctagacaggctggccactggaccattgccaagacaacttcagggggtgtggggaagtacaacaatccaggttttactacatcaattgggaaaccagagcatttttaggtaagctgaaacatgggagctcaaacatgcttgaa

SEQ ID NO: 24178 - DNA, 828 bp, Homo sapiens
catgtaaaaagttttgtatcaataaaaaatagttttctctgtaccttagttggataatttgtttaattaatgaaagaagataaataastgaagggattcatgaattagaaaattcagtatattaaaatgtgaatagattttatgtaatcccaataaaaattataaggtttctttgcagaaattgatccactgattctaaaattatgtggaaatgtaaaagtctaagaatagtcaaagtaatattgtgaaggattaacattaagatattaagatgtattataaagctattgtaactaagacaatgtggtattgacacaaggatagacagatcatagaagttagaaaagaccagaagcagacccacacatatttggtaaactataaccttaattcatatcaaaggtaacacatttgcagtgtaagggaaaagacctttttggaaaactgtgctgtattcctcaccggaatagacacctactccaggtataagtttgcctatcctgcacacagtgcttctgccaagactatcatcgtggactaacagaatgccttatccaccatcatggtattccacacagcattgcctctgaaggcactcactttacagctaaagaagtgcagcagtggactcatgctcctggaattcactggttttaccatgttccctatcatcctgaagcagctggattgatagaatggtggaatggccatttgaagtcacaattagctgactacacaactagccaactagctgacaacactttgcagggctggggcaaaattctccagaaggctgtgtatgccctgaatcagcatccaatatatggt

SEQ ID NO: 24179 - DNA, 603 bp, Homo sapiens
ctggcattccttggcttgtacgtgtatcagcccaatctccgccttcatctgcatatggatatggtttagctgtgtccccaccaaatctcatgttgaattgtaggtcccataattcccacatgttgtgggagggacccagttggagagaattgaatcatgggagggtttccccaatactgttctcatggtagtgaataagtctcgctagaactgatggttttataagaggaaacacctttcgcttggctttctcattctcttgcygctgccacataagaagtaccttttaccttctgccatgattgtgaggtctccccagccacatggaactatgagttgattaaacctctttttctttatagattatccagtctcagatatgtcttcatcagcagcatgaaaatagactaatacaggcagcctaagaccaccattgctaggcagaatattttttaacctgaaaaaagctctcacttgaaattaaaaaaaaaaattattcaacttggctactcaaattgcaaccagagtgaattatattgtttcaaatggcaaaagatggcatcaggtaaggattaagaatccagtgccctcctcagaagccca

SEQ ID NO: 24180 - DNA, 603 bp, Homo sapiens
ctggcattccttggcttgtacgtgtatcagcccaatctccgccttcatctgcatatggatatggtttagctgtgtccccaccaaatctcatgttgaattgtaggtcccataattcccacatgttgtgggagggacccagttggagagaattgaatcatgggagggtttccccaatactgttctcatggtagtgaataagtctcgctagaactgatggttttataagaggaaacacctttcgcttggctttctcattctcttgccgctgccacataagaagtaccttttaccttctgccatgattgtgaggyctccccagccacatggaactatgagttgattaaacctctttttctttatagattatccagtctcagatatgtcttcatcagcagcatgaaaatagactaatacaggcagcctaagaccaccattgctaggcagaatattttttaacctgaaaaaagctctcacttgaaattaaaaaaaaaaattattcaacttggctactcaaattgcaaccagagtgaattatattgtttcaaatggcaaaagatggcatcaggtaaggattaagaatccagtgccctcctcagaagccca

SEQ ID NO: 24181 - DNA, 603 bp, Homo sapiens
ctggcattccttggcttgtacgtgtatcagcccaatctccgccttcatctgcatatggatatggtttagctgtgtccccaccaaatctcatgttgaattgtaggtcccataattcccacatgttgtgggagggacccagttggagagaattgaatcatgggagggtttccccaatactgttctcatggtagtgaataagtctcgctagaactgatggttttataagaggaaacacctttcgcttggctttctcattctcttgccgctgccacataagaagtaccttttaccttctgccatgattgtgaggtctccccagccacatggaactatgagttgattaaacctctttttctttatagattatccagtctcagatatgtcttcatcagcagcatgaaaatagactaatacaggcagcctaagaccaccattgctaggcagaatattttttaacctraaaaaagctctcacttgaaattaaaaaaaaaaattattcaacttggctactcaaattgcaaccagagtgaattatattgtttcaaatggcaaaagatggcatcaggtaaggattaagaatccagtgccctcctcagaagccca

SEQ ID NO: 24182 - DNA, 545 bp, Homo sapiens
tgaacacatttctcaggctgctgtccaaatgatatgtgacctgcagtgtggaagaaatgactcgaaggtaatggtccttattcaagtggaagctgaaggtcctactcttttcactggatctccttattttttctcttaccaaggaacaggaacattctcaaatttcattatgatcctcatgatctgcaactggagcaagtctcttggtacacaacatatcaggataacgtgtcattttttccttcaaaaggggtaatgcctttgtatctgttgataaacaatcaaaatatccctccttcccttttcttcccaaagagtttcaaagtaccactccatgagaaattgagaaatgcacttrttttctccgagaaagtgagaagacagaggccttgatatagagatatggaagacaacaaaactcttttgcccaaagagaaatggaggtaaagatgtagtttcagaaaacgtctaaagacagaatagattttaatccaggtgaataatctgactcacctctaacatatctgatgccaaagatatttacc

SEQ ID NO: 24183 - DNA, 543 bp, Homo sapiens
ttcattgtgcatttgcacatgtggtaagagctcatctgggcactggtttgtatgctgtaaattttcctctgagactccagagctctcttcattgctgtctccagaccacaggcagatccctttgcacagcacgtgtgttaccaatccacagcatccctgctgccgaggagtgtgcatgggtaacgcacagycataagaggttgtgcccagtgttgatgagctgtcacgtgttttcattcgtgtatggaagggggcaaatttcagactgtatacatttccctttcatgggtgatttggtctactagttaccataggaccctgagagatagaaatacaaaactttgttatatattcaaccttttcagtcctaggaagaggtaaaaacacctgtgcaattatggctgttcttgagctcagggtataattggtgtgaaaaaatggacatttcctgttctggataagaggaagtggaaggcattattggtaaaccgtgtcattcttaactggtgagagattaggatcacaaatatgaggaatgtcaca

SEQ ID NO: 24184 - DNA, 599 bp, Homo sapiens
gcaaagctcccaatattccatcttaaccagaagagcttcttttggaacttaccaatggtctccttgctggtggcattggtgatgatctcctgacacatctattcccttttctgcgacctgcctctaagacttcgcttgggaaagttctgggccaartggggacaatcttccttctttcctgtctggaaagctcaggtgatttctgccctccataagatgcaccagcagatcttcagcctcttttacacaagggcttgtctgatgcttggaatagggccttcctggacaaactccagactggatttcatcagcagctggaagacctggagacctgcttggtatagaggatgggaagcaagagtctgccctggaaattgagggccctacactggccataaagaggtacttccagggagtacatttcttcttgaaagagaggaaattcaggaactgtacctgggaggttgtctgagtgtaaataaaatatattaagaaaattcaggaaacccaattctcaatgactaatgtcctagctcacactctgttcagtcatttctataactgttctttttgccttcagtggtaaaataacttgaacc

SEQ ID NO: 24185 - DNA, 566 bp, Homo sapiens
aaaagatttccaggcattttccttaatgaataaaacaaacgagaatttaatgaataaaacaaatgcaaatttaatgacatggaaagacgaatatatttgtaaattttaacacaatgtaaagatgaatatgttattatatgtaaaatatytaaatattataaatgaaacagctgcaaaaagaatggaaataagtaagtatataaaacatatcagggcagtcatgtcttaggaactgaagaccagagccaaaggtttttaacatatacttgcttactattgttaacaaggtatttgctgaatttaattcaataaattctgtgacaactgcagaaaaaagaacctattgaaatgaccaaagacacatgtgcaagtgtgatatggcagattaatcaatgagaataatttcaggatgaacccaggtcttcatccttacttctcagtccttcttgcaagtttgttgatgatgaagagaaggatttcacgattccactctgacaacctcccaagcacagtcactgtatttcttctcctccaggtagattccctggattcccatgcattccctg

SEQ ID NO: 24186 - DNA, 566 bp, Homo sapiens
aaaagatttccaggcattttccttaatgaataaaacaaacgagaatttaatgaataaaacaaatgcaaatttaatgacatggaaagacgaatatatttgtaaattttaacacaatgtaaagatgaatatgttattatatgtaaaatatctaaatattataaatgaaacagctgcaaaaagaatggaaataagtaagtatataaaacatatcagggcagtcatgtcttaggaactgaagaccagagccaaaggtttttaacatatacttgcttactattgttaacaaggtatttgctgaatttaattcaataaattctgtgacaactgcagaaawaagaacctattgaaatgaccaaagacacatgtgcaagtgtgatatggcagattaatcaatgagaataatttcaggatgaacccaggtcttcatccttacttctcagtccttcttgcaagtttgttgatgatgaagagaaggatttcacgattccactctgacaacctcccaagcacagtcactgtatttcttctcctccaggtagattccctggattcccatgcattccctg

SEQ ID NO: 24187 - DNA, 643 bp, Homo sapiens
  misc_feature (1)...(643): n = A,T,C or G
atcgtcttttaaaaaccagaggacaataaatattaatccaatagggagattccttggaggagaggatatgtggatattaactatgggtgtttaataaaaggggtccttttatttgtttcttattctatacttacctaggaaaaatggcaaataaaattctttctttcgttagttcccctgcctctttcttcccagaaagtggcagccagattttcaggtcagaataataatagtatttcaggaccaggtagaagtagagattctcttggaaaactaggttagtttgaagccttggagagataawaaatgtgcttagtctaaatgcatgggtgggaatgggccagggctgtggagtgtcttggaggtagctggagatcacgggaagcctgtctgacaagtctaaacattgccgacataggctagggaaaattgaaaggggtaggggaactagttaaagaaatactttcatttttcatttttcctaggtaagtatagcataagaaaaaaaaaaggacccccatcttattaatcacttcttcttcnnnnnnnnnnnnnnnnnnnnnnnnnnnnnnnnnnnnnnnnnnnnnnnnnnnnnnnnnnnnnnnnnnnnnnnnnnnnnnnnnnnnnnnnnnnnnnnnnnnng

SEQ ID NO: 24188 - DNA, 1123 bp, Homo sapiens
ccgccactacgcccggctaattttttttgtatttttagtagagacggggtttcaccgttttagccgggatggtctcgatctcctgacctcgtgatccgcccgcctcggcctcccaaagtgctgggattacaggcgtgagccacmgcgcccggcctctaaagctttttaataaactttcacacctgctctaaaacctgcgcctttgcccctccttctgccttatgcccctcagtcaaattctttcttctgaggagggaagaattgaggtggccgaagatccatagggatacgggttcgcggccattaccaaaaccacattttatccaaatccgtaaactgaagagtgatttttcaaaaaaatcttgttatcttgtttgggctctctaactattagggaccacataggatgttctaagaaatgtgaagaatctaaatgaattataagaccttagcttgaagaaatgcatggtcttttgggaacaatgagaactatatacctaggcaagtgtgaaaatttatgagaaaaatgagtttttttcatcttgttaactaatttaaaaatattgtaatgtaaatatgttgaggaaaatgatatgctttcccttgcttcctttccaaatacatggcattgtttctatttgacctcatatatctgtgtcaatcatgatccaggcaagacaatacataattttaggaaatttaatataagagagacaggagttaaacagggaagagttaagcaatattcgattaacaaattctaccacccagggttacaaatacaaaaactgtagatggtgttatcttaatccaggagcctgggttttcgggtaagacttaaagctatagtagggtctgcccagcaaaatctaaaaccgtgcgtggaggagaggtagaagggaggaggagaaaccaagaaaagcattccccaaaggaaagaaaaagattgagaactaccctggcttttcccagatacttgtatccaccagggcttctatttgactcaacttagccaaatgtggcaaaggagcccaggaaacatagtttgtaaaaaaagggagaaggaatcaaggtaagaacaattaggcaatgacaggaatagtattcatctacctggagtgca

SEQ ID NO: 24189 - DNA, 573 bp, Homo sapiens
aaccagagttaagaggtggtcagaaactgacagcgaacttgcagcaatgcccttgttctgtgaggagtggttccccatgcagatggcctcatttataagtgtgyccccaccccattttctctgtacttacactccacaatcatgccaagaatcgtactgtcctatagtcctttttatgtttacaattcagaacaaatcttgattcattaaaacttattaacagttattaaaaatattgacagtgttggccgggcatggtggctcatgcctgtaataccagcactttggaagacggaggcaggcggatcacctgaggtcaggagttcgagaccagcctggtggtcaggctggtcagaagttcaagaccaacatggtgaaaccccgtctctactaaaaatactaaattagctgggtgtggtggcacacgcctgtaatgccagctactagggaggctgaggcaggagaatcgcttgaatctgggaggcagaggttgcagtgagcagagatcacaccactgcactccagcctaggagacagagcaagactccgtctcgaaaaaaaaaaaaaaaaaat

SEQ ID NO: 24190 - DNA, 573 bp, Homo sapiens
aaccagagttaagaggtggtcagaaactgacagcgaacttgcagcaatgcccttgttctgtgaggagtggttccccatgcagatggcctcatttataagtgtgcccccaccccattttctctgtacttacactccacaatcatgccaagaatcgtactgtcctatagtcctttttatgtttacaattcagaacaaatcttgattcattaaaacttattaacagttattaaaaatattgacagtgttggccgsgcatggtggctcatgcctgtaataccagcactttggaagacggaggcaggcggatcacctgaggtcaggagttcgagaccagcctggtggtcaggctggtcagaagttcaagaccaacatggtgaaaccccgtctctactaaaaatactaaattagctgggtgtggtggcacacgcctgtaatgccagctactagggaggctgaggcaggagaatcgcttgaatctgggaggcagaggttgcagtgagcagagatcacaccactgcactccagcctaggagacagagcaagactccgtctcgaaaaaaaaaaaaaaaaaat

SEQ ID NO: 24191 - DNA, 1732 bp, Homo sapiens
accttgttacagcttttggctttatattcttactgtgtcttagggtctcagatggtttgcgttacatttctcagatgtaatacaagtatatctctgtgacaagtttctatttttaatttttttaacctctttttatgtgcagttacctaaaattattctgtagggacttgactccaatccctgaagtagaggsatttttgcatagtcacgttcctgctgtcttgtccagggacttttcctgtgtgctgtgtttatatatttgattcctaacacgtaagacctttttcggagcaaatatccaagtttgtttttattatggctcttatatttaaaaaaaaaaagataattttttggtcaaatgttaagacatgccaactctcggttttaaatattttaaggtcttcaaaaaatgaatgtttacagttttgttgccagaacctctctggctctttaaaataaaaatatttcagctgtaaattggaagataagtcctctgtccaagcagtttttcaaacctgttccagtcagctccagtaaagtgtggtacaatggactgaacccaaaatgaaaaagactggagtccattctcaaccagacacagtcttagccaatctgcctttgggttttcacgtctgtaaaatgattatattaataccaaactcatggagttacactgaggaatgaattagatcacaggcatgaaaaagcgcggtaaggtgaataactcagtaaatgtgaattattattgttattactgttgaccaagttcaaatactagaaccagaaaaggacttgaattacaatgaaaattagccagaaacacagaagactttgacttacacatttctgatcactccaaccctaggagtccattcgtaggcaagacttaagtcacactgaagtataaatgactgataacaggctactaatctgttactctatcaaatgcctttgcatttaactgactgagagccttgactacaggattgaaattctgcaagataaattttaaatatcaaccagtgaatgatgatagtgctgaccagaactaccagtgtttcttacggctatttcaaattaagactttaaatatagggaaaatttggttgttttaaatctacatttacacttacaggcattcttttcaacatgcattatctgtggtaactgcaaataaagcattccccaattcgtaaataaaaattggacttagaaacacctaaccattaaactacagctctgaacaactcttaaatttcctttgtattacccaaaccagaaagcccaaccttggattgagagagccttaatatacacctttgaaaatatagaatttctgtatcttataatagatatgcacatttaatgtgatagcatttctcctcccatacacccccacagcctcaaaaatctattattaaacactgctacatcaagaatagagaaaaagcagcattttgtagaattaaacatcatattgcttccaaaaaagaaaagagcagttgtagacatttccttagttaattgcataaatctttaaaaacatcattttatataaggaacaaattaacaaattactgagctctttgaagataaactttgtgagaattataagctactttgtgcatttaatcattttatatactgaggagctgtatttgataagtaatatggaaaggaaattctgaatagtatacaactgaactgccaagctactggatctctgtttaat

SEQ ID NO: 24192 - DNA, 1732 bp, Homo sapiens
accttgttacagcttttggctttatattcttactgtgtcttagggtctcagatggtttgcgttacatttctcagatgtaatacaagtatatctctgtgacaagtttctatttttaatttttttaacctctttttatgtgcagttacctaaaattattctgtagggacttgactccaatccctgaagtagaggcatttttgcatagtcacgttcctgctgtcttgtccagggacttttcctgtgtgctgtgtttatatatttgattcctaacacgtaagacctttttcggagcaaatatccaagtttgtttttattatggctcttatatttaaaaaaaaaaagataattttttggtcaaatgttaagacatgccaactctcggttttaaatattttaaggtcttcaaaaaatgaatgtttacagttttgttgccagaacctctctggctctttaaaataaaaatatttcagctgtaaattggaagataagtcctctgtccaagcagtttttcaaacctgttccagtcagctccagtaaagtgtggtacaatggactgaacccaaaatgaaaaagactggagtccattctcaaccagacacagtcttagccaatctgcctttgggttttcacgtctgtaaaatgattatattaataccaaactcatggagttacactgaggaatgaattagatcacaggcatgaaaaagcgcggtaaggtgaataactcagtaaatgtgaattattattgttattactgttgaccaagttcaaatactagaaccagaaaaggacttgaattacaatgaaaattagccagaaacacagaagactttgacttacacatttctgatcactccaaccctaggagtccattcgtaggcaagacttaagtcacactgaagtataaatgactgataacaggctactaatctgttactctatcaaatgcctttgcatttaactgactgagagccttgactacaggattgaaattctgcaagataaattttaaatatcaaccagtgaatgakgatagtgctgaccagaactaccagtgtttcttacggctatttcaaattaagactttaaatatagggaaaatttggttgttttaaatctacatttacacttacaggcattcttttcaacatgcattatctgtggtaactgcaaataaagcattccccaattcgtaaataaaaattggacttagaaacacctaaccattaaactacagctctgaacaactcttaaatttcctttgtattacccaaaccagaaagcccaaccttggattgagagagccttaatatacacctttgaaaatatagaatttctgtatcttataatagatatgcacatttaatgtgatagcatttctcctcccatacacccccacagcctcaaaaatctattattaaacactgctacatcaagaatagagaaaaagcagcattttgtagaattaaacatcatattgcttccaaaaaagaaaagagcagttgtagacatttccttagttaattgcataaatctttaaaaacatcattttatataaggaacaaattaacaaattactgagctctttgaagataaactttgtgagaattataagctactttgtgcatttaatcattttatatactgaggagctgtatttgataagtaatatggaaaggaaattctgaatagtatacaactgaactgccaagctactggatctctgtttaat

SEQ ID NO: 24193 - DNA, 602 bp, Homo sapiens
tgcaatagctttgaataaagtctttcttgcctggttaacttacccagtgtaatttgcctttgacaaaaagacccttgaccrgtgtaagaagactgacatgcagaatttttgtctctgcttggcccaaaagtaatgtttttgctttcatgaatttccagttcataaggtcattttcagaagactagggataatgttttcttaaatttgggagcttatatttcatttgcataaagaccccagcaaagacctttagttttctcagactcttaagtacatacaaagtcagtgtgaatcatgcagaatgagaatgacaatgacactgatggatgataacttcatagttttagaaatgaaacatcttaatgagaatgaattgaactacatggtaggaaataaactgatttaattctctaaattgatgtccccatgcccaagcaagtcctcccatgtatgtcccatattcttaatgtgttaaagggatcagccaatgagatgaataatactaaacacacacaaacacacacacacacacaaagttaaaaagtgcatttctatcttttggaaatctttcatgaatgacaaatcactggagcacacctggc

SEQ ID NO: 24194 - DNA, 602 bp, Homo sapiens
tgcaatagctttgaataaagtctttcttgcctggttaacttacccagtgtaatttgcctttgacaaaaagacccttgaccggtgtaagaagactgacatgcagaatttttgtctctgcttggcccaaaagtaatgtttttgctttcatgaatttccagttcataaggtcattttcagaagactagggataatgttttcttaaatttgggagcttatrtttcatttgcataaagaccccagcaaagacctttagttttctcagactcttaagtacatacaaagtcagtgtgaatcatgcagaatgagaatgacaatgacactgatggatgataacttcatagttttagaaatgaaacatcttaatgagaatgaattgaactacatggtaggaaataaactgatttaattctctaaattgatgtccccatgcccaagcaagtcctcccatgtatgtcccatattcttaatgtgttaaagggatcagccaatgagatgaataatactaaacacacacaaacacacacacacacacaaagttaaaaagtgcatttctatcttttggaaatctttcatgaatgacaaatcactggagcacacctggc

SEQ ID NO: 24195 - DNA, 602 bp, Homo sapiens
tgcaatagctttgaataaagtctttcttgcctggttaacttacccagtgtaatttgcctttgacaaaaagacccttgaccggtgtaagaagactgacatgcagaatttttgtctctgcttggcccaaaagtaatgtttttgctttcatgaatttccagttcataaggtcattttcagaagactagggataatgttttcttaaatttgggagcttatatttcatttgcataaagaccccagcaaagacctttagttttctcagactcttaagtacatacaaagtcagtgtgaatcatgcagaatsagaatgacaatgacactgatggatgataacttcatagttttagaaatgaaacatcttaatgagaatgaattgaactacatggtaggaaataaactgatttaattctctaaattgatgtccccatgcccaagcaagtcctcccatgtatgtcccatattcttaatgtgttaaagggatcagccaatgagatgaataatactaaacacacacaaacacacacacacacacaaagttaaaaagtgcatttctatcttttggaaatctttcatgaatgacaaatcactggagcacacctggc

SEQ ID NO: 24196 - DNA, 602 bp, Homo sapiens
tgcaatagctttgaataaagtctttcttgcctggttaacttacccagtgtaatttgcctttgacaaaaagacccttgaccggtgtaagaagactgacatgcagaatttttgtctctgcttggcccaaaagtaatgtttttgctttcatgaatttccagttcataaggtcattttcagaagactagggataatgttttcttaaatttgggagcttatatttcatttgcataaagaccccagcaaagacctttagttttctcagactcttaagtacatacaaagtcagtgtgaatcatgcagaatgagaatgasaatgacactgatggatgataacttcatagttttagaaatgaaacatcttaatgagaatgaattgaactacatggtaggaaataaactgatttaattctctaaattgatgtccccatgcccaagcaagtcctcccatgtatgtcccatattcttaatgtgttaaagggatcagccaatgagatgaataatactaaacacacacaaacacacacacacacacaaagttaaaaagtgcatttctatcttttggaaatctttcatgaatgacaaatcactggagcacacctggc

SEQ ID NO: 24197 - DNA, 1132 bp, Homo sapiens
tagcttaatatgaccattcatttcaacacagtgagaatgagtgaaataagatgccagatggataaataggcagtagtaacaaattaaatttgcaataatttgaaaatagcctgaagcaagaggaaagaaaaatacattttcttttttatgtttttgagatggagtctccactctgttgtccaggctggagtacagagctgcgatttcggctcactgcaacctctgcctcccaggttgaagtgatctccgtgcctgaagcctcccaagcagctgggattacaggcatgcgccaccacgccggctaatttttgtatgtttagtagagatggggtttcaccatattggccaggctggtctcgaactcctgacctcaagtaatccgcctgcctcggcctcccaaagtgctgggattacaggcatgagccaccacgcctggctgaaaaatgtattttcaatatatgataatgatagcctaaaaagttattttgtttctatggtacgttaaaccagggatcacaatcagtaaaatttaaatttttcctatgtgacgaaatccatttgtcatgaagtgaaaacttttaccaaggtaaagcactgcaagaaaaatgaagaataatgctaaaattaatatctaaatttgactgattatttaatttgtgccagccacaatgctaaatgatttacctgcattatctcatttaattttaggaacaactttgagtagtaatgcaattttcattttaaagatgagaaccctaaggcytggtgaagttgattaacttgcccaaagaccgacagctgttacgtggttatgatcagggttcaaagcccatctgcgtaactcccaagccccagccccctaatctctatttgcaaaaatctatggaaaattattctttctttctttttaagattatttcttaaatgcaaaacagacggaagctttaaaagagaagaacattatagtttatataaactaggactagactgaaaaaatattgaagaccacaaatctttcgttgattgacacctgactctgtgggtgggagaggtgatatgtgaacctcaataaatatttcactctattgatgtgcatttatttgtttgctcataagtcattcaccatatattt

SEQ ID NO: 24198 - DNA, 1132 bp, Homo sapiens
tagcttaatatgaccattcatttcaacacagtgagaatgagtgaaataagatgccagatggataaataggcagtagtaacaaattaaatttgcaataatttgaaaatagcctgaagcaagaggaaagaaaaatacattttcttttttatgtttttgagatggagtctccactctgttgtccaggctggagtacagagctgcgatttcggctcactgcaacctctgcctcccaggttgaagtgatctccgtgcctgaagcctcccaagcagctgggattacaggcatgcgccaccacgccggctaatttttgtatgtttagtagagatggggtttcaccatattggccaggctggtctcgaactcctgacctcaagtaatccgcctgcctcggcctcccaaagtgctgggattacaggcatgagccaccacgcctggctgaaaaatgtattttcaatatatgataatgatagcctaaaaagttattttgtttctatggtacgttaaaccagggatcacaatcagtaaaatttaaatttttcctatgtgacgaaatccatttgtcatgaagtgaaaacttttaccaaggtaaagcactgcaagaaaaatgaagaataatgctaaaattaatatctaaatttgactgattatttaatttgtgccagccacaatgctaaatgatttacctgcattatctcatttaattttaggaacaactttgagtagtaatgcaattttcattttaaagatgagaaccctaaggcctggtgaagttgattaacttgcccaaagaccgacagctgttacgtggttatgatcagggttcaaagcccwtctgcgtaactcccaagccccagccccctaatctctatttgcaaaaatctatggaaaattattctttctttctttttaagattatttcttaaatgcaaaacagacggaagctttaaaagagaagaacattatagtttatataaactaggactagactgaaaaaatattgaagaccacaaatctttcgttgattgacacctgactctgtgggtgggagaggtgatatgtgaacctcaataaatatttcactctattgatgtgcatttatttgtttgctcataagtcattcaccatatattt

SEQ ID NO: 24199 - DNA, 1132 bp, Homo sapiens
tagcttaatatgaccattcatttcaacacagtgagaatgagtgaaataagatgccagatggataaataggcagtagtaacaaattaaatttgcaataatttgaaaatagcctgaagcaagaggaaagaaaaatacattttcttttttatgtttttgagatggagtctccactctgttgtccaggctggagtacagagctgcgatttcggctcactgcaacctctgcctcccaggttgaagtgatctccgtgcctgaagcctcccaagcagctgggattacaggcatgcgccaccacgccggctaatttttgtatgtttagtagagatggggtttcaccatattggccaggctggtctcgaactcctgacctcaagtaatccgcctgcctcggcctcccaaagtgctgggattacaggcatgagccaccacgcctggctgaaaaatgtattttcaatatatgataatgatagcctaaaaagttattttgtttctatggtacgttaaaccagggatcacaatcagtaaaatttaaatttttcctatgtgacgaaatccatttgtcatgaagtgaaaacttttaccaaggtaaagcactgcaagaaaaatgaagaataatgctaaaattaatatctaaatttgactgattatttaatttgtgccagccacaatgctaaatgatttacctgcattatctcatttaattttaggaacaactttgagtagtaatgcaattttcattttaaagatgagaaccctaaggcctggtgaagttgattaacttgcccaaagaccgacagctgttacgtggttatgatcagggttcaaagcccatctgcrtaactcccaagccccagccccctaatctctatttgcaaaaatctatggaaaattattctttctttctttttaagattatttcttaaatgcaaaacagacggaagctttaaaagagaagaacattatagtttatataaactaggactagactgaaaaaatattgaagaccacaaatctttcgttgattgacacctgactctgtgggtgggagaggtgatatgtgaacctcaataaatatttcactctattgatgtgcatttatttgtttgctcataagtcattcaccatatattt

SEQ ID NO: 24200 - DNA, 1276 bp, Homo sapiens
tgcatgttgtccaattctccactaaagcttttaacatactttcatatttattttaaatctctctctgtttccaagacctgagtcatcactcagtctaatttattgattcttgtctcactgcacggtggatgtttttgtttggtatggattttcttcttcccagagtaacactgcatarttgacctgattcaaggctgagtgacaatttgggtaattttagcctaacttcaaattacctctctatcaaaggtgtaccccaacaaagttttcaagtcagagcctgttgtgatcaatattgtctccaccccagcagagtcttgcactcccgtgttttcctccttccagcaatgagactgatgagtagttctctttatatttcaggagttttcagcaaagctctttaggctgtcaccccagactcaggattcagtaaatgtctagaaaggaaaattgaccatgtttttgaggccattcttgcaaatgccctatgggtttctctttcctccagcagcagttttcttcctaaaagatgactgtaatgacagtctcttacccatgcccagaactgtcaaatacgcccaagaacaaatcaactgcaaaatgtttgcttaatccattgggttctctcttctctgaatttttagctactcttgttcttgttatttgaccactctctgatgcctttaatgaaatcatttttgccttttacttatcaaagttttcaagtttttgtcaccaagaacattggtctggcataaactacccaatcctctcttgatacagaaatccataatgctattttgaaatagggtgacattaatggtctcatttatacgagaaaatcgtactaatcataatatgatcccccagattttgaagccttaacaatgttatataatttacaatgtggtttaccttccttggaagttgtaatttttgttaatgtttttgccataaaattgtgcttttacaagtacgagtcaaaaatttttggaccagctgcttatttgcatagtatctagttaggattttggtttttattatcgctgttagtatttaaattgttttaatttatataagatgccatctaaatgttttgttcagtttatagttctagtgttaaaatttacacttcaaaattggaacagaagttgtattaataaattacaacaagatggtggaacaatcttcatactcttttctgttgttttataagagagaatttaaagaagtatattagatataacgtcaaaaatagaagacagtattaaagtaa

SEQ ID NO: 24201 - DNA, 1276 bp, Homo sapiens
tgcatgttgtccaattctccactaaagcttttaacatactttcatatttattttaaatctctctctgtttccaagacctgagtcatcactcagtctaatttattgattcttgtctcactgcacggtggatgtttttgtttggtatggattttcttcttcccagagtaacactgcataattgacctgattcaaggctgagtgacaatttgggtaattttagcctaacttcaaattacctctctatcaaaggtgtaccccaacaaagttttcaagtcagagcctgttgtgatcaatattgtctccaccccagcagagtcttgcactcccgtgttttcctccttccagcaatgagactgatgagtagttctctttatatttcaggagttttcagcaaagctctttaggctgtcaccccagactcaggattcagtaaatgtctagaaaggaaaattgaccakgtttttgaggccattcttgcaaatgccctatgggtttctctttcctccagcagcagttttcttcctaaaagatgactgtaatgacagtctcttacccatgcccagaactgtcaaatacgcccaagaacaaatcaactgcaaaatgtttgcttaatccattgggttctctcttctctgaatttttagctactcttgttcttgttatttgaccactctctgatgcctttaatgaaatcatttttgccttttacttatcaaagttttcaagtttttgtcaccaagaacattggtctggcataaactacccaatcctctcttgatacagaaatccataatgctattttgaaatagggtgacattaatggtctcatttatacgagaaaatcgtactaatcataatatgatcccccagattttgaagccttaacaatgttatataatttacaatgtggtttaccttccttggaagttgtaatttttgttaatgtttttgccataaaattgtgcttttacaagtacgagtcaaaaatttttggaccagctgcttatttgcatagtatctagttaggattttggtttttattatcgctgttagtatttaaattgttttaatttatataagatgccatctaaatgttttgttcagtttatagttctagtgttaaaatttacacttcaaaattggaacagaagttgtattaataaattacaacaagatggtggaacaatcttcatactcttttctgttgttttataagagagaatttaaagaagtatattagatataacgtcaaaaatagaagacagtattaaagtaa

SEQ ID NO: 24202 - DNA, 1276 bp, Homo sapiens
tgcatgttgtccaattctccactaaagcttttaacatactttcatatttattttaaatctctctctgtttccaagacctgagtcatcactcagtctaatttattgattcttgtctcactgcacggtggatgtttttgtttggtatggattttcttcttcccagagtaacactgcataattgacctgattcaaggctgagtgacaatttgggtaattttagcctaacttcaaattacctctctatcaaaggtgtaccccaacaaagttttcaagtcagagcctgttgtgatcaatattgtctccaccccagcagagtcttgcactcccgtgttttcctccttccagcaatgagactgatgagtagttctctttatatttcaggagttttcagcaaagctctttaggctgtcaccccagactcaggattcagtaaatgtctagaaaggaaaattgaccatgtttttgaggccattcttgcaaatgccctatgggtttctctttcctccagcagcagttttcttcctaaaagatgactgtaatgacagtctcttacccatgcccagaactgtcaaatacgcccaagaacaaatcaactgcaaaatgtttgcttaatccattgggttctctcttctctgaatttttagctactcttgttcttgttatttgaccactctctgatgcctttaatgaaatcatttttgccttttacttatcaaagttttcaagtttttgtcaccaagaacattggtctggcataaactacccaatcctctcttgatacagaaatccataatgctattttgaaatagggtgacattaatggtctcatttatacgagaaaatcgtactaatcataatatgatcccccagattttgaagccttaacaatgttatatartttacaatgtggtttaccttccttggaagttgtaatttttgttaatgtttttgccataaaattgtgcttttacaagtacgagtcaaaaatttttggaccagctgcttatttgcatagtatctagttaggattttggtttttattatcgctgttagtatttaaattgttttaatttatataagatgccatctaaatgttttgttcagtttatagttctagtgttaaaatttacacttcaaaattggaacagaagttgtattaataaattacaacaagatggtggaacaatcttcatactcttttctgttgttttataagagagaatttaaagaagtatattagatataacgtcaaaaatagaagacagtattaaagtaa

SEQ ID NO: 24203 - DNA, 576 bp, Homo sapiens
catcagttttagactagagctacatcaccagctttcctgcgccctcagctttcaaacaacagatcatgagacttctcaacctccatatttacatgagtcaatctctaataataaatctttctctctctattgatatatcaaaagatagaargatagaaatatatatatatatatctttctattgtgtatgagttcttaagtgttcatacacaatacgcagattccttgggatcttctatttagataatcacagcatctgcaaatatgaacagtattatttattttttgttgttgttgcctgatctgtaagacttttattttcttctctagccagaatttccaatgtttccaacatttttgaataaaaatagtaaaaaatccttcagttttcccaatagatcgatctatcatccatctatctatctatctatctatctatctatctatctatctattatctatctatcatctatctagcatagttttaatttcagtgtgcatgtgtttattactagtttgtataaatataattgattttgtatacacatcttgtatcatgcaaacttaccaaatttg

SEQ ID NO: 24204 - DNA, 968 bp, Homo sapiens
actaggggtcttggaacatatcccccacacataagagggcactactgcattgcttagaagcaagtcacaggtcctcctcacatttaaggggatggggtcatacaaggatgtgaaaaccaagattagaacataatggaggccaccttaagaatctattcactggcattttaaggaagtcctgggagtgatgtcaccaatatggcagagtagtagatctacaagccttaatctccccataaaaaaatatagatagccattcacaaaccagaatagccctgatagtgctcaaggatctatttaagaatctaccacaacacactggagaaaaaaaagaagaatatccacagaaaggattgctgttgaaattggcatacttgaggcaccaggagatggttaggaacgaagaaatgcagaggatattggtatcagctgtacaggtgaactgctgtggttcccaggagcctgctttgcagaggacagtggcatcttttgcaacagaggtaaccaacagccattcctgtccaggaaccccatagagggagatgtggctgcacactcccataacccctaagaatcagttgctcttgtgctrttctgggactggagctgccacatttcccatccctgtgcatgcccccaacctctgagctgtggctgttccacaagtgcccacattcctgaccccttctctgagggtttattctgtgtacccatgtctcatacaccagaaccatagcaagctagatcatgtgtgggtcccagagccaaggtctctccgtgcatgcctgtgctctgggtacaaacttagctgccatagagagctagctggcatccctaacgctgcagccactgtagctctattcatgcccatagtcctgtcccaggttccctggcttacccattacttcataagcaccaacatgcaagtgggggtgccttcatcccagcaccaatgccattaatgcctt

SEQ ID NO: 24205 - DNA, 968 bp, Homo sapiens
actaggggtcttggaacatatcccccacacataagagggcactactgcattgcttagaagcaagtcacaggtcctcctcacatttaaggggatggggtcatacaaggatgtgaaaaccaagattagaacataatggaggccaccttaagaatctattcactggcattttaaggaagtcctgggagtgatgtcaccaatatggcagagtagtagatctacaagccttaatctccccataaaaaaatatagatagccattcacaaaccagaatagccctgatagtgctcaaggatctatttaagaatctaccacaacacactggagaaaaaaaagaagaatatccacagaaaggattgctgttgaaattggcatacttgaggcaccaggagatggttaggaacgaagaaatgcagaggatattggtatcagctgtacaggtgaactgctgtggttcccaggagcctgctttgcagaggacagtggcatcttttgcaacagaggtaaccaacagccattcctgtccaggaaccccatagagggagatgtggctgcacactcccataacccctaagaatcagttgctcttgtgctgttctgggactggagctgccacatttcccatccctgtgcatgcccccaacctctgagctgtggctgttccacaagtgcccacattcctgaccccttctctgagggtttattctgtgtacccatgtctcatacaccagaaccatagcaagctagatcatgtgtgggtcccagagccaaggtctctccgtgcatgcctgtgctctgggtacaaacttagctgccatagagagctagctggcatccctaacsctgcagccactgtagctctattcatgcccatagtcctgtcccaggttccctggcttacccattacttcataagcaccaacatgcaagtgggggtgccttcatcccagcaccaatgccattaatgcctt

SEQ ID NO: 24206 - DNA, 1693 bp, Homo sapiens
tcttttatgctctcctattttttgtggtttttagctatgtttatacaactctactttttatttggtataaccaaacatgtattttccacagtcctcaattatttattgtttattcagtttaaaaacagaataatatctcacctaaaacaaaagctactatgctaaacatccccaccattgttgggcattcaggagttttagagaatttgctctttcagttactgctggagtgaacagatggaggatctttttattgttttcagtatgtgcctgtaaataatccataagtcttgccacccagtgaggctgagtgcatttctcctgtctgtttaaccatgatgctgccagtgtgacctcactacaggagacgggtcttgataagcccttcaccatctgtccagtagaaggtaatctcgaattccactgaataaatataaaatgcttaatgctgtataacatagagctccatgcttctcaggagaataagctttaaaaagtaatctctgctccataaaaataaaacaaagaaatataataaatagaagtaatataatatataccatatcatatatattttgtatttatcaagagaataaaaatagaaatataatcttagatctataaagtataacaacataaactggtaaattggtggatacttagatcacaaaataaaagatataatggatacaataagaacaaaatatcttatttttaaaatgagagtgagaaatatttttacagttacatggaagtcaagtggatataaactccagttttcttgcttccaatcctaaacaaatttgtcataactgcatttgtattttgaccaatccaaatctacttttcacctgtattactagatgtcagatatcataacttcttgctcagttaggcaaagactacctatattataattaggtcaaatgcttatttttattttctttacagcatcaacatttatggcttattcagaaaaaatcaactttttaaagttttttttttgaatcagggcaatgcaaataagacacataatgtaacactctttttcattcataaaaaatggcaaaaatgaatgtctattaaagttatgtattagaatgaggactaataaaatcctttacgcatgactttttgaaattatttggcattatctactaaagttgaaatatgcacactctataaaacagcaatgtcatttttaggtggatatccaaaacaaattattgcacatgtgcagcagatataagacaatgcatacatcaaaacactcaaaatagcaaaaaactgggaacattccaaatgctcattaacagyacaaaatgttattaaattatattttacagaatcaatacaacagaataacacattccatctcaaatgaatgatcttcatcttcatacaccgacaaataacttttcacaatatggtattaagtgaaaaaaaaagtccggaagaaaagaaacaaacaaaaaatcccacaatattcttttaataaaaattaaatgcaattaaaacaaaattacatattatttgaacacatagttgtgcttaacagatattaatatatatacatatggtgtgtatgcacatatatatgtgaatatgtgtgtatttctatatatcaaataattaaaaatagaaaattgagaatattaattattgaggtgaaaactgataaggaaatcattct

SEQ ID NO: 24207 - DNA, 1693 bp, Homo sapiens
tcttttatgctctcctattttttgtggtttttagctatgtttatacaactctactttttatttggtataaccaaacatgtattttccacagtcctcaattatttattgtttattcagtttaaaaacagaataatatctcacctaaaacaaaagctactatgctaaacatccccaccattgttgggcattcaggagttttagagaatttgctctttcagttactgctggagtgaacagatggaggatctttttattgttttcagtatgtgcctgtaaataatccataagtcttgccacccagtgaggctgagtgcatttctcctgtctgtttaaccatgatgctgccagtgtgacctcactacaggagacgggtcttgataagcccttcaccatctgtccagtagaaggtaatctcgaattccactgaataaatataaaatgcttaatgctgtataacatagagctccatgcttctcaggagaataagctttaaaaagtaatctctgctccataaaaataaaacaaagaaatataataaatagaagtaatataatatataccatatcatatatattttgtatttatcaagagaataaaaatagaaatataatcttagatctataaagtataacaacataaactggtaaattggtggatacttagatcacaaaataaaagatataatggatacaataagaacaaaatatcttatttttaaaatgagagtgagaaatatttttacagttacatggaagtcaagtggatataaactccagttttcttgcttccaatcctaaacaaatttgtcataactgcatttgtattttgaccaatccaaatctacttttcacctgtattactagatgtcagatatcataacttcttgctcagttaggcaaagactacctatattataattaggtcaaatgcttatttttattttctttacagcatcaacatttatggcttattcagaaaaaatcaactttttaaagttttttttttgaatcagggcaatgcaaataagacacataatgtaacactctttttcattcataaaaaatggcaaaaatgaatgtctattaaagttatgtattagaatgaggactaataaaatcctttacgcatgactttttgaaattatttggcattatctactaaagttgaaatatgcacactctataaaacagcaatgtcatttttaggtggatatccaaaacaaattattgcacatgtgcagcagatataagacaatgcatacatcaaaacactcaaaatagcaaaaaactgggaacattccaaatgctcattaacagtacaaaatgttattaaattatattttacagaatcaatacaacagaataacacattccatctcaaatgaatgatcttcatcttcatacaccgacaaataacttttcacaatatggtattaagtgaaaaaaaaagtccggaagaaaagaaacaaacaaaaaatcccacaatattcttttaataaaaattaaatgcaattaaaacaaaattacatattatttgaacacatagttgtgcttaacagatattaatatatatacatatggtgtgtatgcacatatatatgtgaatatgtgtgtatttytatatatcaaataattaaaaatagaaaattgagaatattaattattgaggtgaaaactgataaggaaatcattct

SEQ ID NO: 24208 - DNA, 497 bp, Homo sapiens
tattttttatattaagaacataaatctatattttaaaaattatattttagtctatttaggttttacatttttatttgtatctttacctttttatttgtattgaaacttaagtgcagtttccccaacatcatgttaaacaacttatttttcaccttgtgtttatgttactaacttcattgtatatttattttccacacatagattgacgtttccctgagctctttattcaattccattagtctatctgtttattattttatgtataccataatgtattcaaatatagaataaacagtttaggggatggataagaatcaataatattttccatctttcaaaacaatataaatacatctataaattggacaatagatcaaatgtttactccataacggacagggatctcaagaatccatgataggtaagaatatttcttaaactatcctggagcctmtacataatgactacagagtctttttatcagacaactgataaaa

SEQ ID NO: 24209 - DNA, 650 bp, Homo sapiens
ggcccttacctgtcagcttcttcttgatggcgtccttggagctggcataaatcattttgctcttaaggggcgcagactcgggggccctggacagaaacacgcgtcaggcaactcccagcaacagcaaagccacaggtgactttgagaaacccttgggctggcagtgaggagtcttttgttacaaccccctccccctccaaacccacacatctgggttgaccaggagccacaraagttcccatcatgagaaagggggcaggtgacaggaagaagtgccagaatgagctcaccagaagataaacaccagatcctccttcttgctctccttggtctcataggttgcatcatagagggcatagcggcagtccttatctggcagcatcttgacaaaggtggcgtaggggtcgtcgacagtctggcccacatcgcccaccaggatctccttgccctcctccaggatgatgttcttcttgtcctcactcaggcagaagagcaccgccttcttgcgcttcttcacctcctctggcgttgaagacttacgcaccttcatgtcgttgaacaccttgatgacaccatcagagacagccacaccggaggcctaggagacatgccacgtatacgtcaagaaaaggattctagggaactgcccc

SEQ ID NO: 24210 - DNA, 650 bp, Homo sapiens
ggcccttacctgtcagcttcttcttgatggcgtccttggagctggcataaatcattttgctcttaaggggcgcagactcgggggccctggacagaaacacgcgtcaggcaactcccagcaacagcaaagccacaggtgactttgagaaacccttgggctggcagtgaggagtcttttgttacaaccccctccccctccaaacccacacatctgggttgaccaggagccacagaagttcccatcatgagaaagggggcaggtgacaggaagaagtgccagaatgagctcaccagaagataaacaccagatcctccttcttgctctccttggtctcataggttgcatcatagagggcatagcggcagtccttatctggcagcatcttgacaaaggtggcgtagggrtcgtcgacagtctggcccacatcgcccaccaggatctccttgccctcctccaggatgatgttcttcttgtcctcactcaggcagaagagcaccgccttcttgcgcttcttcacctcctctggcgttgaagacttacgcaccttcatgtcgttgaacaccttgatgacaccatcagagacagccacaccggaggcctaggagacatgccacgtatacgtcaagaaaaggattctagggaactgcccc

SEQ ID NO: 24211 - DNA, 1187 bp, Homo sapiens
ccggagtccagggaggctgtggcctttgatgagaggaatggacgagatctgctggacactgaggtgtctccacagacatcttgtctgctgggctggccacacagggaggcctcagtccacacctcccacatgctgttgcatatagcrtaagatcttccatgcttcacattataactacttcctgtcttcttcttaggtataacatgatttcaaaagctaaagtctgtaattttcatgctgtctgaaacggcttctagtagaatttgtgataaaataatttgagtttgggtttgaaaaatagaaataacatttggagaaaagtatgccttgtggctaatgatgtagtgtctagacatcattttatgagtaattgtgcagtatttttcctggtaatacgcgactttgtattttcctagttcctgacgtcagtcgaaatggagatccgtttgtagctacctccatcgtggaagcgattgcgactgttgacagagctataaactcaacccgaacacatttgtttgacaggtatcgtggggctgtaaacacgctgaccctcaaatcactgagctttagggtgaaggtgggagtgattaaagaatgcatgcagttctaatatatgaattttgatttgattatctgatgatcaaaatgtttaatttaaaaatcatgaacaacatgggcatctgagttttctgggggttgaaataacagaaggatgtgtgcttttcaaatagaatttggctatgatccacaaccaaaacattctttgaaaatttcaactcattcctttggcttatgactaaatgatttggcaaaaacaaatagtttaaaagtcattagtgtatttgttcacgttgctgattccaaagcagtttttctgcatcttatgtgaaatgcaatatctgtgattttctctattgacttaattaattatttgtttttagtgtcttccggtttttgtctgtttgttttgtttttgttttgttgcctcccacttcggatgaggaaggtatagtacattatgttgtagaaagtagccgtagaaatattaatagcaatgattatattttggggtactatgaattttatcttcagtaatttgtttcattcttcctttcttccccctaaactctggttagccgtcctcgttctccaaatgatttgctggccttgttccggtatccgag

SEQ ID NO: 24212 - DNA, 556 bp, Homo sapiens
gaatctgcacgcacagcagtgcaactgcgttacatggatttactttttttgtggctgttacttttataaaaatggaatcataccagacaataytattctgtaagttatgtttttcatccagtgataataaccactatcatcatacacagctataccagatggcattttttaagcatttgcaaatattagtttagggtgaggattgagaggaatcgttgtaagtcggcctggtgtccacgagctgcagtgtgtcctcatccgtgccccgtgtgcattgcagctggcggtgtggttgaacggtctttgtgtgctttccagggtgatgctgagaacacacccatccttcatcttctttccgttctgctcccatcttctcctgtgccctctgcctctttctgactcttcgttgtagacattgctcctaatggtcagacgtctgccaagactgtggtcattttcttggtcgcgtttttaccccaggctgttttttacatgtcctgttttgaatgctttctctccggaagctcttcctcagttcactgtgacgcctcaggac

SEQ ID NO: 24213 - DNA, 542 bp, Homo sapiens
ggggaagggcaagacactcactgaccaggtgcccaccccaaggctcaggaccacccccattgcctgtgaacacatttgcatagcactcaagaaggtttcccagaatagcgacaggtaggcctacaaaccacaccaagaagaacgttcttaacagatggctcacgagagacataaaaggttctggaagtgccttcaggcccattaccatgactggccctgactctggccctcacagagcggcaagttcatgggtcactggctcacactaaatgctcagccgccagcayagatccaaacaagacctccatgagcagagaaactgcagcggctgaacacactccccaagcctcaggggagaaggtgtagaacaaatattttttaaatagccatcatgatgtccatgtttacatgaactaggtcctttgcttacctgctgtctcaacttctaaaagaatagtaattcagctgaaggactcccaaattaggaatgtcaaacacacaaaaagcaaatttctcagaatgctccaccatatgcttcggga

SEQ ID NO: 24214 - DNA, 548 bp, Homo sapiens
atctagaaattacagtaagaaacaaaagatgctaactctaatgaaggagaagtgacaaaagaggttggagaagaaatacatgctttaacgctcctattctccagataaaataaggcacctgatactaacacatgagtccctgccaagagaamataatcattgtattgtagtggctctttgtgcacagaatttaaggacagggcctactcttatccttgagggaaaaaagtaagtatctgatttaaaatatccactaatgtgcttacaagaaataatgcataacccattagcaagcctttgcatagcaaattaataatttgagattcggaatttacctgaaggtctcagatttatactagtttaactttttcttcacttcttttgaattatggacatgggaacaatttttcatactatttggtgagcctgttacttttagcaatagcacttgcagtgtatgtcttgaatttgaatgtgtatatatgaaagctacaaccaaatggcctatgagatattattagtttctttacacaaaatctgctagaata

SEQ ID NO: 24215 - DNA, 563 bp, Homo sapiens
tgtttccagcaaaatatacatttcaaacataaaaaattatatgatgtattatttataaagacatacatttatagtaaaaatgaaaacatgagtaggaatgacaaacataggaaaaagagaaaagaatgcaattggggtggctacaaatggagcttgaaatacatcrgtaatgacttatttaaataatatgacgttgacatgttgcaattattagaatttgataaatctgggtagtgggtacagaggcatttattatgttattcttctctgggtgtttggaatatttttcttaaaaaggtgagaaagaaatactttgaagactattacaatcagaatggtacagggtcaatcttgtttccatgcccaagtggcactacaaaagggagtctgatccatttatcattgctgctaagtgcttcatggtcttgccacaaaacctagccctgctagtgaactgctgtagtgatatcttgatagtgcagctacctgcacaggcctctcccatcaggaacaaactcttctccttacacccatgctctgttttctagatttgcaaattttag

SEQ ID NO: 24216 - DNA, 527 bp, Homo sapiens
ggattttggaacgatccagaactccatcagctgcttggagtttaaatcctcaacatttgcaaagcaacggatagctggcttcatccatcacattcaggctgaaactggtaggttatcactgtgattgttcactgggaaataaaaacagagattgttcactgggaataaaacaggaaataaaacagggaaatgaaatgtgaagatcaagatatatcagctcccaaatgtgggttttccacctgyttcccagtaactgtgggcagatacttgtgaatattcagaaaaccactcagaaagcctggagaagggcatcttcaactaactagggcaatactgtgactaacacagtagggtgttatttggcttgtttctggtgagccctcctagtaccagagtagtatgtatccatgttgcatgctgcagagtcctcaggaaaaagatttacaacccaaaagttacatgtgagcagctggtttatgtgaagccagatgctgacagatgaaaatatgcacagggagagagaaaaa

SEQ ID NO: 24217 - DNA, 527 bp, Homo sapiens
ggattttggaacgatccagaactccatcagctgcttggagtttaaatcctcaacatttgcaaagcaacggatagctggcttcatccatcacattcaggctgaaactggtaggttatcactgtgattgttcactgggaaataaaaacagagattgttcactgggaataaaacaggaaataaaacagggaaatgaaatgtgaagatcaagatatatcagctcccaaatgtgggttttccacctgtttcccagtaactgtgggcagatacttgtgaatattcagaaaaccactcagaaagcctggagaaggrcatcttcaactaactagggcaatactgtgactaacacagtagggtgttatttggcttgtttctggtgagccctcctagtaccagagtagtatgtatccatgttgcatgctgcagagtcctcaggaaaaagatttacaacccaaaagttacatgtgagcagctggtttatgtgaagccagatgctgacagatgaaaatatgcacagggagagagaaaaa

SEQ ID NO: 24218 - DNA, 624 bp, Homo sapiens
gggttcacgccattctactgtctcagcctcccgagtagctgggactacaggcacccgccaccacgcctggctaattttttttttttttgtattttttaagtagagacggggtttcaccgtgttagccaggatggtctcgatctcctgaccttatgatctgcctgcctcagtctcccaaagtgctgggattacaggtgtgagccgccgctcccaaccactaatttttcgtattttttagtagagacgaggttttgccatgttggccaggcaggtcttgaactcctgacatcaggtgatctacccacctcagcctcccaaagtgctgggattacaggcgtgtgccaccatgcctggctgaatttcttttaccatactgtactaaagttaaaatccaatgagctttacatagatagcccagacatattttttaaatgtttggtaataacagagtagtaacaaataggtagctttgtattcattaattgttttaaataaagacagggcgctatatatatatatatacacacacatatatatacacatatatatacatatatgcacatatatacacatatatacatatatacatatatacatatatacatatatayatatatatacata

SEQ ID NO: 24219 - DNA, 624 bp, Homo sapiens
gggttcacgccattctactgtctcagcctcccgagtagctgggactacaggcacccgccaccacgcctggctaattttttttttttttgtattttttaagtagagacggggtttcaccgtgttagccaggatggtctcgatctcctgaccttatgatctgcctgcctcagtctcccaaagtgctgggattacaggtgtgagccgccgctcccaaccactaatttttcgtattttttagtagagacgaggttttgccatgttggccaggcaggtcttgaactcctgacatcaggtgatctacccacctcagcctcccaaagtgctgggattacaggcgtgtgccaccatgcctggctgaatttcttttaccatactgtactaaagttaaaatccaatgagctttacatagatagcccagacatattttttaaatgtttggtaataacagagtagtaacaaataggtagctttgtattcattaattgttttaaataaagacagggcgctatatatatatatatacacacacatatatatacacatatatatacatatatgcacatatatacacatatatacatatatacatatatacatatatacatatatacayatatatacata

SEQ ID NO: 24220 - DNA, 518 bp, Homo sapiens
tgaaggaagatccttagggaatgatctcatacacagtctttggagaggctggagtgggaggtgggtgagagagaagtgatgagggctcattttgtctgtgcacagcaagagagtgctactgggaaaatgttgactgagttaactgctcaattcagcatagaatgatcatcttttcctagttttaaaaaatattgggatggattttttaagaagggtcaatcatattatttatatcttggtgtagtgtttttgagaggaaaagtagaaaacagctagttgttgaaggtgggaaaaatgtgagaaaggggagcagtgttgagatgatatctatagtatacagtaaggtgtgagacagtggtttctgrttacagcaaaggggcctgaggaagcaggaagacactatttcggtatgacctaaagtagaaaggtgattagaagagcttattaagtgccagttgggcatcatttgttagcataatatagttagtttgattagcactcatgtgatattcaaacca

SEQ ID NO: 24221 - DNA, 527 bp, Homo sapiens
tggccgagactttgtacttcaattccttctaaactccgccagcttttctgcccacacatgttgtttgcagtgactttcttcattcccctccattatgattttttctattattgctgctccaagttcccatgaacaacctgaaaacatccttgtcaatctaagccaatatatacttactgcatatatgtagtaggaatcaccgtaatacagctctgtgtggttttggaagtctctgtttatggtggaattttgcaacccttgagtcatttgagtggatcctactttctgtcatctctccactctagaaaatctcaactctgttttctctgcagggtatgttcttatgrgtctcacccaggcccatactttatatcatcaaataacagattaggccctacatttccccagcataaaggctaggaggtgtcaataatgaaagtggtgctttagctattctgcaaaatagtgtggaagagaatattagggtgccacatgtttgaaggggtggggcatgagagacggcagtg

SEQ ID NO: 24222 - DNA, 990 bp, Homo sapiens
acaggaagcacagcagaaaaactaagacagaaattctcacagagcttccagtctactggggagtaaaagacaaaaaaaagaaaaccacacacaaataatgaggaaaggtatgtgcacatcactcacagtgttcacagccgcagttggaatttgacccgcactggttgctcagcagcggtggtgaatctgaagactgactgagtagggagcagcagtggctcctcatctctagatatcatcctctggataaggaggttcactcacagctgctgccacatttaatcctgaaccctgtgagggaggcatgaccaccctcaatttatgaatgtaaagaagacaaccagctggccgttccatcctgagaaaatgaaggagaaaagcccatatctgaagctcatggtcagtctcctggcatgggggatagaggcagcaggatagaatctcttcctaaggaactggggcaatgcggtagcttgagccctagagcaagtgtgatgtccgtttgctagaacagaagtgtgtgaatagagtgggcaggctgccaggcagaactggcaccgagagatccagctatggactgatggacacagagtaaccgccccgagctagggctgaggattaggtaactccaggtgtgtagaagctgcacagaggtggggatggtgccgagsagtgtggtggccattgagctgcacccccagggtcaaccttcaataaagaactggtggttgtgctgcaaagcatttccaggatctaccccacctttcagggcaaggctgtgctcttcctgagaagccttcaaacaatgtctgagcagggcaaggggactagaatctggacatttcttcccagcacaggactcctctgatagatgatccttctcggacactcattgttgggttggctgaaaagatcagatctgcgttgctctctgagtctctccctgcccaggcctggtcactgccttcctcccttcttttcacaggtgct

SEQ ID NO: 24223 - DNA, 2532 bp, Homo sapiens
atgataatattaaataaaagcaaatactctcataactttcaaggaaacatgcgatgactgatgtagtatcaaagggatatgttttggaagatgctctcttctatgtgactgaaaatatggggacatgctatacattctattttttcttattgattgtgaatttgttagtcatcaattttgctgagtctattcaaaayttccacttacataaactctttgagtaatgagtttcatagatatattgtgtgctatgcgaactagtacctctatttcttggttccattattcttgtactataggatattgtaaataaacctatgttttctgtaacatatcttttgaaaaaataatgcatcttctcagaaaacttttcctatcaagaatttttgttgttgctcttcatcagtctaagaaaaaactgtcttttttgtccttttttatttttgcccatattttcctcttcatcctccattcctatgctcatagcccatcctcactggcaccaattctgtgtttaatgtaaacgtccttgaaaaatagtgttgtttcatttcgaggatatactgaagttacctaaatttgaacatgatatggatttcattatttcttatcttgcttttgtgaagatgacattttatggagacaaaagataagttcacacataaaatttcaggtagtggtaaatgtaacaaggaaataaacacggtgattcagtagtgattgggttactttataaaagatggtctcttctcagaatgttttatttgagctgagaatagaaacatataaaagatactgttactaggggcatccagaccaagaaaatgttggctctaaagcaagaatcagtttgatacacgagacaaatccaggaggcaactactctgtctgaagcacactcagcacagaaaaggtggtcctagatgaggcaggagaaattggcaaggagtgggtcatatagggtcttgcaggctacaaccagaagcaagaattttactctaagaacaatttgagagccattggaaggttacaaagcagaggagcaatgttgttttttatttaaaaagataggttgctgtgaaaaaattggaaatcatcgaagaattaatgggatttcttgtcaagagtatcagattctatcttcattttcttctgctgtcttccaaaatcccattaaaatgacagtaaagatatagggaaaaaaatatatatccatggggagaagagtaggagaagtttaatgacaacactgttttgaagcctggaaagcaaattaattagtagttagtccaaagctatcattggagaaagcagagtagtaatgcatttcatactacagaaccacagaaagaatcaagaactggtggaaccaagcgcctccaaaagtgagaaagatacagttggggaggagaagtagttgacgctccatttaccaatcatttagactcctcgttcctctcctacacccaaacagaagcttagacattcattcactggagaggataagatagagtgtctctagaacaggggctaccagcacagttaagaatcttatactgaaaattcatccccagtcctcttctcccaatgattctcaggtttacaccttccagggtgattggaagattcttctctggggatctaacttgtcattttgttttccagcacaatggccgcacttgggtcagcctacaggaaagaccatagtcaataagccctcctcagactcaagagctttttaataagtattcaatcctctgttcaatatgaacaattaaaaatcaccagactttagaggaaagcatctgttatgaaatgcagagagtaaatagggggaaaaaaagcagcttggaggaaatagactatgcaagtagatgaaacctttaaaaaaagaactaccattaatatttttattgataatctcagaaagacaaaagaaaaaaatcacattcacaaaataatagtggtattcaagaaaaattcagagaacaagaatgtgcttttggaaattacaaatgacagaaaagaaaaactcaatagaaggcttaaaggagtacattaagaatacatcctggatatgcaaagatacggaatatagatcagaaaagctgccctcctatatagactagagaatcaatatgttaatggtctgatataataagattcccagagagaaactgagaatacaaaggataaaattaataaatatttggaaaagatttcataatttaattacgtgagtatttaaagagcacagtaaagcatactgtaatataagacttacagtgaaatttaacacattgtggcaaataggatatctataagtattcagagtgaaaataataaaatcactaacaaagaaccaagaatcaaaaatagactggagttatcaatactgaaatttagaaaaacaaacaaacaaaacttttaaaatattgaaaaaaaatccatccaagaaatctatactcagctaaccttctaattgtgagggtagaatacaggtattttggatataagggtctcaaaaactgt

SEQ ID NO: 24224 - DNA, 2532 bp, Homo sapiens
atgataatattaaataaaagcaaatactctcataactttcaaggaaacatgcgatgactgatgtagtatcaaagggatatgttttggaagatgctctcttctatgtgactgaaaatatggggacatgctatacattctattttttcttattgattgtgaatttgttagtcatcaattttgctgagtctattcaaaatttccacttacataaactctttgagtaatgagtttcatagatatattgtgtgctatgcgaactagtacctctatttcttggttccattattcttgtactataggatattgtaaataaacctatgttttctgtaacatatcttttgaaaaaataatgcatcttctcagaaaacttttcctatcaagaatttttgttgttgctcttcatcagtctaagaaaaaactgtcttttttgtccttttttatttttgcccatattttcctcttcatcctccattcctatgctcatagcccatcctcactggcaccaattctgtgtttaatgtaaacgtccttgaaaaatagtgttgtttyatttcgaggatatactgaagttacctaaatttgaacatgatatggatttcattatttcttatcttgcttttgtgaagatgacattttatggagacaaaagataagttcacacataaaatttcaggtagtggtaaatgtaacaaggaaataaacacggtgattcagtagtgattgggttactttataaaagatggtctcttctcagaatgttttatttgagctgagaatagaaacatataaaagatactgttactaggggcatccagaccaagaaaatgttggctctaaagcaagaatcagtttgatacacgagacaaatccaggaggcaactactctgtctgaagcacactcagcacagaaaaggtggtcctagatgaggcaggagaaattggcaaggagtgggtcatatagggtcttgcaggctacaaccagaagcaagaattttactctaagaacaatttgagagccattggaaggttacaaagcagaggagcaatgttgttttttatttaaaaagataggttgctgtgaaaaaattggaaatcatcgaagaattaatgggatttcttgtcaagagtatcagattctatcttcattttcttctgctgtcttccaaaatcccattaaaatgacagtaaagatatagggaaaaaaatatatatccatggggagaagagtaggagaagtttaatgacaacactgttttgaagcctggaaagcaaattaattagtagttagtccaaagctatcattggagaaagcagagtagtaatgcatttcatactacagaaccacagaaagaatcaagaactggtggaaccaagcgcctccaaaagtgagaaagatacagttggggaggagaagtagttgacgctccatttaccaatcatttagactcctcgttcctctcctacacccaaacagaagcttagacattcattcactggagaggataagatagagtgtctctagaacaggggctaccagcacagttaagaatcttatactgaaaattcatccccagtcctcttctcccaatgattctcaggtttacaccttccagggtgattggaagattcttctctggggatctaacttgtcattttgttttccagcacaatggccgcacttgggtcagcctacaggaaagaccatagtcaataagccctcctcagactcaagagctttttaataagtattcaatcctctgttcaatatgaacaattaaaaatcaccagactttagaggaaagcatctgttatgaaatgcagagagtaaatagggggaaaaaaagcagcttggaggaaatagactatgcaagtagatgaaacctttaaaaaaagaactaccattaatatttttattgataatctcagaaagacaaaagaaaaaaatcacattcacaaaataatagtggtattcaagaaaaattcagagaacaagaatgtgcttttggaaattacaaatgacagaaaagaaaaactcaatagaaggcttaaaggagtacattaagaatacatcctggatatgcaaagatacggaatatagatcagaaaagctgccctcctatatagactagagaatcaatatgttaatggtctgatataataagattcccagagagaaactgagaatacaaaggataaaattaataaatatttggaaaagatttcataatttaattacgtgagtatttaaagagcacagtaaagcatactgtaatataagacttacagtgaaatttaacacattgtggcaaataggatatctataagtattcagagtgaaaataataaaatcactaacaaagaaccaagaatcaaaaatagactggagttatcaatactgaaatttagaaaaacaaacaaacaaaacttttaaaatattgaaaaaaaatccatccaagaaatctatactcagctaaccttctaattgtgagggtagaatacaggtattttggatataagggtctcaaaaactgt

SEQ ID NO: 24225 - DNA, 1228 bp, Homo sapiens
atgacacattgactctaaaaatgctttctaaatacttcaaaaactttgactctgaaaataattaaagtacaaagaaaaaccaacagcagcaaagtcaaacaaaaattgacaatgtttatgtaagggataccaaagaagatgggatggggcacccctaacctggcataaaaagtatatatataaacatattttggttttgtggtttttattgaaaattcgcagactcctttttatgccaaggagtctgcaaatttaaaaaaaaaaacacacacacaaactaaaatrtaaaaaaagcagcagtactaggacgaagtttaatgatagggtggattatattcactcactcattcattcattcattcattttgaaacggagtgtcactctgctgcccaggctagagtgcagtggcacaatctcagctcactgcaacctctgcctcccaggttcaagcgattcccattcctcagtctccctagtagctggaattataggcacatgtcaccatgcctggctaatttttgtatttttagtagagacagggtttcaccttgttggccaggctgatcttgaactcctgacctcaaatgattcaccaacgccggcctcccaaagtgctgggattacaggaatgagccaccacgcccggctacatttaaatagtaaataagctttcattcactttaaagtgtgggaatcaagaaaacaaacaaacaaacaaacaaacacttttttttttaacagaaaagaaacatggaaaaaaaaaaaagaggcaaggataactggctggaacagctagtaactggagaacactgaagttgaggaaacttaaacacaaaaggagataagaattctgcataagtgaaaggaattttctccacagagctgttacctgcttgggctgtcattgctataatcgccagttgaaaacgctgttaaagaaaatgcaattaggcatttagaaaagaaaagacttccttaccttttaaattagagggagagggagggaaaatgttacaaccatatccatacatatatacttacagtgagcatctaaaaatgtgagcgtttcagctgttgcgactgttgctcctagcaaccgagcagtgatcagaccttttctttctctttgtctgactatttttactatagaaaattgttttacatattcatctagtttatcatgtaagtactctgtaaggaaaaaaaatcagggttaattctttctaa

SEQ ID NO: 24226 - DNA, 1228 bp, Homo sapiens
atgacacattgactctaaaaatgctttctaaatacttcaaaaactttgactctgaaaataattaaagtacaaagaaaaaccaacagcagcaaagtcaaacaaaaattgacaatgtttatgtaagggataccaaagaagatgggatggggcacccctaacctggcataaaaagtatatatataaacatattttggttttgtggtttttattgaaaattcgcagactcctttttatgccaaggagtctgcaaatttaaaaaaaaaaacacacacacaaactaaaatataaaaaaagcagcagtactaggacgaagtttaatgatagggtggattatattcactcactcattcattcattcattcattttgaaacggagtgtcactctgctgcccaggctagagtgcagtggcacaatctcagctcactgcaacctctgcctcccaggttcaagcgattcccattcctcagtctccctagtagctggaattataggcacatgtcaccatgcctggctaatttttgtatttttagtagagacagggtttcaccttgttggccaggctgatcttgaactcctgacctcaaatgattcaccaacgccggcctcccaaagtgctgggattacaggaatgagccaccacgcccggctacatttaaatagtaaataagctttcattcactttaaagtgtgggaatcaagaaaacaaacaaacaaacaaacaaacacttttttttttaacagaaaagaaacatggaaaaaaaaaaaagaggcaaggataactggctggaacagctagtaactggagaacactgaagttgaggaaacttaaacacaaaaggagataagaattctgcataagtgaaaggaattttctccacagagctgttayctgcttgggctgtcattgctataatcgccagttgaaaacgctgttaaagaaaatgcaattaggcatttagaaaagaaaagacttccttaccttttaaattagagggagagggagggaaaatgttacaaccatatccatacatatatacttacagtgagcatctaaaaatgtgagcgtttcagctgttgcgactgttgctcctagcaaccgagcagtgatcagaccttttctttctctttgtctgactatttttactatagaaaattgttttacatattcatctagtttatcatgtaagtactctgtaaggaaaaaaaatcagggttaattctttctaa

SEQ ID NO: 24227 - DNA, 538 bp, Homo sapiens
acctatgtccctaaataagggttaagaaataaagacagaaataagaatatgatttttagagtagttcttatttatgccttaggaatcttgctgcaagaaagtagaattattcaaatggatcctatgtcagttgccatgatccaaagagcagtgggtaaggagttttcaagaaggccccaggaaatctatgagataaaacagaaggcatcaggtcctataggctgagaaacaggcctggtgttgactgtgaagggagacctatttctctaagtcttcagcaactttcatgagccgaaaagactgtctaatgccaaaatattaaaaatggcaaaattctccttacatttttaytttttctcttacaaagtagtcacataagtcagcaataagttaacacaaagtgttgtaccaggtcactccactccttgataaaaattgctataatatgacataatcatggtccaagtgactgaaactagatgactcccaagtataatttgctgaatcacagcttcagaaaatcaaggtacttcttcat

SEQ ID NO: 24228 - DNA, 541 bp, Homo sapiens
cagtatcaggtatggctttattagcagtgtgagaacagactaatacaccaatatatcccaccttcttctgtctgatttttctagctgccctgacagccaatgggagggtgcccaatcacatggagggtgggtcttctctcccagtccactgactcaaatgttaatctcctctgcaacaccctcatagacgcccccagaaacaatactttcccatctatctaggcattcttcaatccaaccaagtcaacacctaatattaaccatcacacttgtcaaycacaatttttatctttgttataaaatccttgaagaaaatcaccgcctgctgaaagagatgtttcttattttcaaagcaaatgggttcccctaggtggcaagatggcccaatggatattattctctcacttatcagtaggccacctcctttagggaaaaaccatttaccataaagattactttctaatactcctcagcttaaaactaatgccttctaaactatgagctgaggccggactttggaggggcagagcaggctagggca

SEQ ID NO: 24229 - DNA, 1261 bp, Homo sapiens
taatcatacatgactgaatttatacacaaaagcatgtgagagtctcaaggtatttctacaaactactgaaaccaaaaaagaaacctttttctctcataatttctgaatgtttccagggaaacttatttgcctgaatcaatatggatgactgctrtaattttttactttaccttgaatgtacagattttgaccctattcaaagagcttgattatccagccagagaaatggcccacagaccataaactctacaagtgatgtaattctggggaaaaaaaaatctaacataaccctgagatcaagcagatctctatgattttgtcttatttcaaataatccttaagggtaacagtgcattatttgacctaaagaatgtttctcagcctcctccaattcccaatcagacacttgagcaagtatttcagagacaaagagaatctctcttctggctcttcttttcagaggctgacccttctgttccactatgggcaagaaagaagctggaagtttaaaactgtgatgatttctgtacactgtaagttaaaaacagaggttatcttttccaaattggaaggcgatttactctttcttcttaaagaaggaaacaaattctctcccagactccaatgctactgtgctgtttgaaatttgcgaataacaatgtatgtgccatacctatgattcttaaacttctctttaagaactttatgtaatgtctattcatcatgcagctttctgatccccactttcagaatttctgatgaggggagaccccctgtgtgattcaatgcagatcatccaaggtgcctatcagtagccttgcttatcacctggcgcttattagaaatgtagagtctcagctccatcccagaccttctgaatcagcatctggattttactaacattctcagatgattcaaatacatattgaaaactgagaagcaataaattagacatccctctgcgttcctgttgtagtttaagtatgaataagaaagaatttctatggtcttaacagctttcagaagttaatttattggtagaataaacagtttaaactaaaactttatacattttaaaacaggattaaagccatttattttaactataaatgacattggaatagtgccctgactccagtaaaatggtgagttaggagcttataatagtaataggtttggttgttagtaagacttggaaaatagaggattaaacaagacggaagtttatttctctctcaaataaaagctattcacatatgca

SEQ ID NO: 24230 - DNA, 637 bp, Homo sapiens
aagggcataagcaagaaatgaataaggaaggaaggaagagatgaacaggccttgaggtaatggaaacatgtacaatggactatggaacctgattatatgaaaacagtactggagcccaatgcctggaaagaataaacagcaaagttaaaaataatagtacaaggttctggaaagagtgtagctaagaggaaagaaaattttagaccgggcatgttggctcacgcctgtaatcctagcactttgggaggccgaggtgggcggttcacgaggtcagatcaagaccatcctggctaacacggtgaaaccccrtctctactaaaaatacaaaaaaattagctgggcgtggtggcaggcacctgtagtaccagctactccggaggctgaggcaggagaatggcatgaacccaggaggcagagcttgcagtgagccgagattgtgccactgcactccagcttgggtgacagagcgagactccgtctcaaagaaaaaaaagagtaaagaaaattttagattaacatctaatttctcactggaagatcaagtaaatgctaagaatataatttttaccatgttgtaaatattgaaaatttaaaactgatatatcactttaaaaatgtaatatatttaatatactta

SEQ ID NO: 24231 - DNA, 570 bp, Homo sapiens
attgcagaagtttcctaataaccttttagaaatcatgtgttttattgcttcagcgtaactattagtgaccatttccctgaccctccagttgaagattttccagtgttcactctctcagctcttccccatattgtgttaaccctaattcctttaataaatgtccttttttcataacacctaaagtggtcctaaccaaacctaaattgatacaaattatttgccttttaaaaaatctatgtgcttttgccactcagatcstctctcatttcaaagcactatccatctgtgacactggcagcagcacaactcacaaacttttatagcatttggacataattgccttttgttttgaaaacacagggcaagacatagagaagtgctttctctgaggcctgaacagtgttaatcatgagaatgaatgttcatggtttcagattatactgtgccagtgctaagttctggatcccaagtgacagaagtaaacacatgttctttaaaaaagttaataaaaattgcatatatttatcatgtccaacacgttttgaaacgtacatagtggaataatgaagt

SEQ ID NO: 24232 - DNA, 570 bp, Homo sapiens
attgcagaagtttcctaataaccttttagaaatcatgtgttttattgcttcagcgtaactattagtgaccatttccctgaccctccagttgaagattttccagtgttcactctctcagctcttccccatattgtgttaaccctaattcctttaataaatgtccttttttcataacacctaaagtggtcctaaccaaacctaaattgatacaaattatttgccttttaaaaaatctatgtgcttttgccactcagatcctctctcatttcaaagcactatccatctgtgacactggcagcagcacaactcacaaacttttatagcatttggacataattgccttttgttttgaaaacacagggcaagacatagagaagtgctttctctgaggcctgaacagtgttaatcatgagaatgaatgttcatggtttcagattatactgtgccagtgctaagttctggatcccaagtgacagaagtaaacacaygttctttaaaaaagttaataaaaattgcatatatttatcatgtccaacacgttttgaaacgtacatagtggaataatgaagt

SEQ ID NO: 24233 - DNA, 512 bp, Homo sapiens
tcaagcctctttctgcatcccagcactaggcttagcacctccccagttgccccaccatctgctgggtcccaccacactctgcatctctctttttggtctcagcaccctgtgaattacccccaggattgcagaaacaagtgtgtttccaggttctgtaactccatgtccacgctttggctacttactgtcattgtgaatctctagatcacaccaactttttaaactagatctctgtcttcaatstgaatttcttagaagccttctattttcctgagcagattctgaccagtggagctaccctatgaaggaagggccctgcagccttgggaaacaaaaggtcaaccaaagttaagcagttttccttcctgcggaacttctcagagcattgaatatatgaaggggcattgtggatatcgaagagggggatcaagcaggaagcatcactatttccaaacattgtttctcaaagcagcccttgttttgtagagcatcttgtggacctggtgttcaca

SEQ ID NO: 24234 - DNA, 512 bp, Homo sapiens
tcaagcctctttctgcatcccagcactaggcttagcacctccccagttgccccaccatctgctgggtcccaccacactctgcatctctctttttggtctcagcaccctgtgaattacccccaggattgcagaaacaagtgtgtttccaggttctgtaactccatgtccacgctttggctacttactgtcattgtgaatctctagatcacaccaactttttaaactagatctctgtcttcaatctgaatttcttagaagccttctattttcctgagcagattctgaccagtggagctaccctatgaaggaagggccctgcagccttgggaaacaaaaggtcaaccaaagttaagcagttttccttcctgcggaacttctcagagcattgaatatatgaaggggcattgtggmtatcgaagagggggatcaagcaggaagcatcactatttccaaacattgtttctcaaagcagcccttgttttgtagagcatcttgtggacctggtgttcaca

SEQ ID NO: 24235 - DNA, 1058 bp, Homo sapiens
aacagcaccagtgcatgtaggccgagttccctgaatggaattaatttttcttcacactggtagtcagaatgcacatttaccagctacactagctttatacaaaacttgaaagccaagtttaatcctgtgtgattaaaaaccctgagcgccacattccctcaaactgggcttaaacacagaactcaacaggtttgtaattacatgcaatgmcactctctggcatgactataataccattttacaacacaaaggagaactattgagttctattcacaagagaaagtgctacattgattcctctcttggtgggatagaaagcatatgtcacagcatatattttttctgcaattaatttttatgaaaccaagcataaaagataatgcacctgatttctgtatttgttttaatgtgccctggggaagttctaacaaaccagaagcaggaacaatgatgggacccatccggatttcagcaactgagtaagcagatacccctagtgtgagaagtaaacttgttttgttatccttgactgcctttccttctccatcccctatcccccattccctactaggcaagaccacacgaaatccaaaatccacccccaaatggatgagacttgcctatttcaaaggtccctaaggaaagcccacttggtcttcatcccagtgactaacacacctcattatcagaaaactctgcctcacaactaagccctatgtaactgagatgtccagcgcttctgactcatccacatttccccagggggcacttgcatgcttcagacacccttcaaagtgtgggcactggagcccctctccctgactgggttagtgggtgtcactgcctgcaggagcccccaagagaaccctggagcagagcctcagtgggtaggacggacaagccaagaacgagggacacgggcacacaccaggccaggccaggtgggtcctctgccccactcttgcctcaggtgctggcaggatgccagtcttcacagctatttctctgtgctcccttcctcccccactttgtggactgcaagccaaccctagaatgca

SEQ ID NO: 24236 - DNA, 516 bp, Homo sapiens
taaggtagaggaggaggagaaccacataaagccccaaagaccactgcgagactctggtttttaccctaaatgagatgggaaaacactggacagaggagtaatgtgatctgactcaggtttaaacaggaccactccagcttctgtgttaagagaaaggagccatgggccctcatccatgaccaggggcctggcactggagacctcccggtgaacctggccaaagcatatggcagggttatgggctgagctgtgtcctctcaaaattcatatgctgcagtcctaaaccccgggacttcagaatgmgactgtgtttgaagatgagatttttaaaggggtaatgaaggttaaatgaggacattggggtgggccttaatccaatatgacccatgtccttataaaaagagattaggacatgaataagcatgcaccaatggaagaccatgtggagatacagggagaagacagcttggactgctccaacaaaatgtcatagaccaggcacttaaccaacaggga

SEQ ID NO: 24237 - DNA, 788 bp, Homo sapiens
cagaagaggggactgtggtggtgcccaggcaggagtgcccatgaccctgaagccccagagagagtgttacagcatgctaattagctcttttagtcccgtcatccacaacccagtggacggtggcgtgttaacagctctgccctgtggcagagggccatggtgttacagtcttctctatacccacattttggtaggtcccaagctcttgtcctgtgtccaagaaggaggaggatacactgacaattaaagggtgaggagggcagagaataattttattgagtgaagaacagttctcaggggagaggggacatgaggctggtctcctacttgacgtcgggtgacttctctttcaatgtggctgggtccagggcttttatgggcttagaatggggagtgtgtgctgattggtttgtgagtatggaaaaaaggttaaaacaaaactcaaaggtgggcatgacagtataaaaaccaattagggaagggtaggtatatgtaaaataggtgaagggtggggaccaatcagaggaaactgtgccaaaccagaaaagaggttctcaatctggtccatggatttgacttgtagcttagttttcaggctttgaactrtcttaggcttgaaggtcaggtttcaccagggagttgctcctgtctgccttggatttgtctacctcctgtcactatcagtacaggagaggccaaaaggcccaacacaggccttgaggtccccaagcaattccagagattcctggggaaagggtatgattctctgtgaataaaaatggcaagga

SEQ ID NO: 24238 - DNA, 1064 bp, Homo sapiens
ggatccaaggccagccagctctccacagtagagtctggccctgaaaccaggagcccggcactaacamcatcagctggagcttccagagggtgagatcgtggccgactgtggctctatgatttctgaaccaccttttctaactcccagagactaagagactgtggaacacattttcatctcttcactgtgtcattttctcactggaataagtctcctaatgggtccccttgcctctgtctcaaactcccctttctgtcttccacacagttgctgccttgggtggaagtgggggttacatttcctaaaaatggctcattcccacaggctctttcaaaaccttgccattcaaccaccaagagatggagtctcaatcccctgtccttgaaactgggtagtctttgagactgtctttactaatatagtgaggaagaagtgatgctatgtgaccttggaggtgaggtcaaaaagatgatgcagcttctgcccagctgtcttgggacatgcaccctggtaacacagctgctgtttggtgagggaggccaggcccagggagaggccaatgaggaaaggagcaaagttcctggccttcagcactgggtggacccacagatgaccaccagtaccatgaccttgaaagcagatccccccaccctcagcccaaccaactaggaataccacgtggagcaaggacaagcatttcctgatgagctctgctcaaactgcagattcatgagcaatagaaatgactgccattaatttcagccattgttttggatggtctgttatgcagcagtggataaccagagcaccaggtacacaccgcctccctgctcatttccctggttataagaaccttcatggaggtaggtaacccagctctgtccacctcaacggccttatctcgccaaccctccagtcataaggttttattttcagacacctgatcttgccacactctcccttctgcctggaaagttgatctttctgtctccaattaccactcttttctacctaactcccatttgtcttcaagactcagttcaggaatctcccacctgagagac

SEQ ID NO: 24239 - DNA, 1064 bp, Homo sapiens
ggatccaaggccagccagctctccacagtagagtctggccctgaaaccaggagcccggcactaacaacatcagctggagcttccagagggtgagatcgtggccgactgtggctctatgatttctgaaccaccttttctaactcccagagactaagagactgtggaacacattttcatctcttcactgtgtcattttctcactggaataagtctcctaatgggtccccttgcctctgtctcaaactcccctttctgtcttccacacagttgctgccttgggtggaagtgggggttacatttcctaaaaatggctcattcccacaggctctttcaaaaccttgccattcaaccaccaagagatggagtctcaatcccctgtccttgaaactgggtagtctttgagactgtctttactaatayagtgaggaagaagtgatgctatgtgaccttggaggtgaggtcaaaaagatgatgcagcttctgcccagctgtcttgggacatgcaccctggtaacacagctgctgtttggtgagggaggccaggcccagggagaggccaatgaggaaaggagcaaagttcctggccttcagcactgggtggacccacagatgaccaccagtaccatgaccttgaaagcagatccccccaccctcagcccaaccaactaggaataccacgtggagcaaggacaagcatttcctgatgagctctgctcaaactgcagattcatgagcaatagaaatgactgccattaatttcagccattgttttggatggtctgttatgcagcagtggataaccagagcaccaggtacacaccgcctccctgctcatttccctggttataagaaccttcatggaggtaggtaacccagctctgtccacctcaacggccttatctcgccaaccctccagtcataaggttttattttcagacacctgatcttgccacactctcccttctgcctggaaagttgatctttctgtctccaattaccactcttttctacctaactcccatttgtcttcaagactcagttcaggaatctcccacctgagagac

SEQ ID NO: 24240 - DNA, 1002 bp, Homo sapiens
caagattttattttccttcgacactgcccatgtaaattcaagtatgcaggcagagagagctggggaaggaaggagaatgagagaaatgacattgaaatcctgtagtggaggtgactccactgctcctctgctgcgggcatggaatttgcctccaggtgagtgtgagggaggaaatggaagcccactcttctcttactgggtctcagatgtttgccacaccgggtgggatcttgatgcttagagataagagttttagtaaaacatggtgtcctaaacacagcctttarggcgctaatagcactcatggtcctcaatatccagatgttgagtgagtggagacctcagtgatctgacattggcttctcacagcagaagcactttagatttgtgcctaggtagtattttaaattcctctacctagattaactgtgagtgactgtgtttaccagtgctctctgcagctggcttcattaggggcaagcagagaatgattgattctcccacggctcctttaaactctttccttctttcctgcctgtgcatgaaatcttgagcaagtctcccaatgtttttggccccttcaagcacaaaaccagtcttgtttcaataattgaaaattcccatacaacaggattccaaaatcttgtccagctgaaagtgaccccatcttaggcctgtgctggctggaaacctgcgacagcatggcagctccttccctgctcctcacctgcctccccacctccctctcactgcaatgggctggaaaggggcagaaaggcgcagtgtgtggaggaaatgcctttcctgactggttcttttgtaatgaggatgtggatagatgtgcaattgctggctgttcctcccacaaagcacattggccaatgcttggaatccccctgctgcgacatgtggatcacgtctgtcctctgtgtggctctgtctgactcttcccatggcctgtgagcttctgctggaggcttcctctgtcccagacagtcctcc

SEQ ID NO: 24241 - DNA, 1002 bp, Homo sapiens
caagattttattttccttcgacactgcccatgtaaattcaagtatgcaggcagagagagctggggaaggaaggagaatgagagaaatgacattgaaatcctgtagtggaggtgactccactgctcctctgctgcgggcatggaatttgcctccaggtgagtgtgagggaggaaatggaagcccactcttctcttactgggtctcagatgtttgccacaccgggtgggatcttgatgcttagagataagagttttagtaaaacatggtgtcctaaacacagcctttagggcgctaatagcactcatggtcctcaatatccagatgttgagtgagtggagacctcagtgatctgacattggcttctcacagcagaagcactttagatttgtgcctaggtagtattttaaattcctctacctagattaactgtgagtgactgtgtttaccagtgctctctgcagctggcttcattaggggcaagcagagaatgattgattctcccacggctcctttaaactctttccttctttcctgcctgtgcatgaaatcttgagcaagtctcccaatgtttttggccccttcaagcacaaaaccagtcttgtttcaataattgaaaattcccatacaacaggattccaaaatcttgtccagctgaaagtgaccccatcttaggcctgtgctggctggaaacctgcgacagcatggcagctccttccctgctcctcacctgcctccccacctccctctcactgcaatgggctggaaaggggcagaaaggcgcagtgtgtggaggaaatgcctttcctgactggttcttttgtaatgaggatgtggatagatgtgcaattgctggctgttcctcccacaaagcacattggccaatgcttggaatccccctgctgsgacatgtggatcacgtctgtcctctgtgtggctctgtctgactcttcccatggcctgtgagcttctgctggaggcttcctctgtcccagacagtcctcc

SEQ ID NO: 24242 - DNA, 1649 bp, Homo sapiens
tcatctctggggagggagacttgctgggtaaagaaggagccacaggccaagagacccacctatctgctaaattgcagggaggggagaaaaaagaacctggttacttcctcaggtgataaagctggccccacgccccacttcattgtttagacttcttcccaaaggaaaaaaccccctctgtcccatgagtatgtggcaaaaaaagtggaccttggtttttctccttctgaaagaggaaaaaggaaaaggccacatggccaasctggccagcatctggttctgcccacctccttcccattgcccattgggcttgagttgggctccgggtggtggcagatgtcccccccagtggtggctgctgtcctcatggacctaggcaacctactgatgtcaccaaaggaagtatgtgttttttcttttgagacggagtctcgctctgtcgcccaggctggagtgcagtggtgccatctcagctcactgcaagctccacctcccaggtttatgccattctcctgcctcagcctcctgagtagctgggattacaggtgcccaccaccacgcccggctaatttttttctatttttagtagagacagggtttcaccgtgttagccaggatggtctcaatctcctgaccttgtgatccgaccgcctcagcctcccaaagtgctgggattagaggcgtgagccaccacgcctggccaggaagtgtgtgctttaaaaagcttctgttctctgaagttccatgggaatgacactgaaaagcaaagccaagttcaccaacccttaaaaaaaataacaaagctgcaagaacaagattatgtgttttggaggcctgatcctgctcacacgcagggcagtcagtacaagacagctccagaagacccatttcactggggccagggtcacgtgggtgcaaaagctgcagaagaacaaggaaggattggccacacacaatgacctgctcaaagggaaataaggaagacttgaggcattagccttggcaggactcagcgtgagtggatccagtgcactgaattctgtgcttccagtggtgccctattctctctttggagacagaggtcagcacaatgagcagaaaggacagacagatttacttggtggcaacaaaacaaccattcttcttccctggacttggagacattctgagaagattaggaaatattcctgagaaggaatgccaatgggagtgattggacttcatttgttccttactctagaagactgcactaattgaaagaccgccttgtgccaagtgatgtgcttggtactcaggatacaatagctggagcacccagactccagaacctcccttgtaaagcttactctctgcaatggaggtggccggcaatcatgtctgcccctccagtctgggaattctaaagggagaagctcttgatcctccagcaacacagctttgggcaagacagttaacactctaagaagctggtagaacaactcaaggctttcttattccaacaggtcaaagaggcagaagcacaaagagatgacagtttcaagttgtggaaaagtgctggtaactccaggttgggtgcagaccctgagaccagtaaggggccagaaaagagaaaaggggcagcgtctttgcctctgggtggccacagcttt

SEQ ID NO: 24243 - DNA, 1649 bp, Homo sapiens
tcatctctggggagggagacttgctgggtaaagaaggagccacaggccaagagacccacctatctgctaaattgcagggaggggagaaaaaagaacctggttacttcctcaggtgataaagctggccccacgccccacttcattgtttagacttcttcccaaaggaaaaaaccccctctgtcccatgagtatgtggcaaaaaaagtggaccttggtttttctccttctgaaagaggaaaaaggaaaaggccacatggccaacctggccagcatctggttctgcccacctccttcccattgcccattgggcttgagttgggctccgggtggtggcagatgtcccccccagtggtggctgctgtcctcatggacctaggcaacctactgatgtcaccaaaggaagtatgtgttttttcttttgagacggagtctcgctctgtcgcccaggctggagtgcagtggtgccatctcagctcactgcaagctccacctcccaggtttatgccattctcctgcctcagcctcctgagtagctgggattacaggtgcccaccaccaygcccggctaatttttttctatttttagtagagacagggtttcaccgtgttagccaggatggtctcaatctcctgaccttgtgatccgaccgcctcagcctcccaaagtgctgggattagaggcgtgagccaccacgcctggccaggaagtgtgtgctttaaaaagcttctgttctctgaagttccatgggaatgacactgaaaagcaaagccaagttcaccaacccttaaaaaaaataacaaagctgcaagaacaagattatgtgttttggaggcctgatcctgctcacacgcagggcagtcagtacaagacagctccagaagacccatttcactggggccagggtcacgtgggtgcaaaagctgcagaagaacaaggaaggattggccacacacaatgacctgctcaaagggaaataaggaagacttgaggcattagccttggcaggactcagcgtgagtggatccagtgcactgaattctgtgcttccagtggtgccctattctctctttggagacagaggtcagcacaatgagcagaaaggacagacagatttacttggtggcaacaaaacaaccattcttcttccctggacttggagacattctgagaagattaggaaatattcctgagaaggaatgccaatgggagtgattggacttcatttgttccttactctagaagactgcactaattgaaagaccgccttgtgccaagtgatgtgcttggtactcaggatacaatagctggagcacccagactccagaacctcccttgtaaagcttactctctgcaatggaggtggccggcaatcatgtctgcccctccagtctgggaattctaaagggagaagctcttgatcctccagcaacacagctttgggcaagacagttaacactctaagaagctggtagaacaactcaaggctttcttattccaacaggtcaaagaggcagaagcacaaagagatgacagtttcaagttgtggaaaagtgctggtaactccaggttgggtgcagaccctgagaccagtaaggggccagaaaagagaaaaggggcagcgtctttgcctctgggtggccacagcttt

SEQ ID NO: 24244 - DNA, 1649 bp, Homo sapiens
tcatctctggggagggagacttgctgggtaaagaaggagccacaggccaagagacccacctatctgctaaattgcagggaggggagaaaaaagaacctggttacttcctcaggtgataaagctggccccacgccccacttcattgtttagacttcttcccaaaggaaaaaaccccctctgtcccatgagtatgtggcaaaaaaagtggaccttggtttttctccttctgaaagaggaaaaaggaaaaggccacatggccaacctggccagcatctggttctgcccacctccttcccattgcccattgggcttgagttgggctccgggtggtggcagatgtcccccccagtggtggctgctgtcctcatggacctaggcaacctactgatgtcaccaaaggaagtatgtgttttttcttttgagacggagtctcgctctgtcgcccaggctggagtgcagtggtgccatctcagctcactgcaagctccacctcccaggtttatgccattctcctgcctcagcctcctgagtagctgggattacaggtgcccaccaccacgcccggctaatttttttctatttttagtagagacagggtttcaccgtgttagccaggatggtctcaatctcctgaccttgtgatccgaccgcctcagcctcccaaagtgctgggattagaggcgtgagccaccacgcctggccaggaagtgtgtgctttaaaaagcttctgttctctgaagttccatgggaatgacactgaaaagcaaagccaagttcaccaacccttaaaaaaaataacaaagctgcaagaacaagattatgtgttttggaggcctgatcctgctcacacgcagggcagtcagyacaagacagctccagaagacccatttcactggggccagggtcacgtgggtgcaaaagctgcagaagaacaaggaaggattggccacacacaatgacctgctcaaagggaaataaggaagacttgaggcattagccttggcaggactcagcgtgagtggatccagtgcactgaattctgtgcttccagtggtgccctattctctctttggagacagaggtcagcacaatgagcagaaaggacagacagatttacttggtggcaacaaaacaaccattcttcttccctggacttggagacattctgagaagattaggaaatattcctgagaaggaatgccaatgggagtgattggacttcatttgttccttactctagaagactgcactaattgaaagaccgccttgtgccaagtgatgtgcttggtactcaggatacaatagctggagcacccagactccagaacctcccttgtaaagcttactctctgcaatggaggtggccggcaatcatgtctgcccctccagtctgggaattctaaagggagaagctcttgatcctccagcaacacagctttgggcaagacagttaacactctaagaagctggtagaacaactcaaggctttcttattccaacaggtcaaagaggcagaagcacaaagagatgacagtttcaagttgtggaaaagtgctggtaactccaggttgggtgcagaccctgagaccagtaaggggccagaaaagagaaaaggggcagcgtctttgcctctgggtggccacagcttt

SEQ ID NO: 24245 - DNA, 519 bp, Homo sapiens
gcaattgatagtccaactcagtagtgccaagaacacattcttattcccatcattcaagcagtaaatatgaagattctcatgctcagagctgagggtagataaactggttgggcaatgactaaagaaaaagtgagttattttgtgttaaagagaagaaaacarcctgcttagccaagttccacagtcaaaattctagattactgtaatcagaatatagagttgtagagaggcagattttaaatggcagagcatgagcacctggatcaaactggcctgaagcctttctattctgtaacagtaaattaaatatccaattttgtttatcactttttcagagtcatttcgtttgcagttgaaaaactcccaactactacaataggctctctcagaatgttaagaaactgggtaggaacttggatgatagaatgaagaacaggggcagtgtttgggagacagggcagtataaagagtgaccagcttccacatggcacttggagactggtaagaggaacaacagat

SEQ ID NO: 24246 - DNA, 800 bp, Homo sapiens
ttgaaacccaaaaccactccctgaattcactagaataggcatctttggtgaggacacacttctggtcatggccaaagagtagtcaccatcatcacatacacagccagctagattccacccaaaggaggatggtctcacattcttgtctcaactcctaactgttctgatactgtgtcataaaagacacgtgccttcrctctctgagccttagttctctcccctaaataatgttgaaaataatgtaagcctcttaattttgtcatgaggatgaaatgatacagtttcatcagttattcttggtttatcttgtacttcactgtccacttccttttcatatcattgttttacccttcccttttttctaatcccttaatattgcattgctccaaagttcagtcttttatcttccctgcctttcccttcattaatgatttcatcaagtctaattactttaaataccgcctagatcggcattatccatgagggctttccactgtgatggaaatcttctatatactcactatccaatagcaatagaatatatctactgtattagaaatatttactatcctatacagctaccactggtcacacaggctactgagtcaccttaaatgtgataatgcatgtggccagtggctattgtattagacagtgcacatttatttgatgactcttaatttattactccagattatatatctatataccttcttgatattttcaattagagatatcaaatagacatctcaaattctgcatgcctaaaactgaatcgatctcttcccactccatctgaa

SEQ ID NO: 24247 - DNA, 800 bp, Homo sapiens
ttgaaacccaaaaccactccctgaattcactagaataggcatctttggtgaggacacacttctggtcatggccaaagagtagtcaccatcatcacatacacagccagctagattccacccaaaggaggatggtctcacattcttgtctcaactcctaactgttctgatactgtgtcataaaagacacgtgccttcactctctgagccttagttctctcccctaaataatgttgaaaataatgtaagcctcttaattttgtcatgaggatgaaatgatacagtttcatcagttattcttggtttatcttgtacttcactgtccacttccttttcatatcattgttttacccttcccttttttctaatcccttaatattgcattgctccaaagttcagtcttttatcttcyctgcctttcccttcattaatgatttcatcaagtctaattactttaaataccgcctagatcggcattatccatgagggctttccactgtgatggaaatcttctatatactcactatccaatagcaatagaatatatctactgtattagaaatatttactatcctatacagctaccactggtcacacaggctactgagtcaccttaaatgtgataatgcatgtggccagtggctattgtattagacagtgcacatttatttgatgactcttaatttattactccagattatatatctatataccttcttgatattttcaattagagatatcaaatagacatctcaaattctgcatgcctaaaactgaatcgatctcttcccactccatctgaa

SEQ ID NO: 24248 - DNA, 965 bp, Homo sapiens
agaaaattcaacaagttaatgattcccaaagaggagaatcaaggactattcaaaaatcatatcctaccaacttatgggggaatcctcaaaatgtcttttcagaagcttttcaggatttctatagataagtctctgttatgtgggaccagtgtatgctatgtggctcccattcttcttctagaatatttactgcaattgtctgtcatggtttccttattatatttaggattttrgaagagtccatgggtcttaaaatcaagaagattcacatccagaactaatatcaagatattatacaagtctatcctcattcttttatcctaggttgtaaaattgatgccatgactggaaagacttttggattgcttcccttggtggaggtggaggacatattttgtatatgggaaaaatagagagccaaatgttttcttaccagaagtctagactgtggaagtcattagaactgttggcggatcttttagttctcccccttctgcaaacctgagaggattggaatccttctatctttgatgatagccatggccattaggcttggctttggttaatgaattatgagtagacataatttgtgtgacttccagaaaaaaaagtatttaatagcaattacgtgttttgttatgttcctctctccctggtgactggcaaagtcccagatggtggaagctccgccatcttgagttcctgtgtgactgaggtgagatgagcatgttgcatgagcaataagtaaaacaagcaatgttttagccacttgaattttggaagtgtttttactgtggcacaacataatacagcctgaatgttctaacttcaaactagatagcaacaaataaaagaaatatgtcgaggaattaatccatttcttctagattttctagtttatttgcgtagaggtgttataaatggtgctgggaaaactggctagccatatgtagaaagctgaaact

SEQ ID NO: 24249 - DNA, 965 bp, Homo sapiens
agaaaattcaacaagttaatgattcccaaagaggagaatcaaggactattcaaaaatcatatcctaccaacttatgggggaatcctcaaaatgtcttttcagaagcttttcaggatttctatagataagtctctgttatgtgggaccagtgtatgctatgtggctcccattcttcttctagaatatttactgcaattgtctgtcatggtttccttattatatttaggattttggaagagtccatgggtcttaaaatcaagaagattcacatccagaactaatatcaagatattatacaagtctatcctcattcttttatcctaggttgtaaaattgatgccatgactggaaagacttttggattgcttcccttggtggaggtggaggacatattttgtatatgggaaaaatagagagccaaaygttttcttaccagaagtctagactgtggaagtcattagaactgttggcggatcttttagttctcccccttctgcaaacctgagaggattggaatccttctatctttgatgatagccatggccattaggcttggctttggttaatgaattatgagtagacataatttgtgtgacttccagaaaaaaaagtatttaatagcaattacgtgttttgttatgttcctctctccctggtgactggcaaagtcccagatggtggaagctccgccatcttgagttcctgtgtgactgaggtgagatgagcatgttgcatgagcaataagtaaaacaagcaatgttttagccacttgaattttggaagtgtttttactgtggcacaacataatacagcctgaatgttctaacttcaaactagatagcaacaaataaaagaaatatgtcgaggaattaatccatttcttctagattttctagtttatttgcgtagaggtgttataaatggtgctgggaaaactggctagccatatgtagaaagctgaaact

SEQ ID NO: 24250 - DNA, 965 bp, Homo sapiens
agaaaattcaacaagttaatgattcccaaagaggagaatcaaggactattcaaaaatcatatcctaccaacttatgggggaatcctcaaaatgtcttttcagaagcttttcaggatttctatagataagtctctgttatgtgggaccagtgtatgctatgtggctcccattcttcttctagaatatttactgcaattgtctgtcatggtttccttattatatttaggattttggaagagtccatgggtcttaaaatcaagaagattcacatccagaactaatatcaagatattatacaagtctatcctcattcttttatcctaggttgtaaaattgatgccatgactggaaagacttttggattgcttcccttggtggaggtggaggacatattttgtatatgggaaaaatagagagccaaatgttttcttaccagaagtctagactgtggaagtcattagaactgttggcggatcttttagttctcccccttctgcaaacctgagaggattggaatccttctatctttgatgatagccatggccattaggcttggctttggttaatgaattatgagtagacataatttgtgtgacttccagaaaaaaaagtatttaatagcaattacgtgttttgttatgttcctctctccctggtgactggcaaagtcccagatggtggaagctccgccatcytgagttcctgtgtgactgaggtgagatgagcatgttgcatgagcaataagtaaaacaagcaatgttttagccacttgaattttggaagtgtttttactgtggcacaacataatacagcctgaatgttctaacttcaaactagatagcaacaaataaaagaaatatgtcgaggaattaatccatttcttctagattttctagtttatttgcgtagaggtgttataaatggtgctgggaaaactggctagccatatgtagaaagctgaaact

SEQ ID NO: 24251 - DNA, 546 bp, Homo sapiens
agaagtttcaaaaggttatttaatcttgttattataaaaggaaattaaatcttggaaccctaaactcattaagccaaagggaaaagtcaagctgggaactgggtcaagcaaatctgcctccccctttttgttcctaaacaagatggctacaagatgaaaagctacacgtctcccccrtattttgcccacaaggaaattcttagtgagctgcaagatcttttaagatgtttctgtgaaaatttcaccatggcaatgcaaattgatagcttatctttataggcacagtcaccccagcccaccacacacaaatgcatatctgattgttcccctgcccaattttgtctatgttatcttatgtaaaatgcagatttcctacatctttcctctgccacatttgtctatgtcattttacgtaaaaaaaaaaaaaaatgcagattcactgagccagacaaaggcatgaataaccgtttttcctacccccctcttacatgaaaattgtgtacttcttaatatccttcccttatctccttgaatttggagccctca

SEQ ID NO: 24252 - DNA, 575 bp, Homo sapiens
tgaacccttgctgcatgatagctatttctttagtatggggaacacaagkttacaaatatagtgtggatataaaatccaatgctactgtatatgtttattgtggtattcaatgttctttaccaatgtaaaattcacttacagacttgacacaattttttgaagttactatttttaaaattaataaatattttaaaaattaatcaatttttttctaagagaaattttaggtttacagaaaaattgggcacaaagtacagtttccatatcctctctttccccagcagggcttccctcttattaacatttgttacaagcaatgagccaatattgatacattattattcattgaagttcatagtttgccttagggtttactttttgttttttacagttctatgagattgaacgaatgcataatgccgtttatccaccattattctgtcatacaaaagaattttactgtcctaaaaatcccctgcagtccacaaatgcatccctctctcactgcatattgctggcaactaccgatgtttttattgtctctatagttttgccttttccagaatgacatatag

SEQ ID NO: 24253 - DNA, 575 bp, Homo sapiens
tgaacccttgctgcatgatagctatttctttagtatggggaacacaaggttacaaatatrgtgtggatataaaatccaatgctactgtatatgtttattgtggtattcaatgttctttaccaatgtaaaattcacttacagacttgacacaattttttgaagttactatttttaaaattaataaatattttaaaaattaatcaatttttttctaagagaaattttaggtttacagaaaaattgggcacaaagtacagtttccatatcctctctttccccagcagggcttccctcttattaacatttgttacaagcaatgagccaatattgatacattattattcattgaagttcatagtttgccttagggtttactttttgttttttacagttctatgagattgaacgaatgcataatgccgtttatccaccattattctgtcatacaaaagaattttactgtcctaaaaatcccctgcagtccacaaatgcatccctctctcactgcatattgctggcaactaccgatgtttttattgtctctatagttttgccttttccagaatgacatatag

SEQ ID NO: 24254 - DNA, 1132 bp, Homo sapiens
cctgtcatcattttaggcctccactatttgacactgaatattgagaaaaaacttaaaataaactcaatgctggactagggtttgtcatgatgttacattataccaacagttaaaataatcaaatttttttttattttataaaatggcggaattgacaactttgacattttatgcaaaacacttatacatagaaataaatacatgtaaaagtttaaattttgaagtcaagatcatacagtcttctcactttgatttgagaacatctcatttgctacatttcactacagcccatttacatgatattgtcagcatagaatagaatataaaaaaaaagtataatgtaatactggaagcatttctttcctggtttatatttcatattttaagtataaaggaggaagcagttttaactactttccctcacactcacacatcccaaactgtattttcgactagggttcaagctataactccaagctgatgttgaagcctttggtccattgcaatactttttctatccaatttgcagaaacatttgtgcttcaggcccttggcctgcaaaagctaatttaagatgatgtgacaggaatttcgagcttttgctgagaatataagaagtaatgcaatcgaagcaaaaaatggaaaagaataaatatatactgactttccctatgctgtctccatataatacctagtttttttattttcttatattttgctttagctttagtttattatcaataagtttgatttttattatgtgtatgttgtttaaatatttatttttgccagttgcaatcaactgcaaaaatataaaaatactaaagtggcaatgtgacacaataattagcattggctattgagtaagaaacacaaatgtgaggaagtggtccaagttctactagatctgtgacctagggcaaactggctaaacaatcctacactcaggttctgtawctgtatcatgggaaacatagtaacacctaaataataacatcagtgtctccatttgtgctgtatattttctaattgcttggctcccttttcctcactagaacaactttcagtcttctcagttctgttctatacaatacaccaggagggttgatccccaagtgcttgattatgtagg

SEQ ID NO: 24255 - DNA, 748 bp, Homo sapiens
aaatagaacraaaggcagagaaagactggattctcttgctctcttcttgagctgggacagccgtcttctcctgccctcagacactggtactcctggttctcaggccttcagactcagactgaaacttataatgctggcctcctaccccaacctcacatccaggcctttggactcagcctgaaccaccagctttcctggttctccagcttgcaggtagcagatcatgggactttggcctccataattgtgtgagccaattcctgaaataaatctcctcttcatatatctctatatatcctattggctctgcttctctgagaaccctgactaacgcacatgtgcaggaagcctgtctgcaagtaggaagcacaggcactggcagagtaatgaagagatggtcctgtcctccaaccagaagagagccccctgcacttggcccaatgccttagagggtctgctctagcttctcagggaggagtctgcagggccaaggggatgtgctcccctgaggtctgtgtccctctcccctttgagtccccgaaattctgtgcccaaatggccctgggcctcttccagaggctgcttgtgtgtcttctctaggtccatcctgctgagggcaggcaatgatgcaggtgcgcacaccccaaggatggccatgggccagctgtttgggggcagctatttggggagtccattgtcatgggggcgagaaaagaagttggatgtgcaggttggggtgtccacatcc

SEQ ID NO: 24256 - DNA, 1292 bp, Homo sapiens
aaatttctaaaaattttccaaactccatagagttgaatgtcatgcctgctctactccttggctaggaaaattataaaactggtttcttttttaaaaaattaagtttaaaatgtagttattcttcataattaaatcattcaagcatgccctaaaaatttgcaatacttgaggaagcgaaaggtttgggaaaattacagaaaaacaccattacctgaaaaaggtaacttcttatgtaaaattttaaacctgcttccatcttgttaggctaatatcttcaaatcatccacrcgcgtctggaaaataagacatttacaatattttaaaatgggttaagaatttttacttgtttttcagttgtttttttttttttttttttttgccacccaactcttttgtaaagttgaaagtaacactagaacaagagtaaaaagaaaaacaaaaactgaaataaaactatttctagaaaaacatcgggaaccattatgtttacttcatttccagaactacgcataataaataggttctgcaaataagtaatttcacaaatctttcctggaattcccctggctacgcttggaccttgagaacaattttaccagaaaaatgatcaaataggaatgtgaagtctcggaatactcccatacttttgtacaaatgttttataccaaaccactcacttgctaagcatgatgaagagataggctatctatggttaagaatagtttaaggaataatcaatgaattgggcagtgattacctggcatgatgcagcgccattgagacatcattttaacttttttactgtcaaatgattcaggagtcattatttctctcggctgatagggctgttaaaaagaagcaagtatccgattgtggtggactcatgagtctatgcctctccaccacagcaggattcctggcttccattccagtgtcctttcattggccatgttttggacgcggggttcgccttcccttcattgtccctttactaatggaaggcgaactcacagtgcagctgcttgcaaaaaggaaaatttatttgagttttgcctggctgtggacttgaacactgaatccatggtgacatcagcagaacgacaccaacggaaagatttcctgccctctaccccccttcctttttaaaaatgtacgtcttgtacaaaatctcagtggatctcctttgtcccaaacagatgggacagtttgaccagataatattttttatctgggaaggacaggaggaaggaaggaaggaaggaaggatggaaggaaggagaaaaaaagagaaa

SEQ ID NO: 24257 - DNA, 960 bp, Homo sapiens
tgatatgcaaaacacattatttgtcatgtttttactcacatacattgtgacagtggtggggaacctactcgttgcggtgactattattgtcagcccttccttgagctccccaatgtaattcttccttgcttgcctgtcattaatagatgctgtattatccaccaccatttctcccatattgattgtagacctactctgtgacaaaaagactatttccttcccagcttgcatgggccagctatttacagaccacttgtttggtggaactgagatcttccttctggtggtgatggcctatgatcgctacgtggccatatgtaagccactgcactatttaaccatcatgaatcgacaggtttccatccttctgttggtgggkggccatgactggaggtttccttcattctgtgtttcaaattgctgttctgtacagtctccctttctgtggccccaatgtcattgaccactttttctgtgacatgtacccattattggaactggcgtgcactgacacctactctataggcctcactgtagttttcagtggtggagcaatgtgtatggtcatcttcgcccttctactaatctcctatggagtcagcctaaactcccttaaaacttatagtcaggaagggaggcgtaaagccctgtctacctgcagctcgcacatcaccgtggttgtcctcttttttgttccctgtattttcatgtatgttagacctgtctcaaacttccctattgataaattcgttactgtgttttatacatttatcacacccatgctgaatccttttttatacacgttgagaaattcagagatgataaatgctataaaacacctgttgtgtaagaagctaactatagttagaataagagtgtccctcctcatgtagataaggatgtatgtagacaagctcttcccagtgaaattttcagacttctaagggtaattcaaggatc

SEQ ID NO: 24258 - DNA, 960 bp, Homo sapiens
tgatatgcaaaacacattatttgtcatgtttttactcacatacattgtgacagtggtggggaacctactcgttgcggtgactattattgtcagcccttccttgagctccccaatgtaattcttccttgcttgcctgtcattaatagatgctgtattatccaccaccatttctcccatattgattgtagacctactctgtgacaaaaagactatttccttcccagcttgcatgggccagctatttacagaccacttgtttggtggaactgagatcttccttctggtggtgatggcctatgatcgctacgtggccatatgtaagccactgcactatttaaccatcatgaatcgacaggtttccatccttctgttggtggggggccatgactggaggtttccttcattctgtgtttcaaattgctgttctgtacagtctccctttctgtggccccaatgtcattgaccactttttctgtgacatgtacccattattggaactggcgtgcactgacacctactctataggcctcactgtagttttcagtggtggagcaatgtgtatggtcatcttcgcccttctactaatctcctatggagtcagcctaaactcccttaaaacttatagtcaggaagggaggcgtaaagccctgtctacctgcagctcgcacatcaccgtggttgtcctcttttttgttccctgtattttcatgtatgttagacctgtctcaaacttccctattgataaattcgttactgtgttttatacakttatcacacccatgctgaatccttttttatacacgttgagaaattcagagatgataaatgctataaaacacctgttgtgtaagaagctaactatagttagaataagagtgtccctcctcatgtagataaggatgtatgtagacaagctcttcccagtgaaattttcagacttctaagggtaattcaaggatc

SEQ ID NO: 24259 - DNA, 588 bp, Homo sapiens
cccaccttccagctgtgtgtctgtgagcaagagtcttagttcctctgtgcttccatattctcatttgcaaaatgaagataatactaccaatcctagtgattcactttgagtatttacaacctagcacaatgcttggtgcatggtaaatattgaagtcagtgtttccctccttacctctccctgaaaaaaaaaaaatttttagaaagcaatttctrtggcattacgctcaaggaaaccatagcaaccagtttcctgtagcttggtttccggccttccctagctgtacaatagtgctgggacacagcctttgttattccgataccccagggaagatgtggacgtcatgcactctatggggtggaggcatctgctgggtagaattgcccagtgtgctggtggtgtcattgctgttggcactttggctctcagagaaccaggctgtcccaggcctgggttaggccacgaggatgctgtggtttcccactggcgactcaattcatcttctaagggttgccttattgtgggtcaggccagagcagctggccctctctttttacggggataaaagtagcatttggttgggtctgg

SEQ ID NO: 24260 - DNA, 551 bp, Homo sapiens
cttgctcatcaagcctacatctgattttgaagtggctattacacacatatatataaaatttatactagcactatccttgtataaagttataaattttattggctagttttatctaacaaactacaaattgttatgatatttatatgctmaccaatagcaggcatcattgatgctgggacatctctgagtcagctgaagtttcagatccagttattggaccatcaacatgttgtggactctggatacagctcctgaaagatgtgttttgaagacatcaaaaagattaaaactctaggttattagtcttatccatttctctggtaatgctaacctgacttttcctgttggccaattcccaactttattccagaataaatcaaggtgaagatttggaagagttgtagagtgtaaacagttgcttattgccatcaattatgaagtctaacagtttgaaatttattcaaataagactttctgggaagttcttggaagaaacaatgatgttctttacatctattgttttcctcggctaaaacttcgtgatatagaaa

SEQ ID NO: 24261 - DNA, 551 bp, Homo sapiens
cttgctcatcaagcctacatctgattttgaagtggctattacacacatatatataaaatttatactagcactatccttgtataaagttataaattttattggctagttttatctaacaaactacaaattgttatgatatttatatgctaaccaatagcaggcatcattgatgctgggacatctctgagtcagctgaagtttcagatccagttattggaccatcaacatgttgtggactctggatacagctcctgaaagatgtgttttgaagacatcaaaaagattaaaactctaggttattagtcttatccatttctctggtaatgctaacctgacttttcctgttggccaattcccaactttattccagaataaatcraggtgaagatttggaagagttgtagagtgtaaacagttgcttattgccatcaattatgaagtctaacagtttgaaatttattcaaataagactttctgggaagttcttggaagaaacaatgatgttctttacatctattgttttcctcggctaaaacttcgtgatatagaaa

SEQ ID NO: 24262 - DNA, 1206 bp, Homo sapiens
aagtggcatatctggaaataaggtaagtaatcaaagaggcaggggagatgtttatatttccaccttgctgttactgcattttcaccatcttcctaaccttcatgctagtctcaattcatgacacttaatcacatcctgttgacagatggtttgcttttgttgttgctgttattatttataatgatcattcaaaactattagaaaggaattcattgtatcagttataaacaggcactcattcattcaatagtttattagtcttaccatgtatcaggcaaaatgctgggcaaatgaacacttcactgaggaaaacagaacctttcttgactgcattcgttcattagttacatcaatgatgtttttgtttcatttttggataaaacattttgatttttaagagctatgggagaaaaaggaaaagggaatcattcattccatgcatccatctgcagagacaataaagagcattattctaaactttcttctgccagttaacaggtaatgtaaaccttggataaattataaaatcacttagtttcacttttatcactgtaaaactggcataaaaataggagtaatttcaggcccctggaattgtagtgacacacacacacacacacacacwcacacacacacggaaaaaacaaaccaaaataatagtagtgacatctaggtttttctgtaaggattgaatgagccaatgcatgtatagtgcctagacgtgtgtctggcatacagtaagtacgaatattttagctaatattattcacctattaaaatattctttatatatctgttatatatcttcatattctaggtaaaaaggctaatagtaattatcctaacctactaattaattacatgagttaattagctaattagacagtttgcctagttcttcatacattaatttacttcatccataatagagtgggacgcattgttattttcatttagaagtgaactgagacatgggaaaattaatcagggagcaaatattcgaaccagggttttgtgatttttagatccagattaagataatgatatgcccccactgaatcttagtcaaaggttagtaagataaaatcctagaagagtcagtcttctgcagggtaaaaaagaaaagtaaataattgtgcagtatgataactatagtaagagtatattcacaaggtgttttgggagcacagaacacatagggattac

SEQ ID NO: 24263 - DNA, 1169 bp, Homo sapiens
ttaaaaaggttgtgtttagggttttggctgtacttggaagatggaagaagggaggcttcacttgagcggcagtgtggtagacaaagcatctaacctaggcttgtggcttttgaaaaaacagtttgttggggtacatgtagctctttgctctagatgtttattccaatgggcttggcatttggttatcttttaaggaagtcataagcagaggtaacatttgtaatgtgaaattacttgaaattctataaaaagcaatccatagcaattggcgttgcttttagttcatgaaagcttaaaaatctctcgccctgtgtattgtggcagccagtcaaaagtgagagcagaacataaacctcgttcagaaaccaggcccgcatttttgctccatttgcaaatcctttacaatcccagaaaacagttgccctctttctgttgcccaccctaaatgcaggtgatatttacctattatatcagtttaatgagcaggccatctcacactcattaagtcgatttgaaaaatgatcagaagaatcaggactgtgtcctccgagaatataaatgcctctaaggctatatccattttaggaaaaccaggtcttttacctttgctctggcctcacctcagcgttttcttctacagcagaaataatgcatttagtcatttcagaacactggtttaatgcattaataactgcaggtgcttttcctagaattttggctccgcaagtgtttcacggtgagtgggtcaaaggcagcaagcaagggtcatataaagtgagtwttttatgaagccaggatacattgcagtgtgtaagcagaagcacccaatataattaaagtaaatgaggaatatgagccatgtagactgtcaaaggcgtatgtggtgatgtggtggtgcggtgggctgggagaaaaggagggtagagtggaaaggctttaaaactataggaaatcagagaaaatgctggccttctgttccttagcttctggaattagggagttgttatataatccaagccagcagctagaggggatttggctaatagttaacttaatttttctggaatgtcttttttttttctgtaaatcagcctaagtggaaagaaagtgggactctcgtcaatgaatcaaatggcaggaggggccagctgggaggaccgattccccct

SEQ ID NO: 24264 - DNA, 1176 bp, Homo sapiens
ttatggggatggaaatagctgtgccttgatgaatctatgtcaatatcttgattgtgatgttgtactacagttttgcaagatgtgattattgggggaaactggtgaagggtacatgaaaatctctgtattactactaatatctgcatttgaatctacaattatctcaaaataaaaaagtttaattttaaaaaagcaataataatagattattatctctccctgttttctgtgagcatggcagctacaggttgtctttgctcctgtgtgtctggggtcttaagtgaaaaatgctaaggcaggggtgggaccaactggaggcctcttcccracctatctatcagtaagttggtgctggctgctggctgctggctgggacccgaacttgactgtcaaccaggacacccacacatggcttctctgtgttgcctgggcttcctcacagcatggtggctggcttcaagttcaagtgtcccagttaaaaaaaccaagccaatgggaagcagtgtcatcatttttgactgagcctcaggagtcacccggcaaatccgcagtcacaaagtctcccccagacacagggggagggaattcttacttcttcacgggattaggcaaggttctagaaggataaatattgtcatggccacttttgtaaagagtcagcttcctcaaagaaggtcttccaaagtgtagaaagtccaggcctcaacactcagatcctccttgaaatgcactctgagagactaatgagctgtgatttgaacctgggtcccttggcctaggagccccaaaaagctggggcagtgtctggaggcagtccccttcctccgcttcccttccttttctgcatggctggatgattcgttgggcccaacatgacccagtggagccaccgttaccagcacgtggtcaggaggaggctcaggtgagggccggtacagactaagctggagccccagatgctgccattgcagacacctccagactgtggccctggaaccaaggggcctcagcacagggaactcagaggaagggcgtcgggcaggtatgaggccccatcccaggccatttgggagtggggtagaccaggacttcttcagatcagaggacttccctcttccatctgctttccctcaggaaaaatggcctagggaagatttttcagcggttgacagatgg

SEQ ID NO: 24265 - DNA, 598 bp, Homo sapiens
aaaaatgctaaagttggtatataatctattgaggaatataatagaacaaggcttgacaaaccttttctgaaaggaccagataataaatatttcaagctttataggccacatgtagtctgtatcacatattcctctctctgttttttcttttagtaaccctttaaaaatataaagagttacatttttcactggtgggccataacaaaacaggctgtgggccatatttgtccgaatgtcttctcagtgatctttcatccrtatgtccttttactctaggatgctgtgaaatcctggttaccccttcttgtatcacattgaaaacctaaagtttgaactattctatagaaattttattaaagcttttggtattagaatttccctttcttccctaattataaaaaatagcaaattttggccgggcatggtggctcacgcctgtagtcccagcactttgggaggccgaggtgggtggatcacctgaggtcaggagttcgagaccagcctggtcaacatggtgaaaccctgtctctactaaaaatacaacaattagctgggcgtggtggcaggtgcctgtaatcccagctacttgggaggctga

SEQ ID NO: 24266 - DNA, 920 bp, Homo sapiens
attcccagtgtgcacactcacctggctggcaggctcatgctggctatcagctggtagtgcagatggggccaagtgtcagggcctcagttcctctccacatgggcctcttcatgtgggcttctccatgtagcccaggcttcctcacagcaatgtggctgatttcccagggggaatatcagaagaaagaaaatgttagtccattctgaattatgctattgctttgaattcaattctaatattattgagctagtacctactataatcatagaaaaaatcaaatatagttgtattattagtttctctctttctggtatgttcttggcacatacagcttaatcttaaatcatggtcaagtatacttggaacagcggtaagaacagccaggttcttataacctcagatacaggccttctggttagtaatgcactcctctggcctggcctttccatgtacttctgctgcaccatggagctcccaaccctggcatggtactttcatgctgcaccattcacctgaacacatttcctcctgcccaagtctacttctgctcaactatggttttatactttcctgaccccaccctggcaactaatcatgaatctaggttacttcctttgcttcatcaggcttactggtattaatctcacatggtttctagaatcatgaaagtttagtggaagagacccaggctctttctctagtaatgacatttcctgagcccagtggaacgttttcctgtgtactgggcatctctgctacatttactgccctcccttgataccaagtatgtcttctccttaccctcttgctataaagcccacccctgaatttccaggagatgagaagtgccaaggttcatgggctgtgaattgttttcccaggtccagctccaaacttaatgttcaaagaggctaaamcgt

SEQ ID NO: 24267 - DNA, 549 bp, Homo sapiens
attggctggagctgagtagccttaaagaaagaacatcctcygtagaacggcatccccctcactcccaattttctcatgcctggcccaagtctctcatttacgtgaccggtgggctctatgggcactgaagcctgtgacaagtgaaggggagctcgcgaactcctagcaggctctttggaaaacccacttagcccttagcacctccctgtggcctcttgcattctcctccttccaggtttctattgtcagcaaaattttgaataaagatttcagtaaaattttgaaaagaagtaaaggggctcagaaatttggcaaaactaagtttatacttgaaaactacaaaataaataggtggaaaaaaacgttttgccacagtttgcctcaaagggttcccacacccctgcattaactagaatactttagaagcaaaggcgaatgactattcctacccccttcctctctcacccacacccgcaaagtcctagaactacagtccctttaaggacatcagtatgaatatttttgttgtcttccttctctagtattttc

SEQ ID NO: 24268 - DNA, 551 bp, Homo sapiens
agagcagatgtctcaatgaatgacaaatcatttttttctgccaaagctcttgccttcaactctaggaacttccctgagatgatgtaaatcactcttatttgtccatgataacatgacaacaacattactatcagtgtgatcgctcagttctttcagcaatcattctgtattttcatatgtgagatgtttagcaatgtcttaaaccaataaggcacctatatcttcatgataataagcttatgttatagcttcgtattactcttgccctgctctgtcccacatctgtgcctttattgttttcctatcaatmtggatgcttcttgttgcaaactactccagtggtgctcttgctttccagattaaactcattttgagtaaatcaagacaggagattattctttccaacaccagaatctccaataaggataacattaaagaggtagtcattctcattgttgcaggtgcccattgcacaactgaggagtgaaggggtgggagcggtagtagcatctgtgagactagggaggcattgctgctcctaattttctaca

SEQ ID NO: 24269 - DNA, 525 bp, Homo sapiens
tgactattgtaaattcttttttaaaatgtattttaaccaccagtggggtggctcatacctgtaatcccagcacttygggaggccgaggcaggcagatcacttgaggccaggagttcgagaccagcctggccaacatggtgaaaccccatctttactaaaaataaaaaattttaaaaatgagccagtcatggtggtgcatacctgtaatttcagctactccagaggctgaggcaggagaattgcttgaactcaggaggcagaggttgcagtgagccaagatcgcaccactgcactccagcctgggcaacagagtaaaactctgtctcaaattaaaaaaaaaagtatttttactattttttaaactgtcgctggaatagaaatagaatttatttttatgttgtcatttgtatttctataaagttaatcatgttacttgcaaataattatagttttattttttcttttccaatccttatagctcacctaattttgctgtgttgttctggctatgatcactagtacaat

SEQ ID NO: 24270 - DNA, 525 bp, Homo sapiens
tgactattgtaaattcttttttaaaatgtattttaaccaccagtggggtggctcatacctgtaatcccagcacttcgggaggccgaggcaggcagatcacttgaggccaggagttcgagaccagcctggccaacatggtgaaaccccatctttactaaaaataaaaaattttaaaaatgagccagtcatggtggtgcatacctgtaatttcagctactccagaggctgaggcaggagaattgcttgaactcaggaggcagaggttgcagtgagccaagatcgcaccactgcactccagcctgggcaacagagtaaaactctgtctcaaatwaaaaaaaaaagtatttttactattttttaaactgtcgctggaatagaaatagaatttatttttatgttgtcatttgtatttctataaagttaatcatgttacttgcaaataattatagttttattttttcttttccaatccttatagctcacctaattttgctgtgttgttctggctatgatcactagtacaat

SEQ ID NO: 24271 - DNA, 1018 bp, Homo sapiens
ctttggcagtcagtatagcctatggaatctcatctctgaatcatgttttcctrtgcataaaataaaatacatagtattacaaagaaaaccaattatatttaaataatgtcagctgagtgcagtggctcatgcctctaatctcagcactttgggaggctaaggcgggcacactgcttgagcccaggagttcaagaccagcctaggtaataaaatgagaccctgtttctaaaaaaaaaacaaaaaaacaaaagaaaacatagctgggtgtggttgtgcgcacctgtagtcctagctacatagacatatgtcagtgtcatagatactgctaatgttactgaggttgttgcctacattcatagttaaaggaaatgccaaacttcatgttgaagttattgaaaataaagaggtgatttttttttctactcaagtctacaacccccctaaattcaatttgcagactccctgggagtccacggactccaggttaaaacttttgcaatctggaataggctcagctgatcctctatatcacaataaagtaataaaaattttcagggtcttttttggggaaggtgggctgatggtgaggcatgttgaaggtcttagaattctaagagagagagaaagagaaagaagggggagagagagagagagagagagagagagagagagaagcagggctacaataaagagataagttaagaccagggatctatagatgatattggccaaatcatcagggaaagtctgttacacacagctcctttttgtcagtatgttgtagcaggggaagaagggggcaactgtacctgtctggggaggggcaacaaagagaagtgcagccacccatgtgaggccacagtggctaccccagaactacatccagagagcagttagcagccagttgaccatgaataaacagctggcagagtgggctgagtcatggtggccaagagaccaaccttcttcaacccaaatatgttagaggcaagtgtctgttgcctgaaagggagaagct

SEQ ID NO: 24272 - DNA, 1018 bp, Homo sapiens
ctttggcagtcagtatagcctatggaatctcatctctgaatcatgttttcctatgcataaaataaaatacatagtattacaaagaaaaccaattatatttaaataatgtcagctgagtgcagtggctcatgcctctaatctcagcactttgggaggctaaggcgggcacactgcttgagcccaggagttcaagaccagcctaggtaataaaatgagaccctgtttctaaaaaaaaaacaaaaaaacaaaagaaaacatagctgggtgtggttgtgcgcacctgtagtcctagctacatagacatatgtcagtgtcatagatactgctaatgttactgaggttgttgcctacattcatagttaaaggaaatgccaaacttcatgttgaagttattgaaaataaagaggtgatttttttttctactcaagtctacaacccccctaaattcaatttgcagactccctgggagtccacggactccaggtkaaaacttttgcaatctggaataggctcagctgatcctctatatcacaataaagtaataaaaattttcagggtcttttttggggaaggtgggctgatggtgaggcatgttgaaggtcttagaattctaagagagagagaaagagaaagaagggggagagagagagagagagagagagagagagagagaagcagggctacaataaagagataagttaagaccagggatctatagatgatattggccaaatcatcagggaaagtctgttacacacagctcctttttgtcagtatgttgtagcaggggaagaagggggcaactgtacctgtctggggaggggcaacaaagagaagtgcagccacccatgtgaggccacagtggctaccccagaactacatccagagagcagttagcagccagttgaccatgaataaacagctggcagagtgggctgagtcatggtggccaagagaccaaccttcttcaacccaaatatgttagaggcaagtgtctgttgcctgaaagggagaagct

SEQ ID NO: 24273 - DNA, 709 bp, Homo sapiens
cagaaaggtatgagtgtgtcttttgatgtgaggctttgtacttctgtaaaatcttacttctgagaagttcaaagtgctttccatggactttctcagcatccctttcaacccctttatggggtagatagcaagtattattctcatctcatagatgataggaaagttgaaatgcygagaggttaagtgtgatgtgctcagtgcttatcttttaggatgggacccaaggctctaggcttccagagggtccttgctgttggtccccattacctctctgccctctcattacaaggttagcatgtaatacttacgacaaaaaaaaaaaaaaaaaagaggatttgccaaagggaaagatggatatttctaatttagtaccatcaacctcctggactgagttttctatcagggtcatgatgacatcattattgattgacagcatggggaaatttttcaccttctttttttattatttttagttggacatcacacaggggtgttaacattgtcagcgttacatcaggtcttcgtgtgctgccctgcttaggtgatggtgtggaatggttcactttctcatcacatttcattttatttcattgtcacgataatgggtatgtatcataaatctacctcaagcaggtagtctacttaaaacataccttggccgggcgagggaaggggctcacacctgtaatcccagtactttgggaggccg

SEQ ID NO: 24274 - DNA, 709 bp, Homo sapiens
cagaaaggtatgagtgtgtcttttgatgtgaggctttgtacttctgtaaaatcttacttctgagaagttcaaagtgctttccatggactttctcagcatccctttcaacccctttatggggtagatagcaagtattattctcatctcatagatgataggaaagttgaaatgctgagaggttaagtgtgatgtgctcagtgcttatcttttaggatgggacccaaggctctaggcttccagagggtccttgctgttggtccccattacctctctgccctctcattacaaggttagcatgtaatacttacgacaaaaaaaaaaaaaaaaaagaggatttgccaaagggaaagatggatatttctaatttagtaccatcarcctcctggactgagttttctatcagggtcatgatgacatcattattgattgacagcatggggaaatttttcaccttctttttttattatttttagttggacatcacacaggggtgttaacattgtcagcgttacatcaggtcttcgtgtgctgccctgcttaggtgatggtgtggaatggttcactttctcatcacatttcattttatttcattgtcacgataatgggtatgtatcataaatctacctcaagcaggtagtctacttaaaacataccttggccgggcgagggaaggggctcacacctgtaatcccagtactttgggaggccg

SEQ ID NO: 24275 - DNA, 534 bp, Homo sapiens
tgaaattatttaaagcccttcctcactaagcatgactttttattgcaaagcactgttgaatattacactctgtattatgtcatcagaggtaatttaccactccctacaatctatcagtttaagcaatttggcaaagatcctttcaaagaaatagtcctgaatattcacaagatggcagtagtgtaacactaatgttaataatgcctgtcattcaaaaacaaaacaaatatcttgagctcctaatcttgaaaatatcttcaaatactaaacatgagacgtaagtgtaactatagagcatatcgtaaaagtagatgaatttgatataaatttaatacattatgcctacgggaggcagcttaagtgcaatcattttttcttgtgtcaatttcttttctactgactttcttttcatgggagagtgatgcaaaagagtactttggatctttagcctctaatgcaagcrtggtaaaagagagttaaatcctgaatacattttcacaaatttatttttataatttccaacagcagagtaaa

SEQ ID NO: 24276 - DNA, 1159 bp, Homo sapiens
cgcatgggggctgcaggtggagctgcctgccagtcccgcgccctgcgctcgcactcctcagcccttgggttgtcaatgggactgggccccatggagcagggggtagtgctcctccgggaggctccggccgcacaggagcccttggagttggtgggaggctcaggcatggtggactgcaggtcccgagccctgccccgcaggaaggcagctaaggcccggcaagaaatcgagcacagcgctggtgggtccgcactgctgggcgacccagtacaccctctgcagccactggcccgggtgctaagtccctcattgcctggggccagcagggctggctggctgctccgagtgcggggcccgccaagcccacgcccaccgggaactccagctggcccgcaagcaccgcacgcagccccggttcccgctcgcgcctttccctccacacctccctgcaagctgagggagtgggctccagccttggccagcccagaaaggggctcccacagtgcagtggggggctgaagcgctcctcaaatgccaccaaagtgggagcctaggcaggggaggtgccgagagcaagcgagggctctgaggactgccagcaygctgtcacctctcaatattgctcttattagtatgtctctattaatgttatacaattatgataaaaattaaactaaaatggaattaggaaatgaaatataaactaattacttatctttgacaagttagaatataattttaaatgatgatgagaatactattttgttcataaactaatatttactgaatatcaggtattgcattccaggcactgttaaagtcctggataatgcagcataaaataaaagaaagtgtttgggccaggcaccatggctcatacctgtaatcccaggactttgggaggccgaggaggccagagcacctgaggtaaagagttcgagatcagcctgatcggcatggagaaactccgtctctactaaaaatacaaacttagccgggcgtggtggcgtgcgactgtaatcccagctactcaggaggctgaggcaagagaattgcttgaacccaggaggcggaggttgcagtgagctgagatcgtgccactgcactccagcctgggcgacaaagtgagactctgtctcaaaaaaaaaaaagaaaatgt

SEQ ID NO: 24277 - DNA, 1159 bp, Homo sapiens
cgcatgggggctgcaggtggagctgcctgccagtcccgcgccctgcgctcgcactcctcagcccttgggttgtcaatgggactgggccccatggagcagggggtagtgctcctccgggaggctccggccgcacaggagcccttggagttggtgggaggctcaggcatggtggactgcaggtcccgagccctgccccgcaggaaggcagctaaggcccggcaagaaatcgagcacagcgctggtgggtccgcactgctgggcgacccagtacaccctctgcagccactggcccgggtgctaagtccctcattgcctggggccagcagggctggctggctgctccgagtgcggggcccgccaagcccacgcccaccgggaactccagctggcccgcaagcaccgcacgcagccccggttcccgctcgcgcctttccctccacacctccctgcaagctgagggagtgggctccagccttggccagcccagaaaggggctcccacagtgcagtggggggctgaagcgctcctcaaatgccaccaaagtgggagcctaggcaggggaggtgccgagagcaagcgagggctctgaggactgccagcacgctgtcacctctcaatattgctcttattagtatgtctctattaatgttatacaattatgataaaaattaaactaaaatgsaattaggaaatgaaatataaactaattacttatctttgacaagttagaatataattttaaatgatgatgagaatactattttgttcataaactaatatttactgaatatcaggtattgcattccaggcactgttaaagtcctggataatgcagcataaaataaaagaaagtgtttgggccaggcaccatggctcatacctgtaatcccaggactttgggaggccgaggaggccagagcacctgaggtaaagagttcgagatcagcctgatcggcatggagaaactccgtctctactaaaaatacaaacttagccgggcgtggtggcgtgcgactgtaatcccagctactcaggaggctgaggcaagagaattgcttgaacccaggaggcggaggttgcagtgagctgagatcgtgccactgcactccagcctgggcgacaaagtgagactctgtctcaaaaaaaaaaaagaaaatgt

SEQ ID NO: 24278 - DNA, 1159 bp, Homo sapiens
cgcatgggggctgcaggtggagctgcctgccagtcccgcgccctgcgctcgcactcctcagcccttgggttgtcaatgggactgggccccatggagcagggggtagtgctcctccgggaggctccggccgcacaggagcccttggagttggtgggaggctcaggcatggtggactgcaggtcccgagccctgccccgcaggaaggcagctaaggcccggcaagaaatcgagcacagcgctggtgggtccgcactgctgggcgacccagtacaccctctgcagccactggcccgggtgctaagtccctcattgcctggggccagcagggctggctggctgctccgagtgcggggcccgccaagcccacgcccaccgggaactccagctggcccgcaagcaccgcacgcagccccggttcccgctcgcgcctttccctccacacctccctgcaagctgagggagtgggctccagccttggccagcccagaaaggggctcccacagtgcagtggggggctgaagcgctcctcaaatgccaccaaagtgggagcctaggcaggggaggtgccgagagcaagcgagggctctgaggactgccagcacgctgtcacctctcaatattgctcttattagtatgtctctattaatgttatacaattatgataaaaattaaactaaaatggaattaggaaatgaaatataaactaattacttatctttgacaagttagaatataattttaaatgatgatgagaatactattttgttcataaactaatatttactgaatatcaggtattgcattccaggcactgttaaagtcctggataatgcagcataaaataaaagaaagtgtttgggccaggcaccatggctcatacctgtaatcccaggactttgggaggccgaggaggccagagcacctgaggtaaagagttcgagatcagcctgaycggcatggagaaactccgtctctactaaaaatacaaacttagccgggcgtggtggcgtgcgactgtaatcccagctactcaggaggctgaggcaagagaattgcttgaacccaggaggcggaggttgcagtgagctgagatcgtgccactgcactccagcctgggcgacaaagtgagactctgtctcaaaaaaaaaaaagaaaatgt

SEQ ID NO: 24279 - DNA, 1159 bp, Homo sapiens
cgcatgggggctgcaggtggagctgcctgccagtcccgcgccctgcgctcgcactcctcagcccttgggttgtcaatgggactgggccccatggagcagggggtagtgctcctccgggaggctccggccgcacaggagcccttggagttggtgggaggctcaggcatggtggactgcaggtcccgagccctgccccgcaggaaggcagctaaggcccggcaagaaatcgagcacagcgctggtgggtccgcactgctgggcgacccagtacaccctctgcagccactggcccgggtgctaagtccctcattgcctggggccagcagggctggctggctgctccgagtgcggggcccgccaagcccacgcccaccgggaactccagctggcccgcaagcaccgcacgcagccccggttcccgctcgcgcctttccctccacacctccctgcaagctgagggagtgggctccagccttggccagcccagaaaggggctcccacagtgcagtggggggctgaagcgctcctcaaatgccaccaaagtgggagcctaggcaggggaggtgccgagagcaagcgagggctctgaggactgccagcacgctgtcacctctcaatattgctcttattagtatgtctctattaatgttatacaattatgataaaaattaaactaaaatggaattaggaaatgaaatataaactaattacttatctttgacaagttagaatataattttaaatgatgatgagaatactattttgttcataaactaatatttactgaatatcaggtattgcattccaggcactgttaaagtcctggataatgcagcataaaataaaagaaagtgtttgggccaggcaccatggctcatacctgtaatcccaggactttgggaggccgaggaggccagagcacctgaggtaaagagttcgagatcagcctgatcgrcatggagaaactccgtctctactaaaaatacaaacttagccgggcgtggtggcgtgcgactgtaatcccagctactcaggaggctgaggcaagagaattgcttgaacccaggaggcggaggttgcagtgagctgagatcgtgccactgcactccagcctgggcgacaaagtgagactctgtctcaaaaaaaaaaaagaaaatgt

SEQ ID NO: 24280 - DNA, 1159 bp, Homo sapiens
cgcatgggggctgcaggtggagctgcctgccagtcccgcgccctgcgctcgcactcctcagcccttgggttgtcaatgggactgggccccatggagcagggggtagtgctcctccgggaggctccggccgcacaggagcccttggagttggtgggaggctcaggcatggtggactgcaggtcccgagccctgccccgcaggaaggcagctaaggcccggcaagaaatcgagcacagcgctggtgggtccgcactgctgggcgacccagtacaccctctgcagccactggcccgggtgctaagtccctcattgcctggggccagcagggctggctggctgctccgagtgcggggcccgccaagcccacgcccaccgggaactccagctggcccgcaagcaccgcacgcagccccggttcccgctcgcgcctttccctccacacctccctgcaagctgagggagtgggctccagccttggccagcccagaaaggggctcccacagtgcagtggggggctgaagcgctcctcaaatgccaccaaagtgggagcctaggcaggggaggtgccgagagcaagcgagggctctgaggactgccagcacgctgtcacctctcaatattgctcttattagtatgtctctattaatgttatacaattatgataaaaattaaactaaaatggaattaggaaatgaaatataaactaattacttatctttgacaagttagaatataattttaaatgatgatgagaatactattttgttcataaactaatatttactgaatatcaggtattgcattccaggcactgttaaagtcctggataatgcagcataaaataaaagaaagtgtttgggccaggcaccatggctcatacctgtaatcccaggactttgggaggccgaggaggccagagcacctgaggtaaagagttcgagatcagcctgatcggcatggagaaacyccgtctctactaaaaatacaaacttagccgggcgtggtggcgtgcgactgtaatcccagctactcaggaggctgaggcaagagaattgcttgaacccaggaggcggaggttgcagtgagctgagatcgtgccactgcactccagcctgggcgacaaagtgagactctgtctcaaaaaaaaaaaagaaaatgt

SEQ ID NO: 24281 - DNA, 554 bp, Homo sapiens
tttttattctgtattcaatatagtcactaaattcagtagcagggggtaaaatttacagctgtactttcttataagcactgtcctaggtaccaccaaagaaccattgctgacagtcagatggaatcaatattcacagaaaggttttttggggtagctcagggcttcagacacagatgtccaaatcagggactagggaatggcatttttggttattgctgttatgctrttgagcaatagtcatgttctcattccagcttttgatgatgtttctctctgggccttctgtaaagagccagttggtgctaataactcagaaaaggtataaacatttctgagaactgcattttggctctgaagtaggctttgcactgtctcatctgtaatcagtgtttgtggcccagatggaactatgacaaccagttatagctaaaagatgaccaagaaaggcagccataagtatagagtagtgcttttcaaactgtaatgtgcacagaaaccaggttgggagttcttgttgacacacagattctgtcttagtgagttggggttgagcc

SEQ ID NO: 24282 - DNA, 554 bp, Homo sapiens
tttttattctgtattcaatatagtcactaaattcagtagcagggggtaaaatttacagctgtactttcttataagcactgtcctaggtaccaccaaagaaccattgctgacagtcagatggaatcaatattcacagaaaggttttttggggtagctcagggcttcagacacagatgtccaaatcagggactagggaatggcatttttggttattgctgttatgctgttgagcaatagtcatgttctcattccagcttttgatgatgtttctctctgggccttctgtaaagagccagttggtgctaataactcagaaaaggtataaacatttctgagaactgcattttggctctgaagtaggctttgcactgtctcatctgtaatcagtgtttgtggcccagatggaactatgacaaccagttatagctaaaagatgaccaagaaaggcagccataagtatagagtagtgcttttcaaactgtaatgtgcacagaaaccaggttgggagttcttgttgacacacagattctgtcttagtragttggggttgagcc

SEQ ID NO: 24283 - DNA, 561 bp, Homo sapiens
tttacaaatgagacaacccaaatcacatgacaatgataacagagctgctgtagaatcaagaggtatgacccccattcaccagcttttcctgatatattctgtattttctttccttttatctaacgcaccaaaggtgttattcatttgtttctccaatcaatacatatttgttaagaactcacgaagtactgggcactacattatgattatctagagtatataaaaattataaaatgtttcactactgaaaaattgttgcttatttgccagcttatattctagtgctcactgctttaagaaatcctatgcttctgttggtcaattcctcaaggagacagaaaagtggaaaaccccagtagaggttttcttattcctccaggttttcccctttctctctgcattaggagcaggacctyttccttattctgaaaaccccacagctaaatgccatttcctttactggctgatcacctgactgcatccttactctaggaagctccagagacagacgtgtgctctgccttcacataggaagctgcacatcaatccactgccactgga

SEQ ID NO: 24284 - DNA, 604 bp, Homo sapiens
cacactactgggtatcttcacaaagaaaaatcattatatgaaaaagacactggcacacatgtatttatgccagcacaattcacaatagccaagatatggaaccaatctaagtgcccattgactaatgagtggataaagcaaatgtagtatacatgcacaatggaatactaagccatgaaaaggaatgaaataatgccttttacagcaacttggatgcagctggaggtcattattctaagtgaaataacacaggaatggaaaactaaaaactgtatactcacacttaaaagaagagctaagttgtgagtacccaaacacatgcagagtgatataatgggctttagagattcacaggggaatggtggaaggaggtctagggataaaatctacacattatgtacaatgtacactactcaggttatggatataataaaatctcagaatttgccactatataattcatccaygtaacaacaacaacaacaaaaacacttttaccccaaaatctattgaaatttaaataaatacaggaacacaaaatcttttcttatactccatatatggacataaatttgagatgaaacaaggatcacttttggggacc

SEQ ID NO: 24285 - DNA, 1027 bp, Homo sapiens
cccagaaacttcattgagatagcaggtccctgaatttcctggcatttatcttctttctagtctatatgagtcttaacaaacactctaaaatacgtgctagtttttgctcattaggtccaatcaccttaatgccagcagcattacagacaatagtaacattctgtggaatgctagtgtgatgttctgtgtaatgtctgtcttgatggtaggtatctttgtagtctgtattagttcatttccatgctgctgataaagacatacacaagactgggcaatttacaaaagaaaaagttttaatggacttaaagtttcatatggctggggaggcctcacaaacatggcaggatgcaagaaggagcaagtcatgtcttacatggatggcagcaggcaaagagagagcttgtgcagggaaactcccattgtaataccatcagatctcatgagacttatttgctatcatgagaatagcatgggaaagacctgcctccatgattcaattacctcccaccaggtccctcccacaacatgtgagaattcaagatgagatttaggtggggacacagccaaatcatttaattctgcccctggcccctcctaaatttcatgtcctcacatttcaaaaccaatcacgccttcccaacagtccctcaatgtcttaacttgtttcagcattaactcaaaagtccacagtccaacatctcatctgagacaaggcaagtcccttttgcctatgagcctataaaatcaaagcagattgattgatttatccaatgcttgtaccccacattgatagatacaatacaatgtagattgtagatagatacaatacaatgtatctatcattgtggggtacaagcattgggtaaatacagccattccaaagggggagaaattggccaaaacaaaggggctacggtcgcatccaagtatgaaatccagtagggcagtcaactcttaaatctccaaaatgatctcttttgactacttttcttacgtccgggtcaygctaatgcaagaagtgggatcc

SEQ ID NO: 24286 - DNA, 611 bp, Homo sapiens
ccctgtgccatcagggcacagaaatgataatgtacttcattgtctctactttagtctaatttaggtcttctccctgctttccacttctgcaaagatgacttacatgatgatgacagcattgatatgtgaaagactagaagaaacaaaatttttaacaatgacaacctataaagaatcaaagcactttaagaaatctgaaaaaattaacaggaacagcttttatgcgataagggctatgcaaattatagcaaaacttctgacatttagaacttttacaaaattagaaagcctcataaactactatcaatcaaatmatcatacttagaattaaaaaggaaactagaaatcatcttcatcgatcacactattatttcctttccctagatgaaaaggaaagctttcttgatgaagtactgctttatttatattctgaggtgtagattccttatttcctggtggattggcttaaacaagtcacaaccaactactttagcacaatctagtcattaccctttgttttataaatgaggaaacacacagagatgccttaacattcttcaaataaatgtttattgaagtatctggcacctatgtaaaagttaactagacca

SEQ ID NO: 24287 - DNA, 752 bp, Homo sapiens
tgcctgggccggcagggccggccggctgctcagagtgcggggccgccaagcccacacccacccggaactccagctggcccgcaagcgccgcgcacagccccggttcccgctcgcgcctctccctccacacctccctgcaagctgagggagccggctctggccttggccagcccagaaaggggctcccacagtgcagcggtgggctgaagggctcctcaagtgccgccaaagtgggagcccaggcagaggaggtgccgagagcaagtgaggrctctgaggactgccagcacgctgtcacctctcaaaaccatatcggtatctacgttcagagcctacattcaggctcttcctttatccagacagcacctagatatttctttggggaacctacttctccctgcctagggaatttgtagtagtcaagtgctttgagtagtgttgtgttagtcaattttgcattgctgaaaaagaatacctgagattgggtaatttataaaggaaagaggtgtatttggctcatagttctacaggctgtacaggcatggcaccagcagctgctcagcttctggtgtggccttaggatgttttacttgtggcagaaggctgatggggagcaggtgtgtcacatagcaagaaagggaacaagagagagaggaggaggtaccagtttccttaaacaaccagctctcatgtgaactaatagagtgaaaactcattcattacctcagggcaggcaccaagccattcatgag

SEQ ID NO: 24288 - DNA, 648 bp, Homo sapiens
tctgccttataatttcagaattaagaccatttatgcttaatataattactaatatgattgggattaaccatactattttgctgctgctttttcacttatcatatacattatttttttctttttctttttctatttttctgagtactttcggattgagtgtttttagttttctcttttatcttctctattgagtcattagctacgatgttttattatcttagtgattactctagaatttataatattaatctttaacttggtagtccatcttcaaattatgttttattctttcatctataatgtggaaacttccaacagtattcataaatcatttctttcctttatgctaatgttgtcataaacctttatagctatataatttataaaatccacaatacattacattcatttttgctttatggagtcaattgttttttaacaattttaaaataaaacccttgctgtatttatcatttggatatttttatttccttttgtagatyagagtttttgtatgatatgcttctccttcaaccttatattacaggcagttttgttacttgtggatctgcttgaggctaagattcaatgttaggctttattagggcatatctggaacagcctttactccagaactaatttagcatc

SEQ ID NO: 24289 - DNA, 761 bp, Homo sapiens
tcatctttactctgctgtgcacagaggagaaatattagcatatacttcttccattcaaataaaccccaaataggtttttgtacgcacaaaaagaatctttaaaaattaacacacctttgtgctgacattcaaaatttagaggatttgtaagaagttccgtgggcgagtttaatgtgggagggtagctttgaccataaattatagtaaaagattttttagaccttttaaatgtattattcccttatataatagacttaagactgatatgaggcaaaggacaaataagatatgacatatctgtgaatatttcagaattgggctctcaaagtatttaataataatagtaatacttcttaatgccagctatgattttgtgctaacataatttaagtgttgtgtacattatttcaatcccatatgagatagagttattttatacagataagaaaacatagaggctaaatatcttacctgtcatcacacttaagtgatgatagttggattttatgcactagtttgtttctctcctttcatttcttttcagtaaatgagaatttatgatggcagtggaatgtgtagaggtggtctgagtacagcggtagcagcatgtaacctgaaagattgggctggtaactgatgtgaaaatgtataaaaaccagcaaaagttgaactgctttatgtctgttcctctaaagtagttccctgcctttgacctgtagcagcaacagactcacccgggaacttgttacwtgcaaattctt

SEQ ID NO: 24290 - DNA, 573 bp, Homo sapiens
tgtcaattatacttaaattatttacaatttagtgccttacctgtagccgccaaaattacaatcaaatttgggcggctattctctgcttcccaaatcaaccctggaaaattatagaagggaaaaagaaagagraaaaaaaaaaacaatatcagcaataaaatctaagcaacaaaacagagaaaaccctggatgagactgaagactgtgttgaactggtacttgtgtttgggacagtgttggctggaagggggtcagcagcagagatgtaggggaggtctgcagcctgcctatacggcagatgactgaacgaataggatgaacatttttaaatttccacctcacttcattgcacaatctgaagcaccacctcaaaacacaatgtcagtagccccagagtaaaaccagaactccaggaaaactgtgttggttaaggcagtgtggctccggaggtctgctaataacgatctgtaaccaacatagtgggaaaggatttgcgttttaaaatattgtttcaacagaatataaacaatggaacagaagcagaatagaatgtcagagtgaatcatgcatact

SEQ ID NO: 24291 - DNA, 573 bp, Homo sapiens
tgtcaattatacttaaattatttacaatttagtgccttacctgtagccgccaaaattacaatcaaatttgggcggctattctctgcttcccaaatcaaccctggaaaattatagaagggaaaaagaaagaggaaaaaaaaaaacaatatcagcaataaaatctaagcaacaaaacagagaaaaccctggrtgagactgaagactgtgttgaactggtacttgtgtttgggacagtgttggctggaagggggtcagcagcagagatgtaggggaggtctgcagcctgcctatacggcagatgactgaacgaataggatgaacatttttaaatttccacctcacttcattgcacaatctgaagcaccacctcaaaacacaatgtcagtagccccagagtaaaaccagaactccaggaaaactgtgttggttaaggcagtgtggctccggaggtctgctaataacgatctgtaaccaacatagtgggaaaggatttgcgttttaaaatattgtttcaacagaatataaacaatggaacagaagcagaatagaatgtcagagtgaatcatgcatact

SEQ ID NO: 24292 - DNA, 759 bp, Homo sapiens
ctgggtcacatgagagtatagagcccctggcaaactgtatcaccaattatgtatgcataaaataaacttgtgtcatgccaatcaaatttcagcatttctctgatgcatcagctagcagttactktaactaccatagctaccatttctgttaagcataaatattttgtatttcaaaggtaacagtttgcatattgttattgcaaaaattatagaagtgtatataattcacaattttcccctttacaaaactcctccacagtttatccccctccttagaggtcaccacaattaacaatctggtatgtattattttaaaactgactctaggctattaattgacagataagctataacaatatattgtttttatttaatacacaagaatgataatgtatatattgatctgccactagcctttgtcacttcataaaatggatatgggatctttccacaactgtgtatatatatatagatctctcttttgaaactaatttctataattctaaagtaggcatgcaccataattaattaaactctttcttcctaatggacaccagttgtttcccatctgctgtatgatgaatagaataaaatcatcttcgaatatgtattattgggcaaacattaatgttttcttataagaaatgtattaacatcgacgttgggtgaaaatgaaaagggtataaatagtttagcattttataaatatttctaaaatttcattgcaaaaatgctgtaccaattaacatttttaaaaaa

SEQ ID NO: 24293 - DNA, 586 bp, Homo sapiens
aagagtgaaagaaaaatatccacccatttaaaatgagcctaaaaatataagttccaaataaagcaagaaataggaaaaaagccaacaaaattaacgatcaaaatatgagttcactacagatagaaataaaataagaaaacaatctgaaataggcctcaaaataaatatgtttaggatctacaaagagataaatgaaggaatcatatctacaaataacaataaaattatgaaatagaaaygtaaaaagaacaagtgagtattttttaaaattacaaccattaagttgaaaaatatagttgatctaataaactcaacaggataataggacaataacttgactgggattaattaaagagagaattggggaatttgaagaaaatacaaaaatgttttctctatagtgtacacagagaaatagagatttttttttaaagaagagctgttaaaagacgagtaatatattgagaatttctaatatccattaagtaggagttctggaaaaagagaataaaggtaaaaatggaaaggcaatattaaaaaaaaaaaaagctaagaattgcccagtattgaagaaagtccttttaag

SEQ ID NO: 24294 - DNA, 1168 bp, Homo sapiens
tcactttgtgatccacatatctcagtggtagagaagctgaaagttttctgagatggttacatttctggtatatacacttcattatttctaggttaaaaaaaataattccaagataaagttaattttaagaaaaagaaaggaggtggggagtaagggggagcatcatttgctcaagtaaagtttacgttgccccaactaatgttcctttccacagtaatcttgcccaacattaatactggggtaacccaaccttgccattgtagtggtggtggaggtgctttacctctccaggtcaagaggctagcaaagttctccattcactcctagacagtagccaactcagcctactcagtccccgagacagtaagtaccaagcctgccaggatctcagcacctcctaatagccgataggatctggaatcagctagcaagcctattagtaacatgtcccaggagggctgtaaggaccctattggatcttgctttaaccaatcaaccaatccaaatgggcttcagtgagaccaactgactcccaacctcctgacagtgaatcatgccagtgccaggagatagtctgaaagatccttttaaataacaaaagtgagaccagtcagtcctcacaattccactgctattggaacattatcatttgaaagactgggatatccttagaatgagctaaaattaagtcagcttccttagtccaagccacatttgatcttggttaattcccttcccctcccagaccaccattttggaccccaaattcctcactgcataagtgcatgtgatctagtcttttgcttcctcatattcactcagcctccagtattccccagtccttgatcctgcagagagacctcactgcagttactgttgcctcttctcttggcaccgctggctgcctcagcccctcagcatcagcattggctatagtatgacctccatcacacctgccacacatgacaacaaccataaaaactccagtccccaggttcaacctgtctagacacacagagactctgtctccccatcccatctacttccagattcagaagtagcactgcaccactggrcatcagtctgcctccccagaagtcagttcaggggtcagtcaacaaaacactgagacagggatgaaccttcaacaagagtcaggatgaggaga

SEQ ID NO: 24295 - DNA, 634 bp, Homo sapiens
gatggggtagtgcccggtgagctatggcacaatacatgggtagaagatgatcatttcaaggaatccaataatattcaacacttgccagggttctggatgcaggcttccatttctttttgcaatttggaccaagtaattagatctgtctcttttttttttctttttgcaaaagatgatgctgcgatggggtagaggtgaatagaaataactgccttctctctgcagagttgatgaagcatcaactgggataataaatgtgaaaacaccatgaaatgaaaacatctatttaaattcaagaggttgttatttacagtctttaaatgatatttgcccagctctggttgtttacttttarcacatcccacagaaactgtggaaactacaaaaaccacataaagtgatgattaaattcagaaactcaatctgacctgatctctttgggttggcaatctctctgtgccgttttcttgcttaggactgaggaagctttatagatggaccataaggaggaagtccaggtgagctggtgggagtgtgtgccttcagaaaggggggcctagctttggttaggcctgcagatggattccttgtcagtttcagaggatttagtgaccctgcacttcaattgccccaa

SEQ ID NO: 24296 - DNA, 634 bp, Homo sapiens
gatggggtagtgcccggtgagctatggcacaatacatgggtagaagatgatcatttcaaggaatccaataatattcaacacttgccagggttctggatgcaggcttccatttctttttgcaatttggaccaagtaattagatctgtctcttttttttttctttttgcaaaagatgatgctgcgatggggtagaggtgaatagaaataactgccttctctctgcagagttgatgaagcatcaactgggataataaatgtgaaaacaccatgaaatgaaaacatctatttaaattcaagaggttgttatttacagtctttaaatgatatttgcccagctctggttgtttacttttaacacatcccacagaaactgtggaaactacaaaaaccacataaagtgatgattaaattcagaaactcaatctgaccygatctctttgggttggcaatctctctgtgccgttttcttgcttaggactgaggaagctttatagatggaccataaggaggaagtccaggtgagctggtgggagtgtgtgccttcagaaaggggggcctagctttggttaggcctgcagatggattccttgtcagtttcagaggatttagtgaccctgcacttcaattgccccaa

SEQ ID NO: 24297 - DNA, 590 bp, Homo sapiens
aagatcgcaccattgcactccagcctgggcaataagagtgaaactctgcctcaaaaaaaaaaaaaaagagggttgcacgttgtcaacaaatacctattgaacaccctggatgttcaagacatgtgaatgactcgaagaagtggcagctgcagaagtgatggccaatgtggaaaagggggttggtggggattggcagagataggggagtccacatgcgaaaccccagtgagggggcaggactgagagtttgtaggtaccctcttccagggtgtaggaggaaatggagaatgcaggtgtaggggctaaggggaacttcagtgaactctgaagtttcactgaaaaatcaacttataatagacagattaattggagaaaaggcatacaaattgatttaacatgtatgcacaggagccttcagaatgaayacccaaatatacagggaaaattgtttatttttatgcttaggtgcaacaaagtatggatagccatgtagaaatacgattggacaaaatggatgtgttctaatgctaacagactgagttaggaaacccagcgaggcctatctgtctagctccttcctggcctctctg

SEQ ID NO: 24298 - DNA, 647 bp, Homo sapiens
  misc_feature (1)...(647): n = A,T,C or G
tctctaccagactgaggtacctttttttttgytttttttttacaactgtgcaattgatgaacctgcattgacacatcattatcacgcagagttcacagtttatataagggtgtactcttggtgctgtacatgctagtggtttggacacatgtataatggcatgtgcccaccatgacagtatcagacagtgtatctgcactaccctaaacagcctctatgctctggctattcatctctccctcccctgacccccagcagctgctgacctttttgctgtttccatagttttgtctttttcatacaatatgtatcccattttagtctggcccctttcacttgtcaatatacatttacatttcctccatgtcttttcatggcctgatagcttattccttttaagtgctgagtgatattccattgtctggacataccacagtttatctatttacccactgaangacatcttggtttgtttccaagtttggtcaactaggaataaagcttctataaataactgtgtgcaagttttttgtgtggacatgagttttcacactccttgggttgctgctaacattttattaacttgggcatggcctcccttgtgaggtctggcagcgccctcacaagggagttttgtaaccagccct

SEQ ID NO: 24299 - DNA, 1054 bp, Homo sapiens
ttgtgcctccagagaaaactcttgatawcagatatcaagtgagtgcaggagagggtcacctaacccagactgaagaatggacagaaggccagagaagtcatcttagatgtgacgattgcaaagggggggaaaaaaacacatttgagtggtttattaaatatgcaagatattttgactttttcttttaaatggctggtattgaaaggacattgtcctgatctcagtcatcaggaacaactagaaattaggttaaggctttccagacacagggaatatattggtgcaaagaactacaggtgagagagcttggtcaagtctagaaaatcagggcaattgagtatggctataacagaaggcatctttctctgagggagtcaggaggcgggagggaaggctgcagaggtaggtgaggtcccataacatatggttctgatttctcccaaaggcaacagcatgctcatgaacaactttaagcagggaatttagttgattcaatttttaaaagaaagttctctctgccatcattgaaaagggaagattggagggctgaagactggtgtcaagatgactgggatgttatggtgaccttagtaatacgaggtagggcctggttaatggcagtgacatcagaagaaaaaagagggaaccaactaaatatttaggaggtagaattttcacaatttttccactatttcacagagggaatagcgtaaattgaatctcaaaatcgggtaagtagactgccctttgcagagaagataagcacttttttggatatgtattgtttgagctgcctataaagtgcccagttggatagacggatctgaagctcaagagagacctctaggctatgaaatagattccagaaactgatgtgtcaatagaatttcttgaaacctttggtataggatggagtaccctggaagaactcattacatgaaaagagggccaaagactcaatagagcagaaggggaaaggcagagaagaaagtagcagaaaggtctagaaacagagtaagaaacacaggagatgtcagttaaaggaaaataaggg

SEQ ID NO: 24300 - DNA, 1054 bp, Homo sapiens
ttgtgcctccagagaaaactcttgataacagatatcaagtgagtgcaggagagggtcacctaacccagactgaagaatggacagaaggccagagaagtcatcttagatgtgacgattgcaaaggggggraaaaaaacacatttgagtggtttattaaatatgcaagatattttgactttttcttttaaatggctggtattgaaaggacattgtcctgatctcagtcatcaggaacaactagaaattaggttaaggctttccagacacagggaatatattggtgcaaagaactacaggtgagagagcttggtcaagtctagaaaatcagggcaattgagtatggctataacagaaggcatctttctctgagggagtcaggaggcgggagggaaggctgcagaggtaggtgaggtcccataacatatggttctgatttctcccaaaggcaacagcatgctcatgaacaactttaagcagggaatttagttgattcaatttttaaaagaaagttctctctgccatcattgaaaagggaagattggagggctgaagactggtgtcaagatgactgggatgttatggtgaccttagtaatacgaggtagggcctggttaatggcagtgacatcagaagaaaaaagagggaaccaactaaatatttaggaggtagaattttcacaatttttccactatttcacagagggaatagcgtaaattgaatctcaaaatcgggtaagtagactgccctttgcagagaagataagcacttttttggatatgtattgtttgagctgcctataaagtgcccagttggatagacggatctgaagctcaagagagacctctaggctatgaaatagattccagaaactgatgtgtcaatagaatttcttgaaacctttggtataggatggagtaccctggaagaactcattacatgaaaagagggccaaagactcaatagagcagaaggggaaaggcagagaagaaagtagcagaaaggtctagaaacagagtaagaaacacaggagatgtcagttaaaggaaaataaggg

SEQ ID NO: 24301 - DNA, 1054 bp, Homo sapiens
ttgtgcctccagagaaaactcttgataacagatatcaagtgagtgcaggagagggtcacctaacccagactgaagaatggacagaaggccagagaagtcatcttagatgtgacgattgcaaagggggggaaaaaaacacatttgagtggtttattaaatatgcaagatattttgactttttcttttaaatggctggtattgaaaggacattgtcctgatctcagtcatcargaacaactagaaattaggttaaggctttccagacacagggaatatattggtgcaaagaactacaggtgagagagcttggtcaagtctagaaaatcagggcaattgagtatggctataacagaaggcatctttctctgagggagtcaggaggcgggagggaaggctgcagaggtaggtgaggtcccataacatatggttctgatttctcccaaaggcaacagcatgctcatgaacaactttaagcagggaatttagttgattcaatttttaaaagaaagttctctctgccatcattgaaaagggaagattggagggctgaagactggtgtcaagatgactgggatgttatggtgaccttagtaatacgaggtagggcctggttaatggcagtgacatcagaagaaaaaagagggaaccaactaaatatttaggaggtagaattttcacaatttttccactatttcacagagggaatagcgtaaattgaatctcaaaatcgggtaagtagactgccctttgcagagaagataagcacttttttggatatgtattgtttgagctgcctataaagtgcccagttggatagacggatctgaagctcaagagagacctctaggctatgaaatagattccagaaactgatgtgtcaatagaatttcttgaaacctttggtataggatggagtaccctggaagaactcattacatgaaaagagggccaaagactcaatagagcagaaggggaaaggcagagaagaaagtagcagaaaggtctagaaacagagtaagaaacacaggagatgtcagttaaaggaaaataaggg

SEQ ID NO: 24302 - DNA, 615 bp, Homo sapiens
tggagttaatggtgccaacttgcttccttttataagcccaagagctttttaaagctgagcactctggctacgcccattaggttacaaggtcctctcggactttgttgtatgacatctggtactttactgccttagaggctaaaaagaaataccatgcgtgccatttgctttgtctcagtctttctaaaaggttccctttcaacttggtctttctctgttagtggtaatagtctttaagggtttcagatattgaaggtctgttgttaacagattttcttttgacttttaaataagtcacatatccactactcagagaagaagcaggggaatatacaactaggatttgtatactagttttacttttgcaaagattttgawgtaccttgtcacccagatgactgagtttttgaaacaaagtatatgcattgtagctggacaccacaatataactagtatcaggacactgacagggaaggtcaggtgcagatgaacgatagaggtgcagggttatactttctatggcaaggctggtacgttactttaacaaaaaacccctatcacggatcaatggcttctcaaaagtgggaaaaaaaccccagaaattttgcatgtttg

SEQ ID NO: 24303 - DNA, 580 bp, Homo sapiens
acatacattcttccatttatctaattcacaaycatctgtagagatattgctgttatttacatcttttacacagcagaaaattgaagcctagagagtgaagtgatttgcctagagtctcttgggggatgagattgaattgaagaagagctctctggacttcggacattccagggaacaaggggtggatctctgtcatgttcaatatacagttggtatttagtaaatattaggcaagctaagatgagggcattccatctagactgttatcactgtacagcattgcttcttaatttttttctgctgtgtatcagtacttgggaatgatagtgaggaacctaggaattgaagataggagaaatgatggtttttgtcagccatgtgttggtgtgagccatgtgttggcatgagcaggaaacagtttgtgattatgcggcagaacagaagagttggaaatttcccaaactctaaccaaggcaatctagaaataatctccaagaggccaggcaaaaatgtgagtttaatttagtaagaaaaatgcaatcgattttattatacctgattcggagaaagactgtgggaa

SEQ ID NO: 24304 - DNA, 580 bp, Homo sapiens
acatacattcttccatttatctaattcacaaccatctgtagagatattgctgttatttacatcttttacacagcagaaaattgaagccyagagagtgaagtgatttgcctagagtctcttgggggatgagattgaattgaagaagagctctctggacttcggacattccagggaacaaggggtggatctctgtcatgttcaatatacagttggtatttagtaaatattaggcaagctaagatgagggcattccatctagactgttatcactgtacagcattgcttcttaatttttttctgctgtgtatcagtacttgggaatgatagtgaggaacctaggaattgaagataggagaaatgatggtttttgtcagccatgtgttggtgtgagccatgtgttggcatgagcaggaaacagtttgtgattatgcggcagaacagaagagttggaaatttcccaaactctaaccaaggcaatctagaaataatctccaagaggccaggcaaaaatgtgagtttaatttagtaagaaaaatgcaatcgattttattatacctgattcggagaaagactgtgggaa

SEQ ID NO: 24305 - DNA, 1745 bp, Homo sapiens
  misc_feature (1)...(1745): n = A,T,C or G
ttatttttattcagataccttaactgtcattcttcagaaaggtcttttctaatgaccccacttggagtaattacacactgatcaatcatcctagtttaactgatttttcaacttcacatcatcctaatgtaatcatcctctgcacagtgcctgtggtatcttcagggattggttccaggaccccccactccctatagatactaaaatcctcaaatatcttacataagatggcagagtattggcatataaccyattcataccttctggaatactttaaattagctctagattacttacaatacctaatataatgtaaacgctatgtaaataatggttataactgccttgtttgggaaataatgacaaggaacagaaagtatgtacatgttcagcacagatgcaaccatcacaagcctaactacatttctgattggtgattggttgaatctgctgatgtggaacatgggtatgaagggccaataatacttaccaccatccattatcttctgtttgcttacagtctgtctttccaaactaaaacataagtcctttgagggcaatgattttcttattcaccactgcatccccacaatttagataagtatctggtacatacgaggttttcagtaaatttgttcaattattgaataaaaatattaaatgtgtatactcttgaaagatataatacgtggaaaattttctactgcaattagaacnnnnnnnnnnnnnnnnnnnnnnnnnnnnnnnnnnnnnnnnnnnnnnnnnnnnnnnnnnnnnnnnnnnnnnnnnnnnnnnnnnnnnnnnnnnnnnnnnnnncctttaaaaggaagaagtatgccctctccttttctttcctcctactcactggctggacaaaaacaaagtggtgagccatctcaaaccatacaggtgaggaaaactgcctatagattggaggagcaacaagacataagagcctgacccccgacacacacagctgccatatgagccctgggctgcttacattgagatgagaatataaaagaaaaggcccctgtcatctggtctaaactgctcttttgagccattcttaccaaaatctgtgtccttactaatatgtttccttaaattcgtgtcatcatagatttttaattgagttcatgctgacacattataaaaatgatcatattaaaagatagttttaaagttaaatgtctccattgccccaacaattccaataaattcaaaacctgttgtagtaatatgcaatatagtttaaaatacagtaatcaacgtaacattgtaccaataacatatattgctacacttaacaaaaatgtttaccttaaacatgtttataatataaaaccatactaagaagcagaaaacattttaagatgatatatttataagacacttttatatattatcaaactgtaaaaataatcatgaatgtcattggcatgcagtgtatttttatttatttttgtaatttaagaataatcaccttaaataaaataaaatagtttagcattacttttttttttttctttttttgagacagggtctcactctgccacccagactagagtgcagtggtgtgattgtagctcattcccaccttgaactcctgggctcaggcaatcctcctgccccagcctcctgaatagcagacaccacgatgccttactatatttttttaatttttttgtagacatgaggttttgccatcttgcccaggctggtcttgaattcctggcattatg

SEQ ID NO: 24306 - DNA, 1745 bp, Homo sapiens
  misc_feature (1)...(1745): n = A,T,C or G
ttatttttattcagataccttaactgtcattcttcagaaaggtcttttctaatgaccccacttggagtaattacacactgatcaatcatcctagtttaactgatttttcaacttcacatcatcctaatgtaatcatcctctgcacagtgcctgtggtatcttcagggattggttccaggaccccccactccctatagatactaaaatcctcaaatatcttacataagatggcagagtattggcatataacctattcataccttctggaatactttaaattagctctagattacttacaatacctaatataatgtaaaygctatgtaaataatggttataactgccttgtttgggaaataatgacaaggaacagaaagtatgtacatgttcagcacagatgcaaccatcacaagcctaactacatttctgattggtgattggttgaatctgctgatgtggaacatgggtatgaagggccaataatacttaccaccatccattatcttctgtttgcttacagtctgtctttccaaactaaaacataagtcctttgagggcaatgattttcttattcaccactgcatccccacaatttagataagtatctggtacatacgaggttttcagtaaatttgttcaattattgaataaaaatattaaatgtgtatactcttgaaagatataatacgtggaaaattttctactgcaattagaacnnnnnnnnnnnnnnnnnnnnnnnnnnnnnnnnnnnnnnnnnnnnnnnnnnnnnnnnnnnnnnnnnnnnnnnnnnnnnnnnnnnnnnnnnnnnnnnnnnnncctttaaaaggaagaagtatgccctctccttttctttcctcctactcactggctggacaaaaacaaagtggtgagccatctcaaaccatacaggtgaggaaaactgcctatagattggaggagcaacaagacataagagcctgacccccgacacacacagctgccatatgagccctgggctgcttacattgagatgagaatataaaagaaaaggcccctgtcatctggtctaaactgctcttttgagccattcttaccaaaatctgtgtccttactaatatgtttccttaaattcgtgtcatcatagatttttaattgagttcatgctgacacattataaaaatgatcatattaaaagatagttttaaagttaaatgtctccattgccccaacaattccaataaattcaaaacctgttgtagtaatatgcaatatagtttaaaatacagtaatcaacgtaacattgtaccaataacatatattgctacacttaacaaaaatgtttaccttaaacatgtttataatataaaaccatactaagaagcagaaaacattttaagatgatatatttataagacacttttatatattatcaaactgtaaaaataatcatgaatgtcattggcatgcagtgtatttttatttatttttgtaatttaagaataatcaccttaaataaaataaaatagtttagcattacttttttttttttctttttttgagacagggtctcactctgccacccagactagagtgcagtggtgtgattgtagctcattcccaccttgaactcctgggctcaggcaatcctcctgccccagcctcctgaatagcagacaccacgatgccttactatatttttttaatttttttgtagacatgaggttttgccatcttgcccaggctggtcttgaattcctggcattatg

SEQ ID NO: 24307 - DNA, 537 bp, Homo sapiens
gatttttataagttgttgaaggtggtgataattctagagtgtaggcacggagggggccagcaggcaagaggcaatgggactgtaaygaaacaatcccaagtctggtgggttggtttggggctgctgcagggaggcacgggggcagtgaggctggaactctgagaggcagccccggaggtaaacctccattcctgacggcactctttttttgagcatggaagaagtcagaacacgcgttaccccttgtgttagctctctgcatgagttcagagtatccctgggtctgaattaaacaaatgacattttacagatagattttacagatacgttatgagtcgatatttcttaaagcatgtctaccttccataatgccagaattcctccttttcctttgtgaggtgaagatgaatgttagagtagaaagaattgtaaactccttggtaggtttaagcagttatcaagtaccttgaatgtgagtagtaaattctcacccaagggcaagggtagaccttttgagatagaaagggtggatattgg

SEQ ID NO: 24308 - DNA, 3170 bp, Homo sapiens
acctaatcctgtctgaccatcttaacctgattacatctgtaaagaccctatttgcaaataaggatctggggttcccgactgacatggattttgggggacactattaaatctagtacatctaccttgtagagggtgtcaatgtgatattgtatgtaaaacacttagaatgtgtttggcacataacaaatactgtatggtactctgttttttttttaaattattacatcattagtgacatagtcaaatgatttgctaacattaacatcatgatagcagcagctactattcattgggctattagtgttaaggaactaggttgagcggtttatatgcattacctcatataatctctactatatctattaatctagtaaccctggccaaacaatgataatactatataatacagatatgatctataatctatgagctcactagccctacactattattttattcctttctatgttttcaacaatcctctgatattttaaggagctgaagtcaagctattagtctacagtattgacaattcattcttcctttttgaattttgagtcccttgtctatgtttagcttctttgaagcctacatattatctattttattcctctgtccataatagattctcatgaaatgctttgaaaatgaattcattcaacaaatatttgtcgacactcataagggctggtgatgaaaggataaaaaaagtgtggattatttatgtcctgtggaaattcacattcttatgggtggccaggagggtgggaggagggagattataacaggttaaaaaactttggggaaggggaggggttttaacagaaggagagataattgggcattccagcctctctgtccagggaatgataagtattcatacctgaaataagtaggatctgaagtctgcttgggtgagggtcaggtgggagtagggatgagagatctttaatagagaagagagatggtgataaaaatcttatatccttttacacacccctctatcgtttcttctccaaggtgaatgaaccagcttcctttatcttcgatggtaggatctctattccaaagtttctgtctttttgtatgactctcagaaccttctggtgtttcaaactagatactctgataagagcgttaacctgtgctgaatattatcagtgaaatccttttgtccctccattttcaactctgtttttttttctctattggaacaaagctagcttttcaatgcggggtcccattctgtatcaccaactcatgttcaacttttgacccatcctggatcattttcggccctgcttacaaacagcttcccacgctgcagatggcgtcttctcttcagctacgatctctcctgggctttgttctatttgtgtccaaccacttcctcccaggtccttcataaagatctcaattggattgaaagacgtccttatactaaagaaattttaaactgtcctccttggccatgctcacgttgctcaccgaagccatccccgtttcgtctaacatcgttttttttgtagtagttgttttcttctaaagctttgaggcatgactggggtgggggcagatcaaatccattttcctcgttttcagttctagtgtctaccatgcactggtacaatgggcagaactccaaggatcattgtctctttgttttcatgcatttgctggtaatttcaagtcagcttccgttttataagcttgtatgtctttattgcattttgagagaacattattggcatacctgaattgacagcatctgttccttccatttaaatttcaccatctaaaacaacgtgtgtcccagtttcaggaaacaggctgaacagatgccagacagttgtactgaatgctctctccatgaaagagctgctcttgcttacatttttgtttatttcattgtgagggagaagagcagattgaatgatgtcattaataagggtcctttgcctttattgtttaggatcctattgaagacctctcatatctgaagtggctggtggataagagggtttggagatttcagactcttttcaccagcacagtgtagaattgcagagctggaagcaagggtggtgtcacgggtgtgtgacttgtatagttgcatagggatctgcactgagaagagctctcttcttggcttaatgtcctgctgtcatcatcttgaaattcgtaatactttctgaacatgggagtctgcactttaattttgcactgggcctcaaaaatcatatagctagttgtggatggaagaaatatgagggcatctagtgggaacacaccatcattatctgggatagatgattaactgtccatatcttctgtggaacctgatttgacggcagttttgacaaaagtaaaaagaaaaacaggctgggtgcggtggctcacgcctgtaatcccagcactttgggrggccgaggcaagcagatcacgaagtcaggagtcggagaccagcctggccaacatggtgaaacctcgtctctactaaaaatacaaaaattagcccgaggtagtggcatgcccctgtaatcccagctactcgggaggctgaggcaggagaatcacttgaaaccagaaggtggaagttgcagtgagctgagatcgcgccactacactccagcctgggcaacaagagtggaactcggtctcaaaaaaaaaaaaaaaaaaaaaagaaaagaaaagaaaaaaaagacctccctccttagaattgtacctcccttgagttggaggggcctggtaaacatctggcccaggtgtccttcttagaatctggcactatttcaactatctttatgacctctagggatgaaaacttcacaattccccctgtgggctcttccatgtgcactgcatgttatgtctaattttcccataaaggacaaatactcactaacacaaaggattaatttctacggttgctttatagtaatatgcattctagggcattggaaaaatgggaaatgaggctgtctgtaaaatcccctccacccactgtgggatagcattgttgaaaaagggatgcatactttaatctttccttttgagagagcaaaattcctgtccttttgacatttgttactggagatacatttatagagggaatgagttggacaacttgaggctagaaaagaatcaagatgaggaatgactggagtaaa

SEQ ID NO: 24309 - DNA, 3170 bp, Homo sapiens
acctaatcctgtctgaccatcttaacctgattacatctgtaaagaccctatttgcaaataaggatctggggttcccgactgacatggattttgggggacactattaaatctagtacatctaccttgtagagggtgtcaatgtgatattgtatgtaaaacacttagaatgtgtttggcacataacaaatactgtatggtactctgttttttttttaaattattacatcattagtgacatagtcaaatgatttgctaacattaacatcatgatagcagcagctactattcattgggctattagtgttaaggaactaggttgagcggtttatatgcattacctcatataatctctactatatctattaatctagtaaccctggccaaacaatgataatactatataatacagatatgatctataatctatgagctcactagccctacactattattttattcctttctatgttttcaacaatcctctgatattttaaggagctgaagtcaagctattagtctacagtattgacaattcattcttcctttttgaattttgagtcccttgtctatgtttagcttctttgaagcctacatattatctattttattcctctgtccataatagattctcatgaaatgctttgaaaatgaattcattcaacaaatatttgtcgacactcataagggctggtgatgaaaggataaaaaaagtgtggattatttatgtcctgtggaaattcacattcttatgggtggccaggagggtgggaggagggagattataacaggttaaaaaactttggggaaggggaggggttttaacagaaggagagataattgggcattccagcctctctgtccagggaatgataagtattcatacctgaaataagtaggatctgaagtctgcttgggtgagggtcaggtgggagtagggatgagagatctttaatagagaagagagatggtgataaaaatcttatatccttttacacacccctctatcgtttcttctccaaggtgaatgaaccagcttcctttatcttcgatggtaggatctctattccaaagtttctgtctttttgtatgactctcagaaccttctggtgtttcaaactagatactctgataagagcgttaacctgtgctgaatattatcagtgaaatccttttgtccctccattttcaactctgtttttttttctctattggaacaaagctagcttttcaatgcggggtcccattctgtatcaccaactcatgttcaacttttgacccatcctggatcattttcggccctgcttacaaacagcttcccacgctgcagatggcgtcttctcttcagctacgatctctcctgggctttgttctatttgtgtccaaccacttcctcccaggtccttcataaagatctcaattggattgaaagacgtccttatactaaagaaattttaaactgtcctccttggccatgctcacgttgctcaccgaagccatccccgtttcgtctaacatcgttttttttgtagtagttgttttcttctaaagctttgaggcatgactggggtgggggcagatcaaatccattttcctcgttttcagttctagtgtctaccatgcactggtacaatgggcagaactccaaggatcattgtctctttgttttcatgcatttgctggtaatttcaagtcagcttccgttttataagcttgtatgtctttattgcattttgagagaacattattggcatacctgaattgacagcatctgttccttccatttaaatttcaccatctaaaacaacgtgtgtcccagtttcaggaaacaggctgaacagatgccagacagttgtactgaatgctctctccatgaaagagctgctcttgcttacatttttgtttatttcattgtgagggagaagagcagattgaatgatgtcattaataagggtcctttgcctttattgtttaggatcctattgaagacctctcatatctgaagtggctggtggataagagggtttggagatttcagactcttttcaccagcacagtgtagaattgcagagctggaagcaagggtggtgtcacgggtgtgtgacttgtatagttgcatagggatctgcactgagaagagctctcttcttggcttaatgtcctgctgtcatcatcttgaaattcgtaatactttctgaacatgggagtctgcactttaattttgcactgggcctcaaaaatcatatagctagttgtggatggaagaaatatgagggcatctagtgggaacacaccatcattatctgggatagatgattaactgtccatatcttctgtggaacctgatttgacggcagttttgacaaaagtaaaaagaaaaacaggctgggtgcggtggctcacgcctgtaatcccagcactttggggggccgaggcaagcagatcacgaagtcaggagtcggagaccagcctggccaacatggtgaaacctcgtctctactaaaaatacaaaaattagcccgaggtagtggcatgcccctgtaatcccagctactcgggaggctgaggcaggagaatcacttgaaaccagaaggtggaagttgcagtgagctgagatcgcgccactacactccagcctgggcaacaagagtggaactcggtctcaaaaaaaaaaaaaaaaaaaaaagaaaagaaaagaaaaaaaagmcctccctccttagaattgtacctcccttgagttggaggggcctggtaaacatctggcccaggtgtccttcttagaatctggcactatttcaactatctttatgacctctagggatgaaaacttcacaattccccctgtgggctcttccatgtgcactgcatgttatgtctaattttcccataaaggacaaatactcactaacacaaaggattaatttctacggttgctttatagtaatatgcattctagggcattggaaaaatgggaaatgaggctgtctgtaaaatcccctccacccactgtgggatagcattgttgaaaaagggatgcatactttaatctttccttttgagagagcaaaattcctgtccttttgacatttgttactggagatacatttatagagggaatgagttggacaacttgaggctagaaaagaatcaagatgaggaatgactggagtaaa

SEQ ID NO: 24310 - DNA, 1223 bp, Homo sapiens
ataggatgaacttcctgtgggttctggccaatattggggtcatttaactctgccacattcaacttgtgtggtcaacattacaaacatggaggagccttgttcccaagtcatctgccaaaaatctgttcaagtgtgtggtaacgccccttgacaagcactgttctgacttatgatgctggaattacactgatgtagttttcattacctttaaaaataasccatgtaacatcataaggaaaactatctctatctatttttgcaaaggttctaaggtaatctggcaccagaaattgtcattccaagtttttttttgataagttgatcaaaattgtgtccagaatgttccagcgataagccctcggttagctggatcactgactcccacagcacatggtcatcctggtggacactatctagtggggctttctccagaatgtactggaagtctgtctcattttctagcacttcttccactacatcatatgcagcataggtagaactagaagcatgagttccccagaatgtctctcacagttggctttaaaaagcaggacaacccaatcatgggtgtgttctgtaaagtcccaaccactgatcaatacaacttggtcttctcttcaatcgagagtcactgaggtcaaaggtgttcctggtgcttctcaggacacgatcacagacatcttctgatcatatccccctttgcattgactccaaaccttccattttcgtcaggttcactcggattagaacacgattatcatgtagaataccaccattaggagcagattttttaagagaagatagaacatcaacgtttcattaatatgatcttccagatcttgttgaaaatgtaaataatgaatttggttccaacagtttttcttagcttgtttgggtggtaaagctggaggctacccatctccaggggtgtcctgtaatagtgatgattccagaatgatgctattagcttgtgctgataatggtgatgtctgatttgcaaatatttggaagaagtgtgaaccacataatctaccaaatgaccaacagaagatggtcataatcaggttccctcttgtatgaatgcagaattttgatgagtaggaattcctgttccgggtgggaattgtgatggaaggctttatgtttctaatcttttcatcagatattgaattcctgcctactacttcccaaactattaatttccacgtcaatggcttacttga

SEQ ID NO: 24311 - DNA, 699 bp, Homo sapiens
tcactcctgtagtcttatcatctgtcactataaacttctgatgaggtctttctgggggacttggaaactgacacctttgtctatcatctgaaaatattgagtatcctaactgtagtgacttccttttaaatcttcttgataaaaaaaaaaaccttctttaatttgccccaggtgtgtctgtgtccggtgttttagtctgagctattggcatttgtgatcttaccttccttcttttgttcacctctgtctgtctatggtattttgcggttgtctctacccattgttttagtatcaatctctaaccacattttgttatgataatttggggtccttcccctaatggatgtgatgtagacatagcgggtagtcactwaactaacaactgttacaagattgtggtggggagatccatcccagtactaatctttaagcattgaacttgaagcagatcccctaccttgcgtgggtctcttttgctcttttgtttctcatttttattaagccaaaggtagttaaattttgcttctatttttgtttttttaaatagcaaactgtctgagaattacagtgttttaataagagaattgtaccttctgggattacagtaccaatatgtttggtcttttgttattttatattgtgtgtttttgatggtttccttggcttttcttttaatatgtggattttgttttctttgtt

SEQ ID NO: 24312 - DNA, 1080 bp, Homo sapiens
tttgagcaaagaggaataggatttggatacagttgtctaaggaatgaactacaggtttgacttttttggacaaaactgaaatatgtgatggatgttccctcccctttctatttttggctgtccaccattctactccttctatgtggggagattttcctaccctattgtgttttgtgttggtaaaacccagtgccctatttcctggtatagaagttgggaagaggaaacttgtctcttctcctgaattctggcagtgttggttagtgacctgtgcttagccaatcagatacttggatatgtaggacttggaatcttttcaatgtgacacaaggctgcaggtwtacatggaaataggatcattgcagcgatagtggcacatcagtaatggtggtgacagcagcaggagataatggctatggcactggcagcatccacaacatgttttagacatgttcttcttaacacacgatcttgatcgtgtttgctattccctaactccctagagcagctcagctcttgcatttttccaagcctcgctctcctgccttcctgtctattctgtgaacttctctgaattcttccaatagatttatttcctgcttcagttaatctagagttgatttctgttgcttgtgtttaaagaatctagatcataccatgtgggtgagatgaattactccttctcaggactcttctaaatggaaccctagaaagtctcaatggtgtacgtaagtaactggttttagggaaaaaaaaaaaaggttggagaggtgcttgtatgaccaatgctcttcaaggagataggaggaattgtgggcattggtgactgtttattgtcaggtctacaggactatacaaatcatattaattgagtgatgaataaaatctttcttcagagaaagtttgtcttgtctttgagtttcctgcccgtgtagtgaacgtaagttggaaataatggtacataataccttttgtttttatggtgctatttgactaagtgccctggaatctcactgaacagcaaaaaatgctccttctttatctgataaatgtcttgagatgcacaagaaaattggatcc

SEQ ID NO: 24313 - DNA, 1080 bp, Homo sapiens
tttgagcaaagaggaataggatttggatacagttgtctaaggaatgaactacaggtttgacttttttggacaaaactgaaatatgtgatggatgttccctcccctttctatttttggctgtccaccattctactccttctatgtggggagattttcctaccctattgtgttttgtgttggtaaaacccagtgccctatttcctggtatagaagttgggaagaggaaacttgtctcttctcctgaattctggcagtgttggttagtgacctgtgcttagccaatcagatacttggatatgtaggacttggaatcttttcaatgtgacacaaggctgcaggtttacatggaaataggatcattgcagcratagtggcacatcagtaatggtggtgacagcagcaggagataatggctatggcactggcagcatccacaacatgttttagacatgttcttcttaacacacgatcttgatcgtgtttgctattccctaactccctagagcagctcagctcttgcatttttccaagcctcgctctcctgccttcctgtctattctgtgaacttctctgaattcttccaatagatttatttcctgcttcagttaatctagagttgatttctgttgcttgtgtttaaagaatctagatcataccatgtgggtgagatgaattactccttctcaggactcttctaaatggaaccctagaaagtctcaatggtgtacgtaagtaactggttttagggaaaaaaaaaaaaggttggagaggtgcttgtatgaccaatgctcttcaaggagataggaggaattgtgggcattggtgactgtttattgtcaggtctacaggactatacaaatcatattaattgagtgatgaataaaatctttcttcagagaaagtttgtcttgtctttgagtttcctgcccgtgtagtgaacgtaagttggaaataatggtacataataccttttgtttttatggtgctatttgactaagtgccctggaatctcactgaacagcaaaaaatgctccttctttatctgataaatgtcttgagatgcacaagaaaattggatcc

SEQ ID NO: 24314 - DNA, 1080 bp, Homo sapiens
tttgagcaaagaggaataggatttggatacagttgtctaaggaatgaactacaggtttgacttttttggacaaaactgaaatatgtgatggatgttccctcccctttctatttttggctgtccaccattctactccttctatgtggggagattttcctaccctattgtgttttgtgttggtaaaacccagtgccctatttcctggtatagaagttgggaagaggaaacttgtctcttctcctgaattctggcagtgttggttagtgacctgtgcttagccaatcagatacttggatatgtaggacttggaatcttttcaatgtgacacaaggctgcaggtttacatggaaataggatcattgcagcgatagtggcacatcagtaatggtggtgacagcagcaggagataatggctrtggcactggcagcatccacaacatgttttagacatgttcttcttaacacacgatcttgatcgtgtttgctattccctaactccctagagcagctcagctcttgcatttttccaagcctcgctctcctgccttcctgtctattctgtgaacttctctgaattcttccaatagatttatttcctgcttcagttaatctagagttgatttctgttgcttgtgtttaaagaatctagatcataccatgtgggtgagatgaattactccttctcaggactcttctaaatggaaccctagaaagtctcaatggtgtacgtaagtaactggttttagggaaaaaaaaaaaaggttggagaggtgcttgtatgaccaatgctcttcaaggagataggaggaattgtgggcattggtgactgtttattgtcaggtctacaggactatacaaatcatattaattgagtgatgaataaaatctttcttcagagaaagtttgtcttgtctttgagtttcctgcccgtgtagtgaacgtaagttggaaataatggtacataataccttttgtttttatggtgctatttgactaagtgccctggaatctcactgaacagcaaaaaatgctccttctttatctgataaatgtcttgagatgcacaagaaaattggatcc

SEQ ID NO: 24315 - DNA, 1063 bp, Homo sapiens
tcagcaggacctacaggggcaagcattaaaaatagtcctttgtgttcaataaaaatttggtaaagatgttgctagtgctaggtgtctcttctgctctaaagagaggccttgcaatttaccaatccaaaattttcattcattcccttattcattcagcctttttattgaatgactactatggctaggtttggtgctacatgcttcagatagaatggtgaacaagacagatgaatcttacagtaaaggtggagggagaggcagagaaataaacaaattcatcaaatcattacacactttagtaagtgctatgagatatttgcgggctgctagcccagagggtgaggtttgatgaactgcaggctaaacatagaaataaaagcaagctgcatttttttaatgacttgcttttacatgtaacttaggaaatgttttttggagagtcacatcacagcaagagtttaaaatggaattgcttactcctgagctaggacatcaacaatatccatgatctcatggaggcagatttcatctcctaagatgcctttcaaatgatgtgagtttgcctctattcgggaaataaatcaaaaagacagcccaatcgccccagcaacaggcactactggttgtctacagaacagctgttctctccttgccccatccccttttccatgtctgaggaggtctttgtgacattgtacctgagagaatggtctaaagctcattattaggcacttgtttggggagaagtggatcatgtcatctacttgaaagagatgttgggaggtccaaataaaggcatggargttgatacttgcccttcttaaattgttttccctggactaagagaatgaaatctataccataggcttatgacttctcagttcctcttaataggattcaagccacaaatcctcttctgtggcaacccagacacgtggccattttcctactctttggtaactaaggctctgcatggtgaggaaagggtaagtgatcatattttagagagacctgtaaaccctagttgccttcccctagcctccccagtctgacctcacatggt

SEQ ID NO: 24316 - DNA, 593 bp, Homo sapiens
atatttatggtattatgaggctcaaaagagtaaaaaaatctgtttaatctgtttttataacatactatgttctccatgagcatattatatatataaagcctgtcaaaatttggtactaaaaaagaatttattttgttaaaataaatgacgctagtatcaaactatgcasttttttaacttgtaatatttacagaaattcacgtaaaaagcaaagaacaataaaacccccaccaaagtattgcttgcataattgtgctcccaaaccccaccccccacaacacatacactcagaaagatgcctttatgtttgagatgccatagttttatattaagaccatagtgacatagggtgctgaagaaacattttcagaattgtcagtaagccattcacaggccttgggtgttttcagtttactgagtgtgagggaatctcagatcccagtatttctgaccacactcaacttcctgataagtaccctactttctccactgccggccatggttaagcagtacaggacagcacagcaagtgctctctataccctgacagctccagatatgtcaagaaaacaacacaccaacatggaaaagaca

SEQ ID NO: 24317 - DNA, 593 bp, Homo sapiens
atatttatggtattatgaggctcaaaagagtaaaaaaatctgtttaatctgtttttataacatactatgttctccatgagcatattatatatataaagcctgtcaaaatttggtactaaaaaagaatttattttgttaaaataaatgacgctagtatcaaactatgcacttttttaacttgyaatatttacagaaattcacgtaaaaagcaaagaacaataaaacccccaccaaagtattgcttgcataattgtgctcccaaaccccaccccccacaacacatacactcagaaagatgcctttatgtttgagatgccatagttttatattaagaccatagtgacatagggtgctgaagaaacattttcagaattgtcagtaagccattcacaggccttgggtgttttcagtttactgagtgtgagggaatctcagatcccagtatttctgaccacactcaacttcctgataagtaccctactttctccactgccggccatggttaagcagtacaggacagcacagcaagtgctctctataccctgacagctccagatatgtcaagaaaacaacacaccaacatggaaaagaca

SEQ ID NO: 24318 - DNA, 593 bp, Homo sapiens
atatttatggtattatgaggctcaaaagagtaaaaaaatctgtttaatctgtttttataacatactatgttctccatgagcatattatatatataaagcctgtcaaaatttggtactaaaaaagaatttattttgttaaaataaatgacgctagtatcaaactatgcacttttttaacttgtaatatttacagaaattcacgtaaaaagcaaagaacaataaaacccccaccaaagtattgcttgcataattgtgctcccaaaccccacmccccacaacacatacactcagaaagatgcctttatgtttgagatgccatagttttatattaagaccatagtgacatagggtgctgaagaaacattttcagaattgtcagtaagccattcacaggccttgggtgttttcagtttactgagtgtgagggaatctcagatcccagtatttctgaccacactcaacttcctgataagtaccctactttctccactgccggccatggttaagcagtacaggacagcacagcaagtgctctctataccctgacagctccagatatgtcaagaaaacaacacaccaacatggaaaagaca

SEQ ID NO: 24319 - DNA, 504 bp, Homo sapiens
tcctcttttgttcaacgttatatgatgcttaatttttaacttagggcatcgctttgaaagtgtgaacaacattttctatgcagctacattaactgcatagaagctgcatgttcactgaattcattaaattcaaactgagggtcaaattgtattcctgttctatccagggctaatccttcttgttttatatcttggaaatattatcaaaatgtactttttttctttctttattcatgatttatttttgtatgtgtttgttattaaaatgtatatatttcaaaatctcctagtatttcacaggatagtagcaatagtatgtaattttagtctttttaataataatgaatcatttaaaatagaactaagagagattattttattacattgtaaggtttcttttatgtatacgtttctaagtcaggaaaaaggctgatgtgrtggttcatgcatttatctttttgattttgttccattttatatcccaaacttttcatgatttcctat

SEQ ID NO: 24320 - DNA, 1176 bp, Homo sapiens
tgcatatttgttaagttcagctctacatgtcctgctgtaatagctatttgagcagatgacgttgctccatacktttattgttacctttaaattgtcatttttatgagtaattactgcgttccagatatattgttctaggtgtgatgatgcagtaatggacaaaactgataaacatactctgatgaatttttgattctagtagtgagaaacgtaatagacatgtagactaactttcaatggtaataagtgtcactgaatataagcaaatataactgtgaattaatggagggtttctgaaaggagatggagaaaatgtacgctttatcagatgaccagagctccaggaagacttctacatgcccaaatacagtcttgagctaagatatagaacacagagaagtcatccatgtgaaaacctagaagaagaagatcagtactgataagagcaaatagggaaaaattcactgagatcagagagtgttgggcatgtttgaataaaaagataaaaggtcagtgtgatttggctctggggacaggatgatataatttctcactgtacaaaatgtataaaaatattttttgaagaacacatttttatataatcaagagataaacattggtagcattttgccatgttaactttcagcttctgccttgatatcttatttgttagatatttagggagtccaagtgtcattttttacatggacatattacatagtgctaaagactgggtgtttggtatagccagcatccgaatagtgcacagtgtagccattaagtaattcctcatccctcacccttctcccctgcttctactcttctgagtttccactgtctattattccattctctatgaccatgtgtacctgtttttcagttcccacttataaaattaaacatgtagtattttactttttgtttttgagttattacacttaagataatggcctccagtattatccatgttgctacaaaatacatatttttaatggctaaatagtgttctattgtatatatctaccacatttttaaatctaattatcttttaatggacacagattccatatctttgctattgtgaatagtgctattagtgggattgctggattgaatagtagttctactttagttatttgagaaatctctatactgttttccatagaggttgtaata

SEQ ID NO: 24321 - DNA, 779 bp, Homo sapiens
  misc_feature (1)...(779): n = A,T,C or G
tnnnnnnnnnnnnnnnnnnnnnnnnnnnnnnnnnnnnnnnnnnnnnnnnnnnnnnnnnnnnnnnnnnnnnnnnnnnnnnnnnnnnnnnnnnnnnnnnnnnngatatttattcatttactctagatttttattacgaataccaaaaataaataggttagaatatgacctacttttttatattctagatggaatttatattcaaatgcacttttatctcttatacacttccactactgtgtgcttgttttcctttcaatcgtttattccttttacttgtctgtatcttttacgtattttacctattctaacaaggctttcatctccaagctttgaatgttctaacacacttttcccaaggcatcattacttatttttcacttctttttgtttttcttaccatattctcttttagaggaattaaagtaaaaataactttaagataaactcaagtatacatcttaagggtgaaaaataatttawgtgtctgtatttgcaaattacatgattgcttatgtacaaaatcctaaggcatctacaaaaaaactagtaaataagtaaatttagtaagaacatacaaggagagtgttcaataatctattgaatttgtttttattataagcaaactattaggaaatgaaattttaaaacatgtgtaattataccatcaaaatgaaattcaagggattaaatttaataattagtgcacaggttatctacattaacaacttcaaaatgttgctaatgaaaattaaagaataccaaaataattggattaatga

SEQ ID NO: 24322 - DNA, 779 bp, Homo sapiens
  misc_feature (1)...(779): n = A,T,C or G
tnnnnnnnnnnnnnnnnnnnnnnnnnnnnnnnnnnnnnnnnnnnnnnnnnnnnnnnnnnnnnnnnnnnnnnnnnnnnnnnnnnnnnnnnnnnnnnnnnnnngatatttattcatttactctagatttttattacgaataccaaaaataaataggttagaatatgacctacttttttatattctagatggaatttatattcaaatgcacttttatctcttatacacttccactactgtgtgcttgttttcctttcaatcgtttattccttttacttgtctgtatcttttacgtattttacctattctaacaaggctttcatctccaagctttgaatgttctaacacacttttcccaaggcatcattacttatttttcacttctttttgtttttcttaccatattctcttttagaggaattaaagtaaaaataactttaagataaactcaagtatacatcttaagggtgaaaaataatttaagtgtctgtatttgcaaattacatgattgcttatgtacaaaatcctaaggcatctacaaaaaaactagtaaataagtaaatttagtaagaacatacaaggaragtgttcaataatctattgaatttgtttttattataagcaaactattaggaaatgaaattttaaaacatgtgtaattataccatcaaaatgaaattcaagggattaaatttaataattagtgcacaggttatctacattaacaacttcaaaatgttgctaatgaaaattaaagaataccaaaataattggattaatga

SEQ ID NO: 24323 - DNA, 2531 bp, Homo sapiens
atagcagaataaagactacatttcccaacaccccttgctgataggtttggtcaagtatcaagttcttgccaatgaagtgtacgcagtaaagattggaggaatttctcagaaacttcctgaaaatttagcagacacatgcaaggcagaacatccacaaatgagagcccaaagcaggatgaaatgattggattcattgcaaatgttatattctaaataaaacacaggaatgaaatctgttttttattgttgttcttcttgttttgttttgaacttgatattggttacttgagaaactaatgccatcctgattttacaaacagcaaaacacacacagaatgatatggtataggctgggtgcggtggctcacayctgtaaacccaacactttgggaagccaagaggagcggatcacttgaggtcaagagttgacaccttctcccaaaggctttataatctaaccaggaaacactgtccatagttgtaactaaaaatcatgcgatacaaactcaatctagttctacatgattagaagatttaatcaatttaagctgaaatcattgtttagggctttattgtagatttgcagagatgaaagcaattaaaagcattcacaaataacagtaatataaatatgtaaccaactctgacatagttaaacagtgctagatcaacttagcgatgtgtaagatttagtttctaagcaatcatttaagagcaatttatcttatgttatttgttacacaccttagtatagatatgtctgcaatatgtcaataataatattacacagaaaaattcatgggaaagcaagcagtaaactgttagtctaaaatttataagtcaccaaaaggaatattttatttagaatatgaaattccagccatgtttaaatagttaacaccactgtcaaaagttttattaaaaaatactaaagatatgtgctcttgaattttaacatcattctttgaatttgtataattcatcaatcataggaatgtttatttatatagctcattaatgttcaacaaaaagcctagctcttagtaaataagatcttgaaagaaatcaacaatcatacactacccaaacatattcaaaaacaaagcaagaaaagaacaggataaacacattactgaaaggaagtgtacaatgtatattaaaaacttgatctttttcctagattatatttccatggaagtgaggttagattccaaatgtgaaacatggcatggattttatattttaacaaacacatatacatgcatatatatacatccattatatatacatataaggattcatatacacaaacaaattcatttaattctgaagagaaggctttgagatcgttgttcccattctgtaaattagaaagtctaaacataggttaaactgtggcattacctgcccagaatagaagcaggatataactttggcagcttgactccatccagtgacctagcaagtacctaatatggtacaatttacaatgtcgaggcatagtaaaatgtctcttaatccctataacaataaaatattgctcctatataaaataatgattgtaagactaaaagtaaacaaagcatgttatttgcgaagcagctctagtatagagggaatataagcttttgatatagaataagacgatctttatttaaaatctaattttacaacttattaacattgtggcatcagtgtgatttactgaagaacaaaacctagcattttgtgagagtttgccacttgtgaaattccagtttaagatttgtatctgtcatattatgtaatcctcattaaaaaaaaatctgaggttgataatattgttattttctttttatccatgggaaaactgagagttagagaaaaaaagaactttcaaggtcaccctagggagtggcgggggcaagatttagaccttgctcagagactcatttctctcatatgttaaatgaggatcagagtctccaaatttatgattattatgaagatcaatcgatagacttaagatactgcattctaaatacataatgtggcatgagagatcttgcaagttaaaagctctgcaaaggaacctatattcttgcctgccgccagttctgcataattgcttattccttgaattggaaacagaaatgaagtgctcattatccaagagtgtagagaaaggccctgggatggcagggctactttttacaagacattgttgcaggacctccctggcctttctctggatttactggaaatcaagttgaggactagccaaactgttgagaaattaaccaactgaaaaagcacattcttctctatttcaagttatgtctgtatttagagagctgcactttagtcaaagaaatattgtgcatgagagcaactaggctccaggtaattcgtagtacttgctcaaagtaacacagaatactaacacattgttagaacatcctgactaaggcatcaacagcctgagtttcacaagataatcaactttgggtatattaaaatataataatatatgtgtatgtatacatttatat

SEQ ID NO: 24324 - DNA, 2531 bp, Homo sapiens
atagcagaataaagactacatttcccaacaccccttgctgataggtttggtcaagtatcaagttcttgccaatgaagtgtacgcagtaaagattggaggaatttctcagaaacttcctgaaaatttagcagacacatgcaaggcagaacatccacaaatgagagcccaaagcaggatgaaatgattggattcattgcaaatgttatattctaaataaaacacaggaatgaaatctgttttttattgttgttcttcttgttttgttttgaacttgatattggttacttgagaaactaatgccatcctgattttacaaacagcaaaacacacacagaatgatatggtataggctgggtgcggtggctcacatctgtaaacccaacactttgggaagccaagaggagcggatcacttgaggtcaagagttgacaccttctcccaaaggctttataatctaaccaggaaacactgtccatagttgtaactaaaaatcatgcgatacaaactcaatctagttctacatgattagaagatttaatcaatttaagctgaaatcattgtttagggctttattgtagatttgcagagatgaaagcaattaaaagcattcacaaataacagtaatataaatatgtaaccaactctgacatagttaaacagtgctagatcaacttagcgatgtgtaagatttagtttctaagcaatcatttaagagcaatttatcttatgttatttgttacacaccttagtatagatatgtctgcaatatgtcaataataatattacacagaaaaattcatgggaaagcaagcagtaaactgttagtctaaaatttataagtcaccaaaaggmatattttatttagaatatgaaattccagccatgtttaaatagttaacaccactgtcaaaagttttattaaaaaatactaaagatatgtgctcttgaattttaacatcattctttgaatttgtataattcatcaatcataggaatgtttatttatatagctcattaatgttcaacaaaaagcctagctcttagtaaataagatcttgaaagaaatcaacaatcatacactacccaaacatattcaaaaacaaagcaagaaaagaacaggataaacacattactgaaaggaagtgtacaatgtatattaaaaacttgatctttttcctagattatatttccatggaagtgaggttagattccaaatgtgaaacatggcatggattttatattttaacaaacacatatacatgcatatatatacatccattatatatacatataaggattcatatacacaaacaaattcatttaattctgaagagaaggctttgagatcgttgttcccattctgtaaattagaaagtctaaacataggttaaactgtggcattacctgcccagaatagaagcaggatataactttggcagcttgactccatccagtgacctagcaagtacctaatatggtacaatttacaatgtcgaggcatagtaaaatgtctcttaatccctataacaataaaatattgctcctatataaaataatgattgtaagactaaaagtaaacaaagcatgttatttgcgaagcagctctagtatagagggaatataagcttttgatatagaataagacgatctttatttaaaatctaattttacaacttattaacattgtggcatcagtgtgatttactgaagaacaaaacctagcattttgtgagagtttgccacttgtgaaattccagtttaagatttgtatctgtcatattatgtaatcctcattaaaaaaaaatctgaggttgataatattgttattttctttttatccatgggaaaactgagagttagagaaaaaaagaactttcaaggtcaccctagggagtggcgggggcaagatttagaccttgctcagagactcatttctctcatatgttaaatgaggatcagagtctccaaatttatgattattatgaagatcaatcgatagacttaagatactgcattctaaatacataatgtggcatgagagatcttgcaagttaaaagctctgcaaaggaacctatattcttgcctgccgccagttctgcataattgcttattccttgaattggaaacagaaatgaagtgctcattatccaagagtgtagagaaaggccctgggatggcagggctactttttacaagacattgttgcaggacctccctggcctttctctggatttactggaaatcaagttgaggactagccaaactgttgagaaattaaccaactgaaaaagcacattcttctctatttcaagttatgtctgtatttagagagctgcactttagtcaaagaaatattgtgcatgagagcaactaggctccaggtaattcgtagtacttgctcaaagtaacacagaatactaacacattgttagaacatcctgactaaggcatcaacagcctgagtttcacaagataatcaactttgggtatattaaaatataataatatatgtgtatgtatacatttatat

SEQ ID NO: 24325 - DNA, 2531 bp, Homo sapiens
atagcagaataaagactacatttcccaacaccccttgctgataggtttggtcaagtatcaagttcttgccaatgaagtgtacgcagtaaagattggaggaatttctcagaaacttcctgaaaatttagcagacacatgcaaggcagaacatccacaaatgagagcccaaagcaggatgaaatgattggattcattgcaaatgttatattctaaataaaacacaggaatgaaatctgttttttattgttgttcttcttgttttgttttgaacttgatattggttacttgagaaactaatgccatcctgattttacaaacagcaaaacacacacagaatgatatggtataggctgggtgcggtggctcacatctgtaaacccaacactttgggaagccaagaggagcggatcacttgaggtcaagagttgacaccttctcccaaaggctttataatctaaccaggaaacactgtccatagttgtaactaaaaatcatgcgatacaaactcaatctagttctacatgattagaagatttaatcaatttaagctgaaatcattgtttagggctttattgtagatttgcagagatgaaagcaattaaaagcattcacaaataacagtaatataaatatgtaaccaactctgacatagttaaacagtgctagatcaacttagcgatgtgtaagatttagtttctaagcaatcatttaagagcaatttatcttatgttatttgttacacaccttagtatagatatgtctgcaatatgtcaataataatattacacagaaaaattcatgggaaagcaagcagtaaactgttagtctaaaatttataagtcaccaaaaggaatattttatttagaatatgaaattccagccatgtttaaatagttaacaccactgtcaaaagttttattaaaaaatactaaagatatgtgctcttgaattttaacatcattctttgaatttgtataattcatcaatcataggaatgtttatttatatagctcattaatgttcaacaaaaagcctagctcttagtaaataagatcttgaaagaaatcaacaatcatacactacccaaacatattcaaaaacaaagcaagaaaagaacaggataaacacattactgaaaggaagtgtacaatgtatattaaaaacttgatctttttcctagattatatttccatggaagtgaggttagattccaaatgtgaaacatggcatggattttatattttaacaaacacatatacatgcatatatatacatccattatatatacatataaggattcatatacacaaacaaattcatttaattctgaagagaaggctttgagatcgttgttcccattctgtaaattagaaagtctaaacataggttaaactgtggcattacctgcccagaatagaagcaggatataactttggcagcttgactccatccagtgacctagcaagtacctaatatrgtacaatttacaatgtcgaggcatagtaaaatgtctcttaatccctataacaataaaatattgctcctatataaaataatgattgtaagactaaaagtaaacaaagcatgttatttgcgaagcagctctagtatagagggaatataagcttttgatatagaataagacgatctttatttaaaatctaattttacaacttattaacattgtggcatcagtgtgatttactgaagaacaaaacctagcattttgtgagagtttgccacttgtgaaattccagtttaagatttgtatctgtcatattatgtaatcctcattaaaaaaaaatctgaggttgataatattgttattttctttttatccatgggaaaactgagagttagagaaaaaaagaactttcaaggtcaccctagggagtggcgggggcaagatttagaccttgctcagagactcatttctctcatatgttaaatgaggatcagagtctccaaatttatgattattatgaagatcaatcgatagacttaagatactgcattctaaatacataatgtggcatgagagatcttgcaagttaaaagctctgcaaaggaacctatattcttgcctgccgccagttctgcataattgcttattccttgaattggaaacagaaatgaagtgctcattatccaagagtgtagagaaaggccctgggatggcagggctactttttacaagacattgttgcaggacctccctggcctttctctggatttactggaaatcaagttgaggactagccaaactgttgagaaattaaccaactgaaaaagcacattcttctctatttcaagttatgtctgtatttagagagctgcactttagtcaaagaaatattgtgcatgagagcaactaggctccaggtaattcgtagtacttgctcaaagtaacacagaatactaacacattgttagaacatcctgactaaggcatcaacagcctgagtttcacaagataatcaactttgggtatattaaaatataataatatatgtgtatgtatacatttatat

SEQ ID NO: 24326 - DNA, 2531 bp, Homo sapiens
atagcagaataaagactacatttcccaacaccccttgctgataggtttggtcaagtatcaagttcttgccaatgaagtgtacgcagtaaagattggaggaatttctcagaaacttcctgaaaatttagcagacacatgcaaggcagaacatccacaaatgagagcccaaagcaggatgaaatgattggattcattgcaaatgttatattctaaataaaacacaggaatgaaatctgttttttattgttgttcttcttgttttgttttgaacttgatattggttacttgagaaactaatgccatcctgattttacaaacagcaaaacacacacagaatgatatggtataggctgggtgcggtggctcacatctgtaaacccaacactttgggaagccaagaggagcggatcacttgaggtcaagagttgacaccttctcccaaaggctttataatctaaccaggaaacactgtccatagttgtaactaaaaatcatgcgatacaaactcaatctagttctacatgattagaagatttaatcaatttaagctgaaatcattgtttagggctttattgtagatttgcagagatgaaagcaattaaaagcattcacaaataacagtaatataaatatgtaaccaactctgacatagttaaacagtgctagatcaacttagcgatgtgtaagatttagtttctaagcaatcatttaagagcaatttatcttatgttatttgttacacaccttagtatagatatgtctgcaatatgtcaataataatattacacagaaaaattcatgggaaagcaagcagtaaactgttagtctaaaatttataagtcaccaaaaggaatattttatttagaatatgaaattccagccatgtttaaatagttaacaccactgtcaaaagttttattaaaaaatactaaagatatgtgctcttgaattttaacatcattctttgaatttgtataattcatcaatcataggaatgtttatttatatagctcattaatgttcaacaaaaagcctagctcttagtaaataagatcttgaaagaaatcaacaatcatacactacccaaacatattcaaaaacaaagcaagaaaagaacaggataaacacattactgaaaggaagtgtacaatgtatattaaaaacttgatctttttcctagattatatttccatggaagtgaggttagattccaaatgtgaaacatggcatggattttatattttaacaaacacatatacatgcatatatatacatccattatatatacatataaggattcatatacacaaacaaattcatttaattctgaagagaaggctttgagatcgttgttcccattctgtaaattagaaagtctaaacataggttaaactgtggcattacctgcccagaatagaagcaggatataactttggcagcttgactccatccagtgacctagcaagtacctaatatggtacaatttacaatgtcgaggcatagtaaaatgtctcttaatccctataacaataaaatattgctcctatataaaataatgattgtaagactaaaagtaaacaaagcatgttatttgcgaagcagctctagtatagagggaatataagcttttgatatagaataagacgatctttatttaaaatctaattttacaacttattaacattgtggcatcagtgtgatttactgaagaacaaaacctagcattttgtgagaktttgccacttgtgaaattccagtttaagatttgtatctgtcatattatgtaatcctcattaaaaaaaaatctgaggttgataatattgttattttctttttatccatgggaaaactgagagttagagaaaaaaagaactttcaaggtcaccctagggagtggcgggggcaagatttagaccttgctcagagactcatttctctcatatgttaaatgaggatcagagtctccaaatttatgattattatgaagatcaatcgatagacttaagatactgcattctaaatacataatgtggcatgagagatcttgcaagttaaaagctctgcaaaggaacctatattcttgcctgccgccagttctgcataattgcttattccttgaattggaaacagaaatgaagtgctcattatccaagagtgtagagaaaggccctgggatggcagggctactttttacaagacattgttgcaggacctccctggcctttctctggatttactggaaatcaagttgaggactagccaaactgttgagaaattaaccaactgaaaaagcacattcttctctatttcaagttatgtctgtatttagagagctgcactttagtcaaagaaatattgtgcatgagagcaactaggctccaggtaattcgtagtacttgctcaaagtaacacagaatactaacacattgttagaacatcctgactaaggcatcaacagcctgagtttcacaagataatcaactttgggtatattaaaatataataatatatgtgtatgtatacatttatat

SEQ ID NO: 24327 - DNA, 875 bp, Homo sapiens
atcctgcttttgtatccagttggatacattgtgttctttccttggaatgtaaattagaacaatatggaagtaattttatttaaaaaatttcctttaattattgatgtgacttttgttagtatcatcagtttcttgtttctctcttattccttttgtgacccttttgttttctgtggcttttgggtatttggttcttctattgaatttttctttctgttcctgatgttatttttagtgctttctcaatagagtcattatgcatctttacattatcaatatataccttcacatgttatattacttcacaaaaatctttcatcagcataattcctccctcatattgtattttgaaatataaaattttctttttatatttctgcatctgcattatatatgttttcttacacaccttctataatttttattgttttctcattagcctgcttttctagtgctgttttctttatgatctaaaagttattaggagagtaggatttcagtttggttttggtttttgttgttcattgtttccttttagcttgaatttattgtggacagagaaggtaacmatattacttactttgggaattatatacatatttttaattgactatccacattttgtaaatgttctatgaaggcttgagaaaatgtgaatatttattttaggtacaatatgttcatctgtgcctttcaagtatattaaatttatgagaaccctatagtggcttacgtatcttaagtcaacagtactaattttaatgaaaaaaaaactattctccttaatttctatattgattccaatttttgttaaattattatcaaatattagtaaatagacatatccatagagaagtaaaacactattttaaaat

SEQ ID NO: 24328 - DNA, 1171 bp, Homo sapiens
acactcactaaaaatcataccttaaaaaaatatttgccaacatgaaaaaatttttaggttgaaatagaaacagaattttcaaaagaacaagccacaaaccagcatttgcacatgtttctagattttacaatcccatccacgtgtatatacatacattactgctacatcatgttagcaacatctttagctagtgagaatatgtttacaaatttcgttgtattcgatttttcattgcacaggtactattgcagtggaggaaggtggcctgaagccaaagtatgaagtcagaagcatggtcttctgagcagtgccctccttttcattcctggccttgcttcctgaacctggttaacagtttttctaacaaaaatagctctagcytcagtacccgccatgccatagctccctgctcaattccccgctatcttgtgctttgaacaggattcactaacactcaatggtatagcaggtcggatgtgagtaggaagcccagctttatgacctttggctaactatttcatctcactgaaacttagtgcccccttctagaaaatagaaacctaatgtctgtcttataaggttgctgtgagaattgaataagaacatgtgtataatgagcttggtcatataccagataaactaatattaactcgctgtaactcatgattaaatatcaggttaacatctactgagttcatcttaccacgtatcatcccactaactccagagggtgagaatttattccctgcttaatgcaaagtttccccatgaccagagattctggttctctgagggtgattggggctactgaaaaccataagaacaagcttgtgactggtggtattttaccctgctattctcttctctcatccagaagtgtctttagagcacagggaggggaggtgggaacatacagctgggttctgaactcactcctaccagcatccatcagggagctcaggctgacctttgcaatgtctttaagacacagggattaaggcataggtgacccatgaagcttaggtaactagtcaaggaaaggggagaggatgaaagaagcataggaaggaatatttttggggtggtgagtttgtagtgtccttcgagttaaattgcacattccacagaagcagatacctagtcacttaatgatcaaatcatttaggatgca

SEQ ID NO: 24329 - DNA, 659 bp, Homo sapiens
cacaaatattttatattgatattgaacatctgaatgattaacattcatggtagaaaagccttcattgcccagtcctgagttatgaaatgatcagattagttatttgcaactttagacaatgtcactcaaaggaaaataaatacgcagaaagctatcagcacaaatggaagctaggccataacaaatcaggatgaagggaagagggttttccttccctttatttcctccctgaaatcctttacccttctatctactagtaatatgattattcctaggaacgccacacacacgcacacacacttcagtatgtgcacacatacaactgcttctaaaagagaggaactttttttttttagacagagtcttgctctgttgacaggctggagggcagtgacatgatctctgctcactgcaacctctgcctcccsggttcaagcgattctcctgccttagcctcctgagtagctgggattacaggtgcccgccaccacacccagctaattttgtgtatttttagtagaagcaaggttttgccatgttgcccaggctggttttgaactcccaagctcaggcagtccgcccacctcagactcccaaagtgctgggattacaggcatgagccaccatgcctggcctaaaagagaggatcttttaaggag

SEQ ID NO: 24330 - DNA, 651 bp, Homo sapiens
tcaattcaaataagcttgggggaaaaaaaaagatgtgaattggctctggtgattacaaagagaaccagttagaaacttctttgagcctgcaaggacctcacacctcacatcacattatcgggagttgatttgtcttcttttcttgcttcagttttcttctgtggtgtctccctttcaggtagaacatacctacaacttacagtgaccctagcaggcaaagccttaatttttacaagattcaagtctagtaggaaaaataaaaggcatattttattttcatatggttcaagatggacccagcctttgcagtctcaaygggattgatcacaggagcatccttgaacatccagcatgaccaaaggatgacaatgctggccaggtggggtcccctgctgcagccggcagctccaactgagaatcaggtgtgttgagactggggcaggagttggttctctagaggaaaacaggtcagtgtgtgttatcagaagaaagagaatggatatcgggtggcaaacatttatatatctgttgtcaaatagatatcaatatctgtctttcagtgcacaatctccaacaaaataggtattagcataaaaaaaatctatgctgaattaacagcaacaatatctttgaggcacatggcagaaatat

SEQ ID NO: 24331 - DNA, 2021 bp, Homo sapiens
ccaatttatagccagtcattcagaagcacaggtaaaacaacctgggccttgagattggcatcagaagtgggagcagtcttggggactgatttcccaacctgtgggatctgaggctatctccagatagacggagtcagaattgaactgaaggacacccagctggtgtctactgcaaaactgattgcttgctttatggttgggggtaatccccaaacatttggccacagaagttttctgtgttgattgtcatggtgtgaaagcaaattaaaaatagagtttgtttttttttctcttagccactgactcattatgagcccacctggaaacaccctccccttcctgcactgctttctgctgtgctcagccaagcaaagcatcccctacatagaccacagggtataaataatactccatctcttgtggtatcacagccaggtccagtgtctggctcctgggaagaccatgggccagagaagtcaggagaaaacacatcccaactcagaagggctccagagtggatttcaggttccctttattgactccaaagaaaaatcctgtccaaatagggccacatggcatgcagcactagccacagatttcctcctttggaactctccaaaggtaagaggaggaaacagctttaaaaatgcaacccgaagcttcttacctctgccttatggatctagatcctttcccactattgcacagtgctatgccatctgcaattccaaccattctaaaccaactgcttattgtacttcttagagtagtaaactttgataggcctttgtttcacaacaattgtttctgaaacttctttttagtccacatctatggggtctgtgataccagtacagtggatgactttatagtctacgaaaaatggatccctggaaacctcttttcaaggagtaagattttgccactgatttcagaagaatatctgtgagtcatccatttgattatctgaacagatgctgctgacttttggcatcgtagcagaaggcatgagtccccaaggtgtgctgtaatcaggcagcatgtgcggcaggtcagcccagggaacagtaattctcaaccacagacatgtatcaaaaggggaagcagtaatggagctgttgccctgccgactggtagctcgttccagggcagaactttaattagtggctcccttaacagccaggcctgctctgtgtatatccataaaaagccatctgagcaccaaagtggcctctcccactcattaatggtcacctttctgcctgaaccacaacgatcctgctgacccttgatttcaggtggaagtggcttttattccctctaaccctcaaagatggtttcaaagcatttccttcactggcccaagcccagaattcaagttaaatggctttgccaaaggtgtgaactaaatgaaggaaagttcttctccttgggctcaggcaatctgcagtcagcgggaggagtgagtgcatgagcaggagtggggagccctttgtgttttctgcagacactgctgcagctgctgtgcctggaacacacagtccccaggaggccctccttccccagggcagccacactgtctcctcacctgtaaaggtgaggtgtggcagcagtctgccagttctctccactgccacctgtaaagctggctcaccttggcatcccaagcagttctccccatagagcaaatatgcaaggttcccttgctggatctgcgttccattaaggccttcttggtttcctggtcaggtctgcagtcatcctaacttcgtttatgttttattccacacagtctcttttccactttcaaaccataagcagctggcaccctcagttgcagcagatgaccttgtctcatccttctgtgagcacacctgagctccttacctctcttctatttcatttgcaaatgggtgccctgaggtgcctctcctcccggrgcatggtcccttgtgttttcctcccaggcaaacctgctccttgactcttcttcctcagggtctggtataatatccatcaag

SEQ ID NO: 24332 - DNA, 691 bp, Homo sapiens
tgataggtttttttaagacaatagacacatgaccccaattaagcaaattggctcctgaactaggtacaaacgattcaaagcagatccattcaatatactgtaccatcacaaactgaattctaacattgtctttttaagagagaagctggtggctaggcatcatccagtactttttgttttctgcacctgctatgcttacacaaggcctgattgcttatattttctttttgatgacaggcatttggttcttctaaagcaattaacaacaggcttgaaaaaaaggccaaattagtgtctgaattaaataaaatctagcatttctgtaacactttacaacttacaaagatccaaacaaatgttagaacatgagatgtttgtcactggattatatgaactatttgtcaatagattataattcctatggtaatgttttcattcataaaagtaattatttcctttarttattctgtactgtaggaattataatccattatatgctcacgtttaaaaaattattttgaaatgtgattatactaaattgtgtaaagagatcttcctcattcaaattcacagaagaaagaaagataatttatataactaaactcaattgcaatcaatccaacaataactcccagggttttttatttgttgatcattatcaccaattttgatagccactggataaacaaaa

SEQ ID NO: 24333 - DNA, 1262 bp, Homo sapiens
ttaaatcacataatcttcacacctatctgtttgaagtggacatgactgactccattttgtaaatgctgaaaactaaagcaccaaatttgtcccctaataacacaggtaataaatgatggaatcgggtggaaattcaggcaaatttgttttcaaagactatccccttcaatcatgtcattgccactctgaaagtgattaaatgcaggcaggaactgtaaatgaactttttagtgaaatgaaggccctgaatttgtgcaagaaaataaaagcaaaggtgagggaaagagaggtaaaataggagggtggagatgagagcttgacaggcatggaacattaaatgatgctgcttctcaactctactgtctggaaaagaggcctcttaggagacacagggtattagtacaatatcttatcttagaatgcttgccacccttcctacacaatagagctcccacccctgattgggaaagacctgggatatccaggggtgaaaggtggagcacttcccacttcacagctcatgccagggctgatctaagggaagccaggcctggggaaaattatgagttccaagacccaacaaatgaatgaggaaggggagccagcctctgcagcagaaccccaattgctccagcagggagattccaggccacacgtgtggctcctgaataccgttggcctaacttcctctggagctctgtggggtcttttggttctgggaaagaaaaggtacaactaaagaccctgcatcattgtagcccaaagagttctgctatgaactgcttccctcaagaagctggacatgtagagggaagagccatttctgaaggctggaaaagagccacarcaggagagaagaaggaggatggctcaatctcagagccttgttaggtggataaattttacccagtgaatttgaaatcaactgtagtaatgactttgccagttcccatggcagttggatctgtgagacgtgcaagcatccctgaaaattttgaaattattttggtagaaaatgtttggaacataagaagggacttcctgctaatcaagactttaaaatataaactctatttttgcctatggaagtaactctgtctttaagagcataggtctccttaatttttgtcctgtggttctctaacctatgtaatctgtagattgatttcttttcttttgatgggtttttccaaagcaaagaaatatgtccagtcacctgtcacctaacaatattgattagtaaaacagaaaatcttcatgca

SEQ ID NO: 24334 - DNA, 1262 bp, Homo sapiens
ttaaatcacataatcttcacacctatctgtttgaagtggacatgactgactccattttgtaaatgctgaaaactaaagcaccaaatttgtcccctaataacacaggtaataaatgatggaatcgggtggaaattcaggcaaatttgttttcaaagactatccccttcaatcatgtcattgccactctgaaagtgattaaatgcaggcaggaactgtaaatgaactttttagtgaaatgaaggccctgaatttgtgcaagaaaataaaagcaaaggtgagggaaagagaggtaaaataggagggtggagatgagagcttgacaggcatggaacattaaatgatgctgcttctcaactctactgtctggaaaagaggcctcttaggagacacagggtattagtacaatatcttatcttagaatgcttgccacccttcctacacaatagagctcccacccctgattgggaaagacctgggatatccaggggtgaaaggtggagcacttcccacttcacagctcatgccagggctgatctaagggaagccaggcctggggaaaattatgagttccaagacccaacaaatgaatgaggaaggggagccagcctctgcagcagaaccccaattgctccagcagggagattccaggccacacgtgtggctcctgaataccgttggcctaacttcctctggagctctgtggggtcttttggttctgggaaagaaaaggtacaactaaagaccctgcatcattgtagcccaaagagttctgctatgaactgcttccctcaagaagctggacatgtagagggaagagccatttctgaaggctggaaaagagccacaacaggagagaagaaggaggatggctcartctcagagccttgttaggtggataaattttacccagtgaatttgaaatcaactgtagtaatgactttgccagttcccatggcagttggatctgtgagacgtgcaagcatccctgaaaattttgaaattattttggtagaaaatgtttggaacataagaagggacttcctgctaatcaagactttaaaatataaactctatttttgcctatggaagtaactctgtctttaagagcataggtctccttaatttttgtcctgtggttctctaacctatgtaatctgtagattgatttcttttcttttgatgggtttttccaaagcaaagaaatatgtccagtcacctgtcacctaacaatattgattagtaaaacagaaaatcttcatgca

SEQ ID NO: 24335 - DNA, 869 bp, Homo sapiens
ttaatttctgccatttgatttttttctttctcatttccatgatgcctccactttataacttccctctctcctcagaggtgatgcctttccaagactgtttctctactcttgcatatgcaagctcctatcctttgatttcctagcagacaattctgattcacaatgactcagtgttttccccaatcactgtggaactctctgagtgtgactttagctcaccactgctagatctttgctgcattctcatctttattgtgtagtttccttctaaatttttgctttggaatgggctcctgagctggctctgctgcttttgagtttctggtataacaaatttcaaatggaaatggaaatttgtaatattatattttctcctaatggaattgtaaatgtaagtgactattaatgctccttgttgattttgtaggacatgtggggggatttatatttcagtaacttttttttcttttcttttcttttctttttttttttttttttttgagacagtcttgctctgtcaccaggctggagtgcagtgccacgatcttggctcactgcaatctccacctcccgggttcaagcgattctcctgcctcagcctcccaagtagctgagattataggcgccaccacacccagctgagtttacaggcgccacacagatagtttttgtatttttagtagagacgagtttcaccattttggccaggatggtctcgatctcctgacctcgtgatccgccctcctaggcctcccaaagtgctgggaaaacaggtgtgagccactgtgctcagcctacttatttcttaaacatcttatyttgaaataattacacagattttcacaaaggtataaagaaacatacaaggg

SEQ ID NO: 24336 - DNA, 582 bp, Homo sapiens
tggctgatattatttaataacacgtgcacttctcacttcagtagagaacatttggtacctcttcgcaaggaaattctattctcttatagctcttcctaaacaggttataaatatttgtgatattcctttttgaattagtctaattctttgtaatacattgagtttctgtgttttgcagagcctttgaagactaacttaaacgayagggatttgaggaattataaattaactgtgttgtaatatttccttctacttatgtgttaagtactttgcgaaaataagtactttctaggctgggcatggtggctcacgcctgtaatcccagcagtttgggaggccaaggtgggcagatcatgaggtcaggagatcaaggctatcctggctaacacggtgaaaccccgttgctactaaaaatgcaaaaaattagctgggcatggttgtgcgtgtctgtaatcccagcaactcgggaggctgaggcaggagaatcgctggaacccgggaggcagaggttgcagtgagccgagatcatgccactgcactccagcctgggtggcagagcgagaccctgtcaaaaaaaaaaaa

SEQ ID NO: 24337 - DNA, 582 bp, Homo sapiens
tggctgatattatttaataacacgtgcacttctcacttcagtagagaacatttggtacctcttcgcaaggaaattctattctcttatagctcttcctaaacaggttataaatatttgtgatattcctttttgaattagtctaattctttgtaatacattgagtttctgtgttttgcagagcctttgaagactaacttaaacgatagggatttgaggaattataaattaactgtgttgtaatatttccttctacttatgtgttaagtactttgcgaaaataagtactttctaggctgggcayggtggctcacgcctgtaatcccagcagtttgggaggccaaggtgggcagatcatgaggtcaggagatcaaggctatcctggctaacacggtgaaaccccgttgctactaaaaatgcaaaaaattagctgggcatggttgtgcgtgtctgtaatcccagcaactcgggaggctgaggcaggagaatcgctggaacccgggaggcagaggttgcagtgagccgagatcatgccactgcactccagcctgggtggcagagcgagaccctgtcaaaaaaaaaaaa

SEQ ID NO: 24338 - DNA, 582 bp, Homo sapiens
tggctgatattatttaataacacgtgcacttctcacttcagtagagaacatttggtacctcttcgcaaggaaattctattctcttatagctcttcctaaacaggttataaatatttgtgatattcctttttgaattagtctaattctttgtaatacattgagtttctgtgttttgcagagcctttgaagactaacttaaacgatagggatttgaggaattataaattaactgtgttgtaatatttccttctacttatgtgttaagtactttgcgaaaataagtactttctaggctgggcatggtggctcacgcctgtaatcccagcagtttgggaggccaaggtgggcagatcatgaggtcaggagatcaaggctatcctggctaacacggtgaaaccccgttrctactaaaaatgcaaaaaattagctgggcatggttgtgcgtgtctgtaatcccagcaactcgggaggctgaggcaggagaatcgctggaacccgggaggcagaggttgcagtgagccgagatcatgccactgcactccagcctgggtggcagagcgagaccctgtcaaaaaaaaaaaa

SEQ ID NO: 24339 - DNA, 582 bp, Homo sapiens
tggctgatattatttaataacacgtgcacttctcacttcagtagagaacatttggtacctcttcgcaaggaaattctattctcttatagctcttcctaaacaggttataaatatttgtgatattcctttttgaattagtctaattctttgtaatacattgagtttctgtgttttgcagagcctttgaagactaacttaaacgatagggatttgaggaattataaattaactgtgttgtaatatttccttctacttatgtgttaagtactttgcgaaaataagtactttctaggctgggcatggtggctcacgcctgtaatcccagcagtttgggaggccaaggtgggcagatcatgaggtcaggagatcaaggctatcctggctaacacggtgaaaccccgttgctactaaaartgcaaaaaattagctgggcatggttgtgcgtgtctgtaatcccagcaactcgggaggctgaggcaggagaatcgctggaacccgggaggcagaggttgcagtgagccgagatcatgccactgcactccagcctgggtggcagagcgagaccctgtcaaaaaaaaaaaa

SEQ ID NO: 24340 - DNA, 1572 bp, Homo sapiens
  misc_feature (1)...(1572): n = A,T,C or G
ggatgactgcttttctcagcagagtaccaaacactcttgctataaggtgaggtggtgaggtctggagtttgaggaatgacacgaaaatctcaaagagctgtgagggaaacaggactagaactggaaatgatcgctctgcagaacggagggccctgctggggtgagcccaagaacgtgtagcaagttcacagtgtcacctgcagcagcagcactggtgcacgggtggggaaatcgggtgtttggactgacgggggactggagttttgctgagcaaagcgggtaagggagtgcaaaaacagtggcaasagtacgattgacgtgatggaccctggagttcaggctgcaaacaaagcctggagagagtagaagcaacctgattgattgggcctggaggttttccgcagccaaagattatggcaagtaaaaggaggcacgtgaaactagttcagaaaaaaacatcagagagcaggggatgggcagggtttttatttcctagccccatggtatagaataaaatacatgctatagaatagcaacttattttatgtcctcacgacagcgttacagaaaaggtaaaatgaggagtgggcaaaaaaagcctgaccccttttcatggatatctgggttgtgttaggcccagcacatattaactttatttatgtttcacaacagtcttatgaagcataatcatgccctcattttataaagggtaaactatagctcagagaagttggataattaactccaaagtcaaggtaagttccacagcacccagctggcaatgaactcagaggcaggtgattggtactgcagccagctgtgggaactagagaaaggcatttatttttctgacgctcaatttcctaaaagttgagtggctggattgggtaatctttaaaacacttccagaattaacgccctgtgcttctaactaacagtgtctatgagcatcatttttctcatttgtcagaaagaagtaaccaaatctcccttacccacctcagagagctgtgatgaataccaaatacgataatgcatgtaaaagtgatttattaaatcaacgtatgctatatgatcaagagattaaaatatttagaaatacagggggaaagttacagtcatgacgaagaaatatagcgagactgagattcaaataatatccagagaacacctcttccagtcactagctagagacctcgggcaggttagctgaccttgtgtgcctcagtttccttatctgtaaaatgaggattagaaagtggactacttcaaaagttgttgtgagaattaagtgagttggtttatgaaaagtatcttttaaaagcccttggcgtaacgcgtgtgctaagaacactattattgttattactacactgaaaacacaaacttctcaagattagaaaaaaaaatccaaaggaaaacctttagatgctggaatgagaataaaactgagatttgaaaaaataatatnnnnnnnnnnnnnnnnnnnnnnnnnnnnnnnnnnnnnnnnnnnnnnnnnnnnnnnnnnnnnnnnnnnnnnnnnnnnnnnnnnnnnnnnnnnnnnnnnnnncc

SEQ ID NO: 24341 - DNA, 1208 bp, Homo sapiens
atgtagccccagctacccgggaggctgaggtgggaggattccttaagcctaggaattccagactgcagtgaactatgattacaccaccgcactccaatttggatgacagagaaagaccccacttctaaaacaacaacggcaacagaaaacaacctcatagaaatgtattactagttatagattttggtatatttatatctaaatatatgtttagatataaaaatgtttagatataaaaatatwttttatatatgtacacatgcacaaccatctggcaatatctataacccattcacatttctccagaaaactatactctaatgcccagatcaaaggggtcagataatacaagggcttaaagaacagtttaagaatgttgaacttcatcttaatgacagtgaaaagccactaaaaggttaaaaagtagttgtgtaagatgactgaatatgagtttggggaatattattgtggctatatggagattgtatggaaggagcacatatatagttataaaagctgtaggaagcccagttaagaggccatcacaagatgccaggaaagaaagatgtgtccctagcggaaggcagctcctgcagagttgaacagacttgaagagaattcagagcaattcagctgcaccccagcctctctgtgctctctgattgcatagagatcattgcttgtgcaattggttaaatcggagaccatcttctcaagctgctttcttccatattacagaaggactggccgagaaattattctccctcttcctctgagaccgttttcagtgaactatagggcagcaactaaagattaagtcagaaacgcatgtctcccattacaacttcatataccagataggatccagtgacataggtcataaatggtaaagaaaaaagcctttaagtctcataaaacactttatattcaaggagtaatatatgttaaatttccttaacttctgagacttcttgcctaaaaaatgaagatcccatacttcataagatactgtattaaatgaaaaaaaaataaatggaatatagcacctggcacaaagtaggtgctaaataagtactaattcccttctttccacttcaaccccttcttagttaacagacaggaagtaacagatgtcttaaaaatatatattgttaatccctaaatatattattaatggcccagaatagagattctaaaaactgcaatcc

SEQ ID NO: 24342 - DNA, 1995 bp, Homo sapiens
gtgaagtaattgcacgtgtcataggtgaaaaaatgtttcattttttttctctgagacactttaaaaaaattattgaatgtatgctttggaagaaatgtgagtgtaaatattatgcaatccaatgtatgacattctggcaatactactttaaacaatacatctaacaatagtagcaacagtttgtcttatttctactgaacataatatgactaatgacattactgctatgttttggggtttcttatgctttcaggatagattattttagatattctcacacgaccttgctattcctggtctctcatgaaaaattaaaacatttttatgttttatgttttatgacttaaaaccattcttacctctttcatttcgtcttggtgcacaagttcagggttacataaaatttgtttcattaggaaattgtagagcagattgaggttaccaataaaatgtcttagaaagttattgccaaggaactgaattcattttgttggttgctctctgtttttatagtctttgcttttgttcctcgacacaaacatacacacacacacacgcacaaacacacacttacttataattcctgagcaatttataaaccaagccacctttaagcctcagaagcaaatcagatccatgaggctgtgtgccaaggcaactgtgcgtcagaatgtaacacaacatggagcttcatagttgaccgtggtcaaagaactttaactcccaaagctctcagcctttgttttgcctcagtgtttatccatgtattcatttacaaaactttttattaagagccaatgtgaacaagaaggaaattctttctttcttttattattatttttttttgagacagtgtcttgctctatcacccaggctggagtgcggtggctcgatctctgctcactgcaactttcacctcctgggttgaaacaattcccctgcctcagcctcctgagtaactgggattacaggcatgcaccaccatgcccggctaattttttgtatttttagtagagaagcagtttcaccatattggtcaggctggtcttgaactcctggcctcaagtgatctgccagcctcggcctgccaaagtgctgggattataggtgtgagccactgagcccggcctacaatggaaataatttctgcccttgtgagatttacagtctagtaggggagacattaaacatgaaaaccaaaacatatatatccataacaaaatatatgcatgttatgagtttgactgtaatggcttaatcaactagggatttgttttctcatattaaaaaagttttgttgtgacagattctaatttccaaagatggatataccaatatattctatcttaaatgttctttccataattgagaggtagagcttatgctgtttcctcttgaataaggtggggttcaactattacaaaagtaacactatgtaacttccatgtctaaattataaaggaaagaaagcttttgtctgatccttttaggaggcttgatcttagaaaacagctgtccttcggtacagaatccaagcagccacatggattggccatgtgtaggatttccagccccaaccccagaacaagctgaagactcagccaatagttaccatcaacctctattattttcccgaatgagttttcaagtgattctaacactgttttcaaatttccctgactgacactgagtgaagcagaaatgaactctctctgatgaaccctggccaaactgcagatttgtgagtaaaattaatgttgtcattcaagtcactaagttttgggtttgtttgagcagactttgatatctgtaagtgggattctggcaaatatatatatttaacatatataaaaaacatttaattttatgtgttttatataaaacatttaattttatgtatttgtgtgtatggctttgcaaacaagtggcaagcggacaaaaggaagcttracaaatcttgaaagaagaggtaataaaagccaaaaagtaagagat

SEQ ID NO: 24343 - DNA, 512 bp, Homo sapiens
tgaaagatctgccagttgtatggaatgaccaraaatattctataggcactcccaaccttgcaataaacacatataaaaatctagcaaaactgatagccttatatcttttgaaataatgccctagaccttggtatttctttggatcctaccatttagtcagtatttgaccctgattagaagtttagctgattcttattactgattattttcacatctgcctcaaatgaactctttaattaggggttagtttgggtgcttaaaaagactaaaaagacagctcccagcactttgggaggctgaggcgggtggatcatgaggtcaggagatggagaccatcctggctaacgcggtgaaaccccgtctctactaaaaatacaaaaaattagctaggtatggtggcaggtgcctgtagtcccagctacttgggaggctgaggtaggagaatggcgtgaaccctgaagggagaccttgcagtgagccgagatcatgccactgcactccagcctgggcga

SEQ ID NO: 24344 - DNA, 512 bp, Homo sapiens
tgaaagatctgccagttgtatggaatgaccagaaatattctataggcactcccaaccttgcaataaacacatataaaaatctagcaaaactgatagccttatatcttttgaaataatgccctagaccttggtatttctttggatcctaccatttagtcagtatttgaycctgattagaagtttagctgattcttattactgattattttcacatctgcctcaaatgaactctttaattaggggttagtttgggtgcttaaaaagactaaaaagacagctcccagcactttgggaggctgaggcgggtggatcatgaggtcaggagatggagaccatcctggctaacgcggtgaaaccccgtctctactaaaaatacaaaaaattagctaggtatggtggcaggtgcctgtagtcccagctacttgggaggctgaggtaggagaatggcgtgaaccctgaagggagaccttgcagtgagccgagatcatgccactgcactccagcctgggcga

SEQ ID NO: 24345 - DNA, 644 bp, Homo sapiens
gggatggtagtgttttcatcttcagttgtctcttacacaaaataattgttcttttaactaaatatcactctgtaattgcaaaaaaaaaaagtcgcagtggttttgttgccattctgaatgcttctaagtaaatacaattttttatccgttaaaaaaaaagaaacagtacaagttcttgtccttttggaagtagtccttcctggaagcctgcatatcagatcattacaagtctatactttaatttagaatagttcattttggacagtgtgggatatatgtgtataattttaatatacaccttaggaaggcatattaacattgagttacacacataagtggtgtgtaggaaaaaggctcacattccacagggaatattcctaatatctttaattaactgagagggtttgttaattagcatactgcattagaaattatttttcattggtaaaatatatagtattctacagatgtggattatgtaggaatatygtataggcttttccacagctgcatgaacggacaaagtatggaaatgtggtgaactcattatttttaccctttggaatggtgctctatgcttagaattccaattaattctttgtatagctacttaggatggattttgtggcctggcttcggctaga

SEQ ID NO: 24346 - DNA, 1072 bp, Homo sapiens
ccctcataaactaaatggaatcctttgttgtctcataatttcactgaataatttggaggtatagtggaaaaaatgytaggtgaaatgactttgtaaactgaggcttatttttttttcctgacgcttaaatctagtagagagaagacttgaaaaagaatgatactcatatacaaagaaggtgatttgaaaagtttgtttgttcatttaaatagtgacagtgtagagatcactcttccaggtgtagaacatagtgggatctatgtttcccatccatggagacctaagccaagggaactgtatacctgaaggccacgggaggtctgcctggggaataattggttcatgaggagaactaaattctgtgagtcagaacgtccagatttattcatgacattccactggctagctgaataccattgaatctttaggactcattttccttatacttgaatttcttggttttggtgttatctaggtcttttccagctatacagttgtgatattcttgaaaacacatttttggtaattccatgaaaatagcaaatagcagtttttctgtgtagcaaaattctatgtgttacagaattgctttctttggcaaatgattagactctaattagtcaatactttcaattcttttcatgtagccaaagaccaaaaacattgatcctgtaaacaaggttcaaaacaaattacactctgcaaataaaggaaggaaaacaaattcaaggtatagtatagttttcaaagtatttctttttttttagttttgtaattcacaataccatcattcttaattattaagctctgtttgtttttccagatctttttacaccctaaacattaagttacaccacatatatcttatccacattcagtaatttagaacattttctactcaggaatgttttgcagcagttaacaaatattttatattgttctcttaagcaaaattgctaaatctaaaatttttataaatgttatttctagtgagttattctcttagaactgtgactacaactgggttttttttttaatctctgcctagttctcccaaataggctcaatagtg

SEQ ID NO: 24347 - DNA, 989 bp, Homo sapiens
atattttcttttccaaatttttattacagatattacagcatgtttctttgtttccaggtgaataaatktattcattattatttgacaatgcaagattcttgactttaacttcatttacttcctatctcattttgtcatatttttaactctttacatattttaattcccaaaagacataataaatattttatacattcaaatatcaactaaatttactatacatgtacctcttgcagttctgaaattaagcttgggatcatttttcttcttctattaatacctaatgaagaactgctagtattccctttaatgcaggattattggtgatcaatcttctgtttttgtttctcagaaaatgttattttgtgctcttttaatctatctcatctattttatgaattaacagcttgattatcagtccagaacataattatactggtataagctaggtaatggtaatagtattaagaaggaaaaactgtctctgtcttttctttgaaatggtttttgctgaacttaaatataaatgagatatgaggtacttgcttttgctttcataacagtatgtgttaactgtgtaataaatacatttagttaattgggcaattaattataactactaattgtttagtgccataatttaaaataggatttctaaaaataaacagtgagtttcccaactccagttaaaaacagcagcaaagttaaattatcttttaagtactttcttggattacaaaaccatgtgttccaaaatcaattaacaggagtcatgatttctgagctcaaagaaatattttcaaaataaacttcaatgattttttaaatgtgccgtgcatttaaaaaattaatttcttttacattaaaaaagctaaatcttaatataggtgattttaaataaattaggacacattttaagcaccagagcagttccctgaatttagacatgccaatttgaaatacagtccatttctgcatgacagtgaaaa

SEQ ID NO: 24348 - DNA, 1012 bp, Homo sapiens
tggtccaagctctgccattatcgtatgtgaaacagtcatctctctgggcttcagtttttccatctgcaaagcaagaattccaacactacattcacaggagtatctgaaggataagatgagataatagatgcagaggtgatgtgaaaagtaggaagtgctttacatgtgccagttttcttcattcattcactctcattcacgcatgtactaatttagcaaaaaatgatgaagcatccattagatgctataattgcaaattgctaagtgttcagggcagagcaagtggacagactttgtaacaaaagcctgcttttgactattttatccctgcccccactgtctgcagaagaaagagaagggtagagctgatgggtcagtgggcatctgtgccctaggctgggggtcatcactagccctcattttgccctgcaatcagtagactctgtgcgtgggattctgtgatgggaggaattttctaccctctttgttctggtagggaagagtttacaatgagtagggtcaagggttgttttctgctttgtagwgttgattccagaggctgcctcatctgttgtctggcagcaacggcacactggccattgacatgggcaaaggtcactgtactgagatgtgagtgcaacagaatcatggggcagctttagcagaccatcatcagagacagctcagtggatgcagctgccttctgaggataaaagatttggattcaactcgggtgggtgaacttggacaaggtgcttaaccttaccaagactcaacttccctatctgtaataggggactcttaatacctaccctttatgcttggtgaagataaagtgagagtcatgagagaatgtcctcctctccttcttccattgacgtcaattcatgatcactgacctcatcgggcagttatctgactcaggtgtatcagatctagcgggtacagtgacctctgtgccactcatatgcccctcagttattaggtaccaggcttctggtgatgtgaagag

SEQ ID NO: 24349 - DNA, 1012 bp, Homo sapiens
tggtccaagctctgccattatcgtatgtgaaacagtcatctctctgggcttcagtttttccatctgcaaagcaagaattccaacactacattcacaggagtatctgaaggataagatgagataatagatgcagaggtgatgtgaaaagtaggaagtgctttacatgtgccagttttcttcattcattcactctcattcacgcatgtactaatttagcaaaaaatgatgaagcatccattagatgctataattgcaaattgctaagtgttcagggcagagcaagtggacagactttgtaacaaaagcctgcttttgactattttatccctgcccccactgtctgcagaagaaagagaagggtagagctgatgggtcagtgggcatctgtgccctaggctgggggtcatcactagccctcattttgccctgcaatcagtagactctgtgcgtgggattctgtgatgggaggaattttctaccctctttgttctggtagggaagagtttacaatgagtagggtcaagggttgttttctgctttgtagagttgattccagaggctgcctcatctgttgtctggcagcaacggcacactggccattgacatgggcaaaggtcactgtactgagatgtgagtgcaacagaatcatggggcagctttagcagaccatcatcagagacagctcagtggatgcagctgccttctgaggataaaagatttggattcaactcgggtgggtgaacttggacaaggtgcttaaccttaccaagactcaacttccctatctgtaataggggactcttaatacctaccctttatgcttggtgaagataaagtgagagtcatgagagaatgtcctcctctccttcttccattgacgtcaattcatgatcactgacctcatcgggcagttatctgactcaggtgtatcagatctagcgggtacagtgacctctgtgccactcataygcccctcagttattaggtaccaggcttctggtgatgtgaagag

SEQ ID NO: 24350 - DNA, 1415 bp, Homo sapiens
gcaactcaggaggctgaaggaggagaatcacgaacccaggaggtggaggttgcagtgagctgagatcgcaccattggactccatcctgggcaaaaagagcgaaactccattaaaaraaaataggatgcattattctcctagtaccttctctcctttggtcatcttaatttcctactccctatgccaagcatgttgccaatggtaacatattaggtgagtgcaaaagtaatgactgtttttgcattcgtggaatctgtcatttgatattgaaatacattctgaaataaatgtggttatgatatacatcattttagtgggcatttcttgctttatgtttttttgcttgctaatgacttattacttgctgtttattttatgtttattttagactatggaaatgatgttagacaaaaagcaaattcaacttcaaagtgggtcttaaaacagccaagacaacttgcaacatcaacaacgcatttgttccactgagaatgaacgtacagtgcagtggtggttcaagaagttttgcaagggagacaagagccttgaagacaagcagcatagtggctggccatgagaagttgacgatgaccaactgagaacaatcatcaaagctgatccccttaaaactacacaagaagttgccaaagaactcatcattggccatttgaagcaaattggaaaggtgaaaaatcacaataagtgggtgcctaatgagctgagtgaaaattttaaaaaatcatcattttgagtgtcatcttctcttattctatccaacaacaatgacccatttctccgttggatgatgacatgcgatgaaaaatggattttatatgacaagcggcaatgaccagctcagtggctggatcaagaagaagtttcaaagcacttcccaaagccaaacttgcaccaagaaaaggtcatgatcactgtttgggggtcttctgccagtctgatccactacagctttctgtagtggatcaggaggctgaaggaggagaatcacttgaacccaggaggtggaggttgcagtgagctgagatcgcaccattggactccatccttggcaaaaagagcgaaacaccattaaaaaaaaataggatgtattattcttattattctcctagtaccttctctcctttgctcatcttaatttcctactccctatgccaaacaatgttaccaacggcaacatattaggtgagtgcaaaagtaataactgtttttgcattcgtggaatcgtcatttgatattgaaatacatttttgtatttcattgccagttgtcatctaaaatccatttttcatcgcacatcatcatccaatggagaaatgggtcgttgttgttggatagaataagagaagatgacactcaaaatgatggtttcccggtgaaaccattacatctgagaagta

SEQ ID NO: 24351 - DNA, 803 bp, Homo sapiens
caaatcctgggagaggccaaagaaggcccctcaaaatattccccaacccagttagcccagggagaggaagggccggcatcagagccggacagcccagtgtagctcaaagaggctcttggaacagcaggcctcggtcacctcyattctgatcccaggccaagtggacagaacagaccatagaagagttgctcagtggtgtacaatgggggtttcagttagttaattaattttaaaagggtttgtaagtggtggtttacacaatgtgactcatggaacattcactgcccctaactgcatttcctgggctgtcactgacaggaggccaagaagaggaaagctgtggactccacttcccagctttgtgcattttcccgggaactgatggcctcctgcccatcccatcgcttccctctggaagatccttcccttttgtaatagtccaaaaccagtgatttccaataggtccttcagagggcacaccagaatccctgtgtgtgcacatctatgtgtgtgcgtgtgtgtaagggggtgttcatagctggtaaaacctatttgacatgcctattatgttcctaataaaaagtaattaaggttaaatcccatctgggctgctggagatgtgcaggtgatcgagtgaagaatgaagttggggtgagggtgaaaaggggctgaggaacaccactgtactttttgttcccacactctcaacagcctcgtgagacagggagggcagagttattctcattttatgaatgcagaaactaaggccccacatggactctaagctccaagaggacaggaac

SEQ ID NO: 24352 - DNA, 1194 bp, Homo sapiens
  misc_feature (1)...(1194): n = A,T,C or G
tggatccacttgggtagacacctagaagaggtgatgtcctaaactgcagccccagccccaggggcccatctcgcccagctctggccctgaaaagacgttccattccccttccctggaaaccccctcacttacrggaagctgggtgttatcttaaggtctataaacggcctgcctgcttttccagctggagctgttcattcagaacaattagcatgcagtttggagctggatggaacatatggcagaggggggtccccaggagccagcgtgtggcagcctgagaaggaggggagcagcttgagaggcacgggaagggcatggnnnnnnnnnnnnnnnnnnnnnnnnnnnnnnnnnnnnnnnnnnnnnnnnnnnnnnnnnnnnnnnnnnnnnnnnnnnnnnnnnnnnnnnnnnnnnnnnnnnnaccctccatgattatgcccccccacatatcatactacatatgccattttgggtaagtttttacacttggaagtaaagtaggtttagaagacaacccctgggtggtggttctgcagaggaggtgcatgttccttgctgtatgtgacaatgcctcccaccccatccctgcaagcccagttctgtcacgaggcacctcatgatctgactcctgctgccttttcaacttcctctccctccactccccacctgcctacctggcttcagccacactcagctacatcttgttccagaaacatgcaagctcattcctgtctcaaatgctttgctttttctcctgctggaacgccagtcccttagctccttgcgtgactacgtctcatcatccgaggcttaacttaaatgtcacctccgcagagaggctctccctgaccactctaagaaaagctgctcctccctgcagaagcaaggacagaagcagaggagatcaccctcctctccctacccaaagcctagtgctagtagctgggggacacagtcgtggcagatgtcccgtccttaccccacatgccactcacactgtgtacacagaacacaccatccctgtacacatacacacatattgcatacaaacagcacagagaacatgcacactgtgctcacagcacacaaaatcagcaccccagttacatacactacccatctgtgcttatatacagcattagcacaacactgcgtgtgcacacaatgaaaacacacaggaccccacacaacact

SEQ ID NO: 24353 - DNA, 1194 bp, Homo sapiens
  misc_feature (1)...(1194): n = A,T,C or G
tggatccacttgggtagacacctagaagaggtgatgtcctaaactgcagccccagccccaggggcccatctcgcccagctctggccctgaaaagacgttccattccccttccctggaaaccccctcacttacaggaagctgggtgttatcttaaggtctataaacggcctgcctgcttttccagctggagctgttcattcagaacaattagcatgcagtttggagctggatggaacatatggcagaggggggtccccaggagccagcgtgtggcagcctgagaaggaggggagcagcttgagaggcacgggaagggcatggnnnnnnnnnnnnnnnnnnnnnnnnnnnnnnnnnnnnnnnnnnnnnnnnnnnnnnnnnnnnnnnnnnnnnnnnnnnnnnnnnnnnnnnnnnnnnnnnnnnnaccctccatgattatgcccccccacatatcatactacatatgccattttgggtaagtttttacacttggaagtaaagtaggtttagaagacaacccctgggtggtggttctgcagaggaggtgcatgttccttgctgtatgtgacaatgcctcccaccccatccctgcaagcccagttctgtcacgaggcacctcatgatctgactcctgctgccttttcaacttcctctccctccactccccacctgcctacctggcttcagccacactcagctacatcttgttccagaaacatgcaagctcattcctgtctcaaatgctttgctttttctcctgctggaacgccagtcccttagctccttgcgtgactacgtctcatcatccgaggcttaacttaaatgtcacctccgcagagaggctctccctgaccactctaagaaaagctgctcctccctgcagaagcaaggacagaagcagaggagatcaccctcctctccctacccaaagcctagtgctagtagctgggggacacagtcgtggcagatgtcycgtccttaccccacatgccactcacactgtgtacacagaacacaccatccctgtacacatacacacatattgcatacaaacagcacagagaacatgcacactgtgctcacagcacacaaaatcagcaccccagttacatacactacccatctgtgcttatatacagcattagcacaacactgcgtgtgcacacaatgaaaacacacaggaccccacacaacact

SEQ ID NO: 24354 - DNA, 542 bp, Homo sapiens
ccgccccccaaaaattttacttaagagtccatttttcaagaccttgaagtaagctgacctattggaaacagcctcaattagcaaaatgtcacatggaaataagtctactttaaagttccccaggaaaaaaactgaaaatagtattctatgaacagggctccattgctagagaaaaaaacgaggtgtttgtctcaaatcttgataaattgtaaactccctacctcactctccgccagcctccccctcctcctggtctagccactcggtgaggggtgacaccgttccgttcccaccaaagcacycaggagagagagaatgctggttatttgttatccgaggggcatgagtcactgttggtgagagtaagtgctgtttgtgagagctaccagaaaaagtgcggtgcagaagggaggtgttttctggtggatcttggtctttcccaaaaatcgcttccacgccctgacaggaattccgtgttgaagaagaacatgctctcagggccccatctaggcagtggaatctgcactttgatcctccagtga

SEQ ID NO: 24355 - DNA, 542 bp, Homo sapiens
ccgccccccaaaaattttacttaagagtccatttttcaagaccttgaagtaagctgacctattggaaacagcctcaattagcaaaatgtcacatggaaataagtctactttaaagttccccaggaaaaaaactgaaaatagtattctatgaacagggctccattgctagagaaaaaaacgaggtgtttgtctcaaatcttgataaattgtaaactccctacctcactctccgccagcctccccctcctcctggtctagccactcggtgaggggtgacaccgttccgttcccaccaaagcacccaggagagagagaatgctggttatttgttatccgaggggcatgagtcactgttggtgagagkaagtgctgtttgtgagagctaccagaaaaagtgcggtgcagaagggaggtgttttctggtggatcttggtctttcccaaaaatcgcttccacgccctgacaggaattccgtgttgaagaagaacatgctctcagggccccatctaggcagtggaatctgcactttgatcctccagtga

SEQ ID NO: 24356 - DNA, 188 bp, Homo sapiens
ttttaaacgaggatacagaaatatcaatttggaccctcagtgatgtcacaatattctaagtgttttggaaacatgctttattaactttacatccaagtaaatttaaaatttttaayaaaaatccatttttggctgggcacggtggctcatgcctgtaatcccagcactttgggaggccgaggcaggtg

SEQ ID NO: 24357 - DNA, 550 bp, Homo sapiens
tggaaaataactcaatatctgaaacactgatctaagaaaaaacacaaaaacccaacattcctgacctattagggctttaagttcaacgctcctcatgcttagatgaggaaattgagtcctagaggggtgagttactgtgaagggtcacatacctgtttggtcacagaaagaaccaagatagcagaactcaggtgtagtgatttgtccttcactgtcctacactgaattcctaatgtcacatgtggaggagtgggcagaagcttctgtttctttgtttcatggtgttgccaataatatccagtgttataaagcctgagaatcaagatgttaaacctcaratatgtgtcgtgccttgttttctgctgggctacagataagcttttaaataagggcaggtgttggtgctttgccatgggaaaggccctgggcactggtgtggtggagcagagaactgcatcccgaagccaagagggcctctccttctttgcctgacagacacaaataactaaattaaagtaaccatcttaatggggaataaattagagggtta

SEQ ID NO: 24358 - DNA, 1837 bp, Homo sapiens
actgagctagaccacttggcttcctggctttgggcccctttccaggggagtgaatggttctgtcttgctggcattctaggtgccactggagtatgaaaaaaaaactcctgcagctagctcagtgtctacccaaatggccgcccagttttgtagttgaaacccagggtcctggtggtatagacaccccagggaatctcctggtctgtgggttgtgaagaccatgggaaaagcatagtatctgggctagatagcaccgtccctcatggcacagtcccttgtggcttcccttggctaggggagggagttcctcaaccccttgagcttcctgggtgaggtgacgccccaccctgattctgctcacccactgtgggctgcacccactgtctaaccagtcccaatgagatgaaccaggtacctccattgtaaatgcagaaatgccctgccttctgtgttggtctcactgggagctgcagattggagctgttcctattyaaccctcttgcccaggaatattgagatgttctatgtcttgactgggctgttagtcacatggctgtatctatttggcaaagctcgttgaattgtacctgttaagaactattcatcttatatgtaaactttacctccaaaatgtataaagcacaaaagaatagatgaaacagaagagacatgattcccaagtagaggtgtctgtccccaaagcctgacttctgcctactgtttggatagaaagctcctctgtgtacagctagtcacaggtggtggccaggtgcgccgccaacattagggggatgttcacaggtaggggagccatcgaggaggaagccagttgagctggttcacctgagcccctgacctgggccatgctgaactagccccacaagtgaggatgaattagatggaaccaccgcctggagcagtttccagcccggggatgctgtcagtataacagaggtggaccacagggaacagcttcagttgatatgggactccagtccttgaataaggtatggggtggggtgcataaccaataaaggaaaaaggggatcctagtttcggaggaataggggtcccagggacataagaaatacacagtcccagccggagggaataaggatggaattcaactactgcacgtggagtagaaggtaggaatgtggttttcaatggaagccagaagaataggaatgacactttggcccaaagcgagagctggattatcagaaagtctgacttcagctgagtctccagagcacagagccagtgtggtatagcgtggctctgttgcctgctagtgtgtgaccttgggctggttacccaacatctctgctcctcagtatcctccagtggaaataatgacagtacatacctcagcacagtgttctgaggattaatttattttatatgtcaagccgttagaccagtgccagcatcacagttgttgttatgttatcacaagtgttgttaagttaggacccttaaactgacactaactgaagacatagttggttgctagccctggtcaagggtccatttgtgggttaagtagctccaaatgtgagttgtgggggttgcagatgcaacaggacttggtgagaattaatgaaaaaaaagaacaaatttggctatcccatttcatgggataatatatcaaggcctcaggaggttaacactggtctgagatggcacagctagttagtggaagacccggggctacctgtcagttcttctgctccccgtcagagcttctcccatcagctcagaaactgccatcctccctagccctttggactcattaactgaccctgtacagagttaaccttgatcaggaatgagg

SEQ ID NO: 24359 - DNA, 1837 bp, Homo sapiens
actgagctagaccacttggcttcctggctttgggcccctttccaggggagtgaatggttctgtcttgctggcattctaggtgccactggagtatgaaaaaaaaactcctgcagctagctcagtgtctacccaaatggccgcccagttttgtagttgaaacccagggtcctggtggtatagacaccccagggaatctcctggtctgtgggttgtgaagaccatgggaaaagcatagtatctgggctagatagcaccgtccctcatggcacagtcccttgtggcttcccttggctaggggagggagttcctcaaccccttgagcttcctgggtgaggtgacgccccaccctgattctgctcacccactgtgggctgcacccactgtctaaccagtcccaatgagatgaaccaggtacctccattgtaaatgcagaaatgccctgccttctgtgttggtctcactgggagctgcagattggagctgttcctattcaaccctcttgcccaggaatattgagatgttctatgtcttgactgggctgttagtcacatggctgtatctatttggcaaagctcgttgaattgtacctgttaagaactattcatcttatatgtaaactttacctccaaaawgtataaagcacaaaagaatagatgaaacagaagagacatgattcccaagtagaggtgtctgtccccaaagcctgacttctgcctactgtttggatagaaagctcctctgtgtacagctagtcacaggtggtggccaggtgcgccgccaacattagggggatgttcacaggtaggggagccatcgaggaggaagccagttgagctggttcacctgagcccctgacctgggccatgctgaactagccccacaagtgaggatgaattagatggaaccaccgcctggagcagtttccagcccggggatgctgtcagtataacagaggtggaccacagggaacagcttcagttgatatgggactccagtccttgaataaggtatggggtggggtgcataaccaataaaggaaaaaggggatcctagtttcggaggaataggggtcccagggacataagaaatacacagtcccagccggagggaataaggatggaattcaactactgcacgtggagtagaaggtaggaatgtggttttcaatggaagccagaagaataggaatgacactttggcccaaagcgagagctggattatcagaaagtctgacttcagctgagtctccagagcacagagccagtgtggtatagcgtggctctgttgcctgctagtgtgtgaccttgggctggttacccaacatctctgctcctcagtatcctccagtggaaataatgacagtacatacctcagcacagtgttctgaggattaatttattttatatgtcaagccgttagaccagtgccagcatcacagttgttgttatgttatcacaagtgttgttaagttaggacccttaaactgacactaactgaagacatagttggttgctagccctggtcaagggtccatttgtgggttaagtagctccaaatgtgagttgtgggggttgcagatgcaacaggacttggtgagaattaatgaaaaaaaagaacaaatttggctatcccatttcatgggataatatatcaaggcctcaggaggttaacactggtctgagatggcacagctagttagtggaagacccggggctacctgtcagttcttctgctccccgtcagagcttctcccatcagctcagaaactgccatcctccctagccctttggactcattaactgaccctgtacagagttaaccttgatcaggaatgagg

SEQ ID NO: 24360 - DNA, 557 bp, Homo sapiens
caatgttgttcctgtgcacttctttggttcactttcaccctcatttggggacgtggcagttcccatggtgtttaggtagcattgagggcaggcagtcctcaggaggatgttgatgctgatttgctttctgcagaggagccagagagggtatccaygttgaacttgtatatccataggaggaaaccagtcccatggcccctgaagggtcctggcagtgggaaggggagaggtctgcatgtgcatgtactggacagcatattccatgtgggtcatggagtgatgactgtgggcctctttcgggcattgtagcaggcccccatttcatttcatgatgacctcggggtgctgggacaggaatgtgattgcgggtccacgtgcttctgcaactcctcagactgacttggtttggaaggtctgtgttcaggaccctctgtgagatgcttgtctccattaggcatttgagcttatatcggcccagggtttctacctatcgtaggttgtgcatactttgcctctgaaccactcaggcacctcgatgcagtcaacgtgcccgatta

SEQ ID NO: 24361 - DNA, 557 bp, Homo sapiens
caatgttgttcctgtgcacttctttggttcactttcaccctcatttggggacgtggcagttcccatggtgtttaggtagcattgagggcaggcagtcctcaggaggatgttgatgctgatttgctttctgcagaggagccagagagggtatccatgttgaacttgtatatccataggaggaaaccagtcccatggcccctgaagggtcctggcagtgggaaggggagaggtctgcatgtgcatgtactggacagcatattccatgtgggtcatggagtgatgactgtgggcctctttcgggcattgtagcaggcccccatttcatttcatgatgacctcggggtgctgggacaggaatgtgattgcgggtccacgtgcttctgcaactcctcagactgacttggtttggaaggtctgtgttcaggaccctctgtgagatgcttgtctccattaggcatttgagcttatatyggcccagggtttctacctatcgtaggttgtgcatactttgcctctgaaccactcaggcacctcgatgcagtcaacgtgcccgatta

SEQ ID NO: 24362 - DNA, 598 bp, Homo sapiens
tgcccttcactcaagaagaggctttccttgaacctgtccccactgaaatatcctcatgggcttcatcttctctgatggccaaaagcaggacttttgattcagaggtggcaaatgaatggtgttgagagagtttgttatgcttggtgctctgtagctggaaggagccctcaaaattattgtgtgcatgatagcttcatgcctgcttacacccatgcacatgtcccagtaagaggggctgcctgtgggagatacatacacgatacaccacagtgggatgaattgtatggcccttgcaatgtgtgtacctgcctgctgttstcaaacacacctgtttttcctctgaactttccaggtggcgtgggcatagaaggaaggccagtggccacgagggacaatcttggtcttgggagatcctggaaatgatagggagtcccttgatatgtgtggcatgggctccttcaggtgctagtggattccttaggatggtaagtgtccatttctcagaagctccagatattcctcctctgcagggacaaagactgtgcctggatcgatgatgacttccatatatacattccttggaaagctgaacaaaatg

SEQ ID NO: 24363 - DNA, 809 bp, Homo sapiens
cttctgaatgtaagcacttctttcccagagcactctgagtttcctcatttgcagggacaaatactgtgcgtggatcgatgatgacttccacatatacattccttggaaagctgaacaaaatgagtgaaaactctataccgtcatcctcgtcgaactgaggtccagcacattactccaacaggggctagacagagagggccaacatcygttttttgacatgggttataccaaggcatccgttcaggcttaggatggggtcttttatgggtgatgggggtcacaggagagtggtggctcccatgtataggaaatttcttgtttgaaggactgtcagtgagggtgggtaacacatgcattgtctgcaggactaggtgaatgtccatgtggcctagcaagagttagctggtagcccgcctctggttgccaatttgttcttgagtccttgttctgagttcctggaaggaaacagatttgtctggttgggaggagaatacaaggccacatctttgtcgtttgttggctaactttgtccttggttgaggacattagagttttggtcaccaggcatagcctatgtgcctgtgtgcccgtgttgtatcccatgtgtttgggggacatgtacattgcatgaactagtgagctcctgctcattgcttctgatacccaaggagtccctggcttatcctaaacccaatataggttaaagcctttctcattaggggcccagggtcccaaggcttttgtgagtatcattgtaggtattgaagcaacgatgttgagaaggatgctgaacatgctctttagtggga

SEQ ID NO: 24364 - DNA, 1186 bp, Homo sapiens
tcctatctttatgtcttcccattctaatcatcagccattcgtgcctccattcctgtatcatcagctccatcccatagggggatgcattagcctctgtgctgcaagattcctcagctctgctatgaattgccttagttggctcccctgtaagcagacactgagaagacgagctgagaggaaggggcttcatctgagagggttgtgaatgctggcggagaagtagggcagtgacccaggtgggaaggcagccaccaaagccccgtggttaattcacttgtcaccrcctggagcttcatcccatgggacctgcagggaaaggctatgcttcagtgtcatctgacccctgagaaaaggaggaggcacagtgcaggcacatctaactttatcacactttgctttagttactgtgttttttaccaactgagggtttgtggcaaccctgcgtcgagcaagtctattggcgccagattttgaatagcatgtgcgcattgagtgtcctcaagttacattttggtaattcttgcaatatttgaaacttttctgttatcattctgtctgtcatggtgacctgtgagcagcgatccttgatcttaccactgtggttgttttggggcaccatgaacagcacccatagaagacggcgagctgaatccatcagtgttgtgtgtgttctgactgctccaccaaccgtctctctctttctctctctcctgtttttgggcttccctttcctataccctgagacctagcactatcggaaataggccagttaataaccctaccatggcctgtaagtgttcaagtgcaaggaggagttgcacgtccctcagtgtaaatcagaagctagaaatgattaagcttagtgagaaaggcacgccgaaagccaaaacaggccgaaagctaggcttcttgcaccaaacagccaagttgtgagtgcaaaggaaacattattgaaagaaattgcaaatgctacacactggtgcactctggtgcgtttttcttcccatatgtgaacatttctctcgtactccccatcatttgttctcctcacctagattgaccgccttcagctgcatttccgcgtccctgcctgtggccaccagacctccaccctgcgtccaggaataggtggcaatgtgggggtgtacctattgtctcttcgttgtcaatttccatcctcctgggt

SEQ ID NO: 24365 - DNA, 1186 bp, Homo sapiens
tcctatctttatgtcttcccattctaatcatcagccattcgtgcctccattcctgtatcatcagctccatcccatagggggatgcattagcctctgtgctgcaagattcctcagctctgctatgaattgccttagttggctcccctgtaagcagacactgagaagacgagctgagaggaaggggcttcatctgagagggttgtgaatgctggcggagaagtagggcagtgacccaggtgggaaggcagccaccaaagccccgtggttaattcacttgtcaccacctggagcttcatcccatgggacctgcagggaaaggctatgcttcagtgtcatctgacccctgagaaaaggaggaggcacagtgcaggcacatctaactttatcacactttgctttagttactgtgttttttaccaactgagggtttgtggcaaccctgcgtcgagcaagtctattggcgccagattttgaatagcatgtgcgcattgagtgtcctcaagttacattttggtaattcttgcaatatttgaaacttttctgttatcattctgtctgtcatggtgacctgtgagcagcgatccttgatcttaccactgtggttgttttggggcaccatgaacagcacccatagaagacggcgagctgaatccatcagtgttgtgtgtgttctgactgctccaccaaccgtctctctctttctctctctcctgtttttgggcttccctttcctataccctgagacctagcactatcggaaataggccagttaataaccctaccatggcctgtaagtgttcaagtgcaaggaggagttgcacgtccctcagtgtaaatcagaagctagaaatgattaagcttagtgagaaaggcacgccgaaagccaaaacaggccgaaagctaggcttcttgcaccaaacagccaagttgtgagtgcaaaggaaacattattgaaagaaattgcaaatgctacacactggtgcactctggtgcgtttttcttcccatatgtgaacatttctctcgtactccccatcatttgttctcctcacctagattgaccgccttcagctgcatttccgcgtccctgcctgtggccaccagacctccaccctgcrtccaggaataggtggcaatgtgggggtgtacctattgtctcttcgttgtcaatttccatcctcctgggt

SEQ ID NO: 24366 - DNA, 1259 bp, Homo sapiens
ggatcctcacaacatccctgtcatgtgggtattactgtccccattttaagaagtcagaggctcaaggaagttagggaacatgtccaggaccattctacgtaagtggaggaaccaggtgattggaayccatgccctttgtgcaaaaggctgccaacctgccaccagggggcatcttggctgtcctgggagagagaatgctggagccggctttgggacagacctgaagttgtgctgaagtccctgtggctcctggagggcagggacaggaaaggcttcactttggcccttcacttcctacgctgcccctttctcccacacaagtggctcacggccactcctctatgcctgctgccattcatcgcacagtgaactgcaaaccacacactccgaagaggcactcaaggtgctcagggcggggcgcagctgaggacaatagaacctttctccaagctgggcttgggcttctcctgatggggcgctggctgaggcagagactgagcccggttcacccagggctgccagcaccccaggagcactgcaccactgggttgacaggcgatgacaggaggtggctccagggcctgcagcatggggagaggccactcttgcctttccctaaatctcagtctaggctttgattctgagccagaccagggctgtaggagccagctgggctgggaggccgtggggtgactggcctgctctgggttagagcaactgggaatggtgacccctagcaaggcagagatgaagaaaggaacctcttcacctcggagaccccttctgcatgttccttccaccttgctattccctctgaggtacctcccaatggctcctactgtctcatctggggtcttcagctcccaccttgttctattcatgccctcagctcctttacaacctcctcctgcgtctctgcctgcttgtgggataaccaccatctcagatcatccaattaccaccactggactattcatatctggagctctttgttgtttttgtctttccagctccagtaagcacctggcatacagtaggcactagacaaatgtttctccttgatcatcgcctatctccccttggagcccttcacccctagtcctccttctgccaggaagtagagaaaataaatccactcacccctacccgcccaagctgcttcctcccaggccaactggcacccacagccccaccccttgaccaaggcggctctgtggtcagcccaccttcggtgattctgtcagtcggcagccagcatc

SEQ ID NO: 24367 - DNA, 574 bp, Homo sapiens
tcctttgtgagaaatcttaaaatgctcaatcatgctctaaaataatcattttatgtgacatttggcagttgaataggaacctcttgaacaagggactttcttttacaaactaaatgcatgcccagaagcacctcccaatttaatcaactaaacagaccagaacgctgtatgtccgaagcctttgaaacagtctttctaagagtagaggcacggtgatcaacacagagaatcctataccagcataagatcgcagcagctcattttgcaactccgaccaaacagtaaatctgaaacgagattgattaggagggaacaatatggattttattaccccaggacatggccatgagaaactcttgtctcttctgtaaaccagaagaaattatgagaatgttcacattcttggttttaaggactccaggaggacgattaaggaccctgaagccagatcttagtgatttgcaacggaaatgttgttaaagacccaacagaatgaatagcaaaggatctagggaaaytcaagaggaatcttcatagatttgctagaaacatgaacatcaagtagcacgtggaa

SEQ ID NO: 24368 - DNA, 574 bp, Homo sapiens
tcctttgtgagaaatcttaaaatgctcaatcatgctctaaaataatcattttatgtgacatttggcagttgaataggaacctcttgaacaagggactttcttttacaaactaaatgcatgcccagaagcacctcccaatttaatcaactaaacagaccagaacgctgtatgtccgaagcctttgaaacagtctttctaagagtagaggcacggtgatcaacacagagaatcctataccagcataagatcgcagcagctcattttgcaactccgaccaaacagtaaatctgaaacgagattgattaggagggaacaatatggattttattaccccaggacatggccatgagaaactcttgtctcttctgtaaaccagaagaaattatgagaatgttcacattcttggttttaaggactccaggaggacgattaaggaccctgaagccagatcttagtgatttgcaacggaaatgttgttaaagacccaacagaatgaatagcaaaggatctagggaaactcaagaggaatcttcawagatttgctagaaacatgaacatcaagtagcacgtggaa

SEQ ID NO: 24369 - DNA, 543 bp, Homo sapiens
attaatgaagacataaattgcactcaatacagctttcgctgagttgccttgggttagagatgatttgttttttgctcttattttcactgcattcaaaataactttctgcttttatttctttgattaatgagagtattgcttaataatcaagtacttcttttgtttttattgaagtgaaataaacataacatacaatwagccattttaaaatgtccaattcagtgacatctagtgtattcacaatgctgtgcaacaataatatctctttgatttcagaatctgtaatcaccccaggaaaacagctctacccattaaggaatttcttccattctcctctctccctgtctcttggtgactgctgatctgttttctgcctctgtgaatttatactgttaaaaaattttccaaacctgaaggaggttttgtttatgtggcttgtatctgttagtactagaaagtaaaactgagttaaagtgtatgtgaatcaattaatttatgaaaataattaccctttacatatcaacatacatatttttaatgaag

SEQ ID NO: 24370 - DNA, 625 bp, Homo sapiens
ctttgtttttgcttggaaatctttcttttttcttttatgtttcattttaaatactttatcttgctatctctacatgttcattaatgttaccttctgctatatctattctaccttataacatccattgatttttgaatctcagatggttttaactctagatgttcaatctgggtttgttttgtttttttgtgggtatgtttgtttgttttttaatatttcccatgtctcaagacaacatgttccatcatcacctgactgagaacagggcatacagttctaataacagttttaatgttggtgttcactgattgaaaattctgttttatttctggctcayttttcattgattgagttttcttcttcttatggatatcttcttacttttttgcgtgcttattactttttgattggatgccagagactgtgaatctcactttgacaggtgctgaatatttttgtattcccataaatattcttgaacattctttcactggggtttggttgactatttgtggaacagtttgatccttacactactttttaaggctggatgtaggttgaggcacgaaagaagttgcttttttcgtagtagtaagcttgatttgcatttaacaattcttgtcat

SEQ ID NO: 24371 - DNA, 580 bp, Homo sapiens
agtctccccaatccatatatgcatgttattataactaacctccattgtgaacaccgtagatctaatcacactttatcatcacctcttctgatgttagccacattttcatatgaaagagtttttgtcatgcttgcaagtagagattctgaatccatcatcatatgcaagctctactaccagttcttaacagttacctgtcctggaaattacttgatctccctgcagcatgtttttgtttgtgtgtttgtttgtttaaaatgggcataataatagtacttactgatayatactcaatatatataaacgacttggaacagtgtctagcacatagtgtgtgttgtgcaagtatttccggttattatgataaggcagaaataatgaagtggaattactattgctaaatgaaaaactacgatgtccttctccttcacttccattacaactatgctagcatttcattaatagccttgactctcataccctttaaaaatattgtttctgaaattgcgatatgttaaaatctctgtatactttgaaaattgtattatttccctaacatttgcatggtgctttagaattg

SEQ ID NO: 24372 - DNA, 580 bp, Homo sapiens
agtctccccaatccatatatgcatgttattataactaacctccattgtgaacaccgtagatctaatcacactttatcatcacctcttctgatgttagccacattttcatatgaaagagtttttgtcatgcttgcaagtagagattctgaatccatcatcatatgcaagctctactaccagttcttaacagttacctgtcctggaaattacttgatctccctgcagcatgtttttgtttgtgtgtttgtttgtttaaaatgggcataataatagtacttactgatacatactcaatatatataaackacttggaacagtgtctagcacatagtgtgtgttgtgcaagtatttccggttattatgataaggcagaaataatgaagtggaattactattgctaaatgaaaaactacgatgtccttctccttcacttccattacaactatgctagcatttcattaatagccttgactctcataccctttaaaaatattgtttctgaaattgcgatatgttaaaatctctgtatactttgaaaattgtattatttccctaacatttgcatggtgctttagaattg

SEQ ID NO: 24373 - DNA, 525 bp, Homo sapiens
tttatttcccatttatgctatactaaacacttctaaaaaacaacacttctaagctctatttttcatgaaccagcataacttgacccttttgcctacctggagtacgcaagtttacaaggggaactctggggtgacagttttgtaatcttattttgttcccgttaaaccagcacaagtttactattaaatcaatctaatcagtgattggctgaagttaaaacaaaaawaagtgttgaggtgcatagcttacaacaggtttgtgaaataaaattactgaatccaaatttaagatagaaaatatgggactggctgttgtggctcatgcctgtaattccacactttgggaggctgagccagcagaattccttgagtccaggattttgagaccagcttgggcaacacagtacgtccgtgtgtctacaaaaaatgttttaaaaattagccagggttctgcacctgtagtcccagatacaaggaatgctaaggtggaaggatggcttcagtccaggagtttgaggctacagt

SEQ ID NO: 24374 - DNA, 525 bp, Homo sapiens
tttatttcccatttatgctatactaaacacttctaaaaaacaacacttctaagctctatttttcatgaaccagcataacttgacccttttgcctacctggagtacgcaagtttacaaggggaactctggggtgacagttttgtaatcttattttgttcccgttaaaccagcacaagtttactattaaatcaatctaatcagtgattggctgaagttaaaacaaaaataagtgttgaggtgcatagcttacaacaggtttgtgaaataaaattactgaatccaaatttaagatagaaaatatgggactggctgttgtggctcatgcctgtaattccacactttgggaggctgagccagcagaattccttgagtccaggattttgagaccagcttgggcaacacagtacgtccgtgtgtctacaaaaaatgttttaaaaattagccagggttctgcacctgtagtcccagatacaaggaatgctaaggtggaaggatggcttsagtccaggagtttgaggctacagt

SEQ ID NO: 24375 - DNA, 1560 bp, Homo sapiens
ttttcaacatagatctttttatttcccaccattccccaaaaatgaatccaccagttataaaggaaaagtctctgttggtgaatatgttggcatatctgggaatttgcatgataagtatttttaaagttgtagacaatttaaatttccttgaatatatgtgtggtaattaaaactcaaactctgcctaatctaaaggttaaagtgatctgacaacatcaaaactttcagggaaaaaaaaccaaaactagaaargcttattttatcagttgaatatgaagaagaatcacccactcagttaattgtcaatattcagtcgtagagaggaacacatcttattttggtacaaaaattattctttaaaaaataaggcattatgcaaaagttaattatccggggctcaaactgacaggtttgatttctctactttgctctctctttgaaggagacaccttttaaaaacaccagcctgagagacagttttcttaactttttattttcaaaccatttcagacttacaaaagtgttgcataaacagtaaaaaaattctgtgtagccttcactaagattccccaaatattaatattttatcacatttgctttattctttctcactgtatatttttcttgaaatagttgagagcaaaaacaagaacatgttctttcacaaccacagtataactattaaagtcaatatattaactctgatttaatatcattgcctaattttcagacctaattcaaattttacctaacattccaccattgtgttttctggctcagaacctaattcagcatcacaggttgcatttagctgccatgtctctttcgtttccctaaataggaaacggcaattttttccttccatatcctttacacttttggagagtaagggccaattattttacaggctgtccctaaatttgggtttatttaactgtttctttgtgattagattcaggtgattcatatttttttggcagaaatgtccagaattggcattgtgtcttcagttcattatagcaggggacccctgttgacttgtcctattaattgtgatagtaactttgatctcttggttacatggggtttaccagctatttcaaatgaaaagtcactatttttctttttgtaaataatacatattttttgagagattctttgaatctctgtacagattccattttcaataatacttctgttcactaatttcagcacccactgactgatcatttttgtcagaaacaattgctggaattctgtttttttttttttaatgaaaaaaaaacaacttataagacattctaatataacttagctatctgacttttttttttttaacaaaattgagttcactcactacaagaatacttcactcttctagttctgcagttgtcaagggtgataaagtgctttgcatacactttataaaatatagaactaaaattatttaaaatgttgattgtacaaaggttaaatcaaaacagttgataaaaatcgaacaccaggaaacatcctcaattgagtcatttttatattatttatcataagataacaatgcat

SEQ ID NO: 24376 - DNA, 1272 bp, Homo sapiens
atagaaaacaaattaaaaattaaaaatgggcaaataacccaagtagatatatctgcaaagacatacaaacgtccaacaggtatataaaaaggtgatcaatataattaattatcagacaaacgcaaatcaaaaccacaagaatatatcacgtgatatttgttaagatggccattatataaaaatatatgtgttgatgcggacgtggggagtaaggaactctgtacactggtggtaggaatgtaaattggctcagtccttatgaaaagagtttgtaggctgctaaaaacaacaacaacaacaacaaaacctaccatatgacccagcaatccccacttccaggtaattatccaaaggaatatgaaatcaggattttgaacacacactttcactcccatgtttactggagcagtattagcaattgccaggattaggaaacaacataaatgcactttgatcaatgagtggaggaagaaaaagtggaatatacaatgaaatattactcaccccttaaaaaagaaggaaattgtgccatttgcaacagcatgcgtgaatcgggaagacatcgtggtaaatgaaataaaccagcttaaattttaaacatttaaaattagattttaaatgcttaaaaaacacactgagaactttaaattttcatttaaaatttaagtaaaattttaaaggcctaaaatttctaagcatgtagatcttatgtgcttttaccgcatacacacaactaatattgctaatggcaaaactaataataggtgtggggggaatctttggcaggtggtagatttgtctgtggccttgagagtggtgacggtttcttggatatatacgtatctccaaaacagtctagttcatggcattacatgtgtacaactttttgcatgttagtcgtaccataataagcatttttaagaaaaaggtaaaatataaatatgaagccaatctgaactttatgtcaactagttscaaatattttgcagtttcaaaaaaggcattccaggtaataaaacattggttgttatttgtgtattttttatgtttatcttttaacaaaactttcagccatagtagcaggaaacatatttgtgcgcgcatgagcgtgtgtgtgtgtgtgtgtgtgtgtttcgtggtataaccaaacccaaactcctgtagagggaagcagtgcggtgaagtgtcaaagtgagtggactgtatatttgcaaaacttagcattcactcctgagtctgctactcccaacgcatcacctaatttcaggaact

SEQ ID NO: 24377 - DNA, 1272 bp, Homo sapiens
atagaaaacaaattaaaaattaaaaatgggcaaataacccaagtagatatatctgcaaagacatacaaacgtccaacaggtatataaaaaggtgatcaatataattaattatcagacaaacgcaaatcaaaaccacaagaatatatcacgtgatatttgttaagatggccattatataaaaatatatgtgttgatgcggacgtggggagtaaggaactctgtacactggtggtaggaatgtaaattggctcagtccttatgaaaagagtttgtaggctgctaaaaacaacaacaacaacaacaaaacctaccatatgacccagcaatccccacttccaggtaattatccaaaggaatatgaaatcaggattttgaacacacactttcactcccatgtttactggagcagtattagcaattgccaggattaggaaacaacataaatgcactttgatcaatgagtggaggaagaaaaagtggaatatacaatgaaatattactcaccccttaaaaaagaaggaaattgtgccatttgcaacagcatgcgtgaatcgggaagacatcgtggtaaatgaaataaaccagcttaaattttaaacatttaaaattagattttaaatgcttaaaaaacacactgagaactttaaattttcatttaaaatttaagtaaaattttaaaggcctaaaatttctaagcatgtagatcttatgtgcttttaccgcatacacacaactaatattgctaatggcaaaactaataataggtgtggggggaatctttggcaggtggtagatttgtctgtggccttgagagtggtgacggtttcttggatatatacgtatctccaaaacagtctagttcatggcattacatgtgtacaactttttgcatgttagtcgtaccataataagcatttttaagaaaaaggtaaaatataaatatgaagccaatctgaactttatgtcaactagttgcaaatattttgcagtttcaaaaaaggcattccaggtaataaaacattggttgttatttgtgtattttttatgtttatcttttaacaaaactttcagccatagtagcaggaaacatatttgtgygcgcatgagcgtgtgtgtgtgtgtgtgtgtgtgtttcgtggtataaccaaacccaaactcctgtagagggaagcagtgcggtgaagtgtcaaagtgagtggactgtatatttgcaaaacttagcattcactcctgagtctgctactcccaacgcatcacctaatttcaggaact

SEQ ID NO: 24378 - DNA, 1272 bp, Homo sapiens
atagaaaacaaattaaaaattaaaaatgggcaaataacccaagtagatatatctgcaaagacatacaaacgtccaacaggtatataaaaaggtgatcaatataattaattatcagacaaacgcaaatcaaaaccacaagaatatatcacgtgatatttgttaagatggccattatataaaaatatatgtgttgatgcggacgtggggagtaaggaactctgtacactggtggtaggaatgtaaattggctcagtccttatgaaaagagtttgtaggctgctaaaaacaacaacaacaacaacaaaacctaccatatgacccagcaatccccacttccaggtaattatccaaaggaatatgaaatcaggattttgaacacacactttcactcccatgtttactggagcagtattagcaattgccaggattaggaaacaacataaatgcactttgatcaatgagtggaggaagaaaaagtggaatatacaatgaaatattactcaccccttaaaaaagaaggaaattgtgccatttgcaacagcatgcgtgaatcgggaagacatcgtggtaaatgaaataaaccagcttaaattttaaacatttaaaattagattttaaatgcttaaaaaacacactgagaactttaaattttcatttaaaatttaagtaaaattttaaaggcctaaaatttctaagcatgtagatcttatgtgcttttaccgcatacacacaactaatattgctaatggcaaaactaataataggtgtggggggaatctttggcaggtggtagatttgtctgtggccttgagagtggtgacggtttcttggatatatacgtatctccaaaacagtctagttcatggcattacatgtgtacaactttttgcatgttagtcgtaccataataagcatttttaagaaaaaggtaaaatataaatatgaagccaatctgaactttatgtcaactagttgcaaatattttgcagtttcaaaaaaggcattccaggtaataaaacattggttgttatttgtgtattttttatgtttatcttttaacaaaactttcagccatagtagcaggaaacatatttgtgcgcgcatgagcgtgtgtgtgtgtgtgtgtgtgtgtttcgtggtataaccaaacccaaastcctgtagagggaagcagtgcggtgaagtgtcaaagtgagtggactgtatatttgcaaaacttagcattcactcctgagtctgctactcccaacgcatcacctaatttcaggaact

SEQ ID NO: 24379 - DNA, 554 bp, Homo sapiens
tctaataatatcaagaagaaagaaaattgatttcatttctgagttctccctctatggtttctaaattaagacatgatggttaacgggattaaggttgtatagtcttggctgggaacactgagggagcatttactccctttaaaatatgaacttatataacaaaagaamcaggcttccatacccttctgtgacagggaatgtgtagaggatagagaaggtaaggaaaaagaaaataaaaataaatgcattgaaaatgtgtcccaaaacaaatataaatgcatcgattcttaacttccatgactgagcttcagctccctgagacagagcctggaagcctcagtgtgccttcccaagctgtccacagctaccgatttggccccatcctggctccctccctgccaggcacgcccatccccttgcagtttgcccctgtgaacccatccctgtctttatgttactgggcgttttcatccctggtgcatttgttcagctgcacgtttccacgtggaaatcgcccactgcctatcttttgtcgatcccattatcataatgct

SEQ ID NO: 24380 - DNA, 812 bp, Homo sapiens
aaggttgtctctcatcgccccccgctcgaccttcaaaaagctcccatagcctacacatctccagactgcactctcttccttcattcattcattctccttcattgattgatgcatgcatcagccctgcatttatatagcaaggcatatgctaaacactggaaagacaaagataagctggaccaaacaccagccatcattataagaagcccatattccttgggcctgcacagtctctcccctctcgacttccccagccagaatgaactttcttcagcttcttaaagacaccattgcttcaggggccctcctcacgctgctccctcctctagactagctctccatcgcctctgccctcgccatgttgctagtgcctgctcatccctccagttccagctcagttgccccttcctctggggagcttctctgcatgcccagcctggattaagcaccccctcacagaaatctgtacaaccttgtgcttctttctccaacacatttattacacccatcacttcagctgtaagtcgaatcatctcttgtttaaaaggaaaaccctctgggacttcctattttgctaggactaaaatctaaccccttcccacagcctgcatgaccctgcttgatctagtccctgcagacctytccaacctcccactcccaccagcgcaccctactcagccctgctcccagggcctcctatccagcccccgacacacttccagccccttccaacctgagaggcgttgcactggctacgccctgggcctggaaacttctggctccagttctcatgaagctctgactgtctgtca

SEQ ID NO: 24381 - DNA, 1457 bp, Homo sapiens
catttgccaggagaaaatgtcccaaagctgccgggaaatttactcaattgggaatttggtgtgtgtcttcataaataagaaaagttaataaataaaacccgtggataaagccagtgcttctgcctcatcctattgactcgtctctctgcgacccccaggctcctctgggcatcccactgtgcctatgagagccacttgactgggtgctgactttcttgaactaggttgagcaccctgacttgcccctaatgcacagacagactcaaattgggggtaaactaatggtcatccatccttctcggtaatcaccctgtagccaataacaagtactttggcaagagctggccaatgtgtccaggagaaaacagggcccaaagtcatgggcaggttcaatggtatccttgggtcctcctccaactaggtcctcctacccacaaagccttgggaatcttgcaaacctccaccagcctctatcgctgccaccactcagcagaccccatatcattccaaaagagacagtgggtcacagccctcttccaggatcctcaagggcaagccaaagacatgctctggtacaacccacttcagagccacctgcagcccaagatgtaaccctgctcccactcctgagcctgggtcctgaagcctctccatctccctaagagctgcagggacaccgtgccctagaaggttatgaggcctgagcacccagcccctgtcctcaaagagaacagggtttgtctcgcatcaacagcatccctcccccaaatacgacctcgcaccacaagctggcactctgtgtgccacattctgctcatagaagtagtttcatttggcccatggagttgaaaggtcttgtttttagtcggcagcatttaaaacttgagttgtttcacggaatctccaagtcttctggaaacaagtctgaccacaccaggccccacctccacgtggcatcactcagctggaactgatgactggttgcctctttggaggggacacgtgaccccacctggtccaccatgggcatttggctttgtgacccttgtatgaattactatgaaaacggagacttctcagatgtcaaaagctttttcccttaggatgttttacagtgaaactcaaacccccaataaaataaacacctggaacatctggtccaagaccctcctctggtcccagctatgcctccagctgcaaagaacacacatcaggagactctcaccacagaggctaccctggggcaaggggcaacagttaattaggcagctgaaagggaggtctcagtcccctggrgctgatacacctggccctgaacagtgaccacagagcctgttctttccagagagagaaaagaaagctccgcagaaagcagaggtggccatactgataaacaaatatttatcaagcactcactatgtgcttgggaaaacacaaagagcctgggggtaaggtca

SEQ ID NO: 24382 - DNA, 1061 bp, Homo sapiens
cccaccatgacccaaacacctcacactataggccccatctccagcaytggggatcacatttcaacacgagatgtggatgggacaagtatccaaactatgtcagaggcctccccctccctctcatcagaatcttctgtcctcagttcaggtgcatgctggcctccatgcctggcttcctagaaagtcatcttggcgccaaggggttgggcagggccactaggctgagggttggagccctatctctcctagtcccagcctgggtctccatcactgggtaacccgtactgctcgctgcattctctccacacctgctccctacagcccaggggtcagtctgggtgcaggcctgggtagaggtccaggagcagattctgccccccagctcatacttcctgtgcaccatggcagaaaatgcaccagcatggccaggagcactggcttgtccctgtagtctcagtgttttgggaggctgaggtggaaagatcgcttcagaccagcctgggcaacatagtcagaccctgtctcgaaaaaaataaaattaggcatggtggcatgcacctgtagtcccagctactcaggaggctgaggtgggaagattgcatgaacccaggaggtccaggctgcagtgaggtgtgattgcaccaccacaatccagcctgggcaacagagcaagaccctgcctctgaaacaagaaacaaagtgcaccagtgtgtggattccagcttctcctggtgtgtggacctgacctcactcagccccatcagtgagtaggaggcttcctgctgtcttccagaacactctcaccactacacctgtgttcctcctgcattctctggcaggctttgtgaggagacctgtcacctgcctctctggctgccctaaggcccagctcaaaccttccctgaccctgagaacctttttctgaagagtctttcccccacccataggccccctcatttcagagcttttggtggggtgagtacaaggatcgactctctgctaccagcctgggtagggtccctagggttgggtctctggatggcatatgagggtctagacca

SEQ ID NO: 24383 - DNA, 967 bp, Homo sapiens
acgagtcagcttcctgttttctcttatactcctcctgtctcggatcttcttagtctctctctaagctctacagaagtgtcttctttgttgtttccttatatactttatacctacctatgaattaccatcccctgaatgttatggcttctacgaaagataatgcaataattttatttttcttttgagacggagtytcgctctttcgccaggccggagtgcagcggcactatctcggctcactgcaagctccgcctcctgggttcacgccattctcccgcctcagcctcccaagtagctgggactacaggcgcccgccaccgcgccgggctaatttgttgtattttttagtagagacggggtttcaccgtgttagccaggatggtctcgatctcctgacctcgtgatccgcccgcctcgacctcccaaagtgctgggattacaggcgtgagccaccgcgcccggccaatgtttgtaatctagttatttcttagggaccaccagcactcactcttgtctgtgtttagcacaaagagcaaggggcagagtactcatcaactcaggaggaggaggagtcagtagagaaagcattcatgaaaaaaggcttacatctcagcaatttctaggcacaaaagacttatgaaattctaatattttattttgacagagttcttctttagcattatgttagatacaaaaatagattttgaaaaatcattttataataattatagtatttgcctatctgtttatgccacgtaaattctatgtataaataggtggagaggtagtcacaatattggggggcatgttgcatagtatcttgcaccatagctcactatcttttacataatacgctttagtatgttcagtaaaacacttttagtaaagggctcagaaattatgacagggtaataccagtcatagaatcaagaaaggcatctagttttatctacaaaagattttagaa

SEQ ID NO: 24384 - DNA, 581 bp, Homo sapiens
gcaggagaaactgaaaaccagcactgtcaggtgtgttaaaacccttaagattggttctcggctgggcgcggtggctcactcctgtaatcccaacactttgggaggccgaggcgggcggatcatgaggtcaggagatccagaccatggtgaaaccctgtctctacttaaaaaatacaaaaaaattagccgggcgcagkggcaggcaccctgtagtcccagctactcgggaggctgaggcaggagaatggtgtgaacccaggaggcggagcttgcagtgagccgagattgcaccactgcactccagcctgggtgacagagcaagactccatctcaggaaaaaaaaaaaaaaaaaaaaaaaaaatttgttctcatgaacttcctggcttagccaaccacatccacccttccatgtgtaggttaatattcccaatctgccacctgctcctccttctatgtgatttctcgagcaaatgcaaagagacttgtctggggcaactcacaccccacaccatcttgatttttgtctctggggtcttcaaagccctctccttgccacagccgagtgagtgcccctgtcttgg

SEQ ID NO: 24385 - DNA, 539 bp, Homo sapiens
attctgtaggttgcgtgttcactctgatgatagtttcttttgctgcgcagaagctcttcagtttaattagatcccatgtgccaattttggcattttttgaaaatgcttttggtgttttagtcatgaagtctttgcccatgcctatgtcctgaatggtattgcctaggttttcttctagggtttttatggttttaggttttatgtttaagtgtaaggagggatacatttaagccaaaaaggacagtctacatctctgcttattgtcccaaggcagcagaaatacaattcatagatcccaacacttagccttccccaccctagtcacacagcatccctcagcctgccaagggaattggttctgcagasacgagggatttgcccggggataaagaccccttctggttcagacatcaggagatacaaatgcaatacaccacagctgacacaactggacatcttcagtgttgcagtctcaccctatctctctgcttgccagctccagctcatcgggccagttatgagaaggaaaacatattttc

SEQ ID NO: 24386 - DNA, 513 bp, Homo sapiens
gcaaaccagctgaagaccacttcctggctgtgtgaccttaggcaatttactgtacctacctctctcatcctgtgtcctcatgcacaaattagagataagagtacgtacctcatgaggttgtttcaaagcaggggtgtctcatcttttgtcttccctgggccacgctggaagaagaaaaattgtcttggaccacacataaaatacactaacactaatgatagctgatgagctaaaaataaaataaaaataacaaaaaaatctaataatgttttaagaaagcttacgaatttgtgttgggccgcattcaacgtcgtcaataaaagttggctctgggtactctggtctgggtgccaggcactaaccaggcmcagcttggtgctgatagagagtcatccgctaaccctagctcagggagagccagggggcatgtctttctcagggtgagacacaggagggaggcagagactgggggagaaaagcaagaagggtgaagagggacaggctaatggttgg

SEQ ID NO: 24387 - DNA, 574 bp, Homo sapiens
tttctaagcacatttgtagcctctgcttgtaacacatctgctaatatcccattagctaaacaagtcacatggcaaacccaaaatcaaggaatggggaaatataccctgactccagcagaatgaactgccatgtcatatggcatgaaaacaagtarggatgaagaattagagccagtaattcaacctaccatgccacttaatcccaacaactctaggagttagacacttttatttttcttattttactgaagaggaaacagaggctgtgtcaagaaggtagtagtgagagggggtggagtgacactgagacgtgctaaccccagactccagctcttaaccacttatccatttcccgatgaaacagtgctctacagagaggaaaattaagcaacagatttgtcctccatgggctgtgtgatagacataccgtgtctactgtgtcaagggctttatccgtggtcctgaaataccctttatgcctaggcaccattgtttcctttgggatgcttataatttcaatctatcccttctggagattctaattcaggtgaagaaagagaaagacatgaacaaa

SEQ ID NO: 24388 - DNA, 574 bp, Homo sapiens
tttctaagcacatttgtagcctctgcttgtaacacatctgctaatatcccattagctaaacaagtcacatggcaaacccaaaatcaaggaatggggaaatataccctgactccagcagaatgaactgccatgtcatatggcatgaaaacaagtagggatgaagaattagagccagtaattcaacctaccatgccacttaatcccaacaactctaggagttagacacttttatttttcytattttactgaagaggaaacagaggctgtgtcaagaaggtagtagtgagagggggtggagtgacactgagacgtgctaaccccagactccagctcttaaccacttatccatttcccgatgaaacagtgctctacagagaggaaaattaagcaacagatttgtcctccatgggctgtgtgatagacataccgtgtctactgtgtcaagggctttatccgtggtcctgaaataccctttatgcctaggcaccattgtttcctttgggatgcttataatttcaatctatcccttctggagattctaattcaggtgaagaaagagaaagacatgaacaaa

SEQ ID NO: 24389 - DNA, 574 bp, Homo sapiens
tttctaagcacatttgtagcctctgcttgtaacacatctgctaatatcccattagctaaacaagtcacatggcaaacccaaaatcaaggaatggggaaatataccctgactccagcagaatgaactgccatgtcatatggcatgaaaacaagtagggatgaagaattagagccagtaattcaacctaccatgccacttaatcccaacaactctaggagttagacacttttatttttcttattttactgaagaggaaacagaggctgtgtcaagaaggtagtagtgagagggggtggagtgacactgagacgtgctaaccccasactccagctcttaaccacttatccatttcccgatgaaacagtgctctacagagaggaaaattaagcaacagatttgtcctccatgggctgtgtgatagacataccgtgtctactgtgtcaagggctttatccgtggtcctgaaataccctttatgcctaggcaccattgtttcctttgggatgcttataatttcaatctatcccttctggagattctaattcaggtgaagaaagagaaagacatgaacaaa

SEQ ID NO: 24390 - DNA, 545 bp, Homo sapiens
tgggattacaggcgtgagccaccgcgcccggcccccagcctcttaacagtaaatattctgggtactttgcaggctggaggtctcctggtccaagatgaggtgcaggatgggtagtgatgtggccctggagcctgcaggtccctgtggtttaactgtgtgattgttgttggcacgtgtcctgacctcttggggtcacaggtccctccactgttgacagggatgctgctgggctcccctgcgggctcatcctcaattcttagcgatggagtgtacgagaggcacatggaccctctgctgctaccaggcgagctcgcgagccccagccaggcccttggagctggggagatcccggcaccttctgagacacgtgagtrcccagctagcctggcagcctctgctgggccttaggtggggtgttgggcagaggcctgtggttgggagagggcagaagggcagccagggagtcaggggctccatggtccatgctatcattgggacttcctcctgtagtttctctgaatgttagacattgtttattaaattag

SEQ ID NO: 24391 - DNA, 528 bp, Homo sapiens
tgaataaaaattaaaaggaattactcaatacatgaacattgtacctraaagagatgaagtcctggatccatcttaagtttttggaatgagaatcactggactgtgagagtctaattttcttagaaatcctaatccagttatatctaacacttaggtaatttccccctttgttggggttgtcagaaggaataaattttttttaatttttatattttagaaatggcatgtgttacattgttcaggctggccttaaacaacaaacagtcctcctgcctcaacctcttaagtagctaggactacaggcatgcaccactgcacccagctggaataaatttttttttgtaaatgaattcctaatgtccttgttatgccatggactttataccctataacttctagcagccatctggtgttgtgccgttggttattattattcttcctataggaccccagatgcccttaacttggtttgatttatttctcccaaattgtttgaagaaaggatgcttttattagtgtaattccagg

SEQ ID NO: 24392 - DNA, 591 bp, Homo sapiens
gggcttggtcaggagcatggaattcaccccaaaggtgactgggatcrtgcaagggtttttaggaagggagtaaatagagaagattatttatttattcgtgtatgtatgtatgtatttttaattaaatcagttgatcggttcaggattttttcgtaaaattttatcatgagaactttcaaacatacagaaaagttgaaagaattatacaaggaacatctgcacatcccctatctggctgctataatggatattttgctagatttgctttatcacacatccgtccatcccttcatacttctaaccacttctagccactcaccaatccatgttcttttttttataagttgcagatattggaatactttacttctaagctcttcaacattcatagccttaactacagttcacacttgttaacacagatttgattttaaatataaaatcattacatgtcacagctagttagcaaatccaatccatggagcctgattccagggctagtgcttatgctcatattcatcatcacacggcatctggatggagcctcttgagctttcagcagacgactgagccaagaggtgcttgccaatt

SEQ ID NO: 24393 - DNA, 591 bp, Homo sapiens
gggcttggtcaggagcatggaattcaccccaaaggtgactgggatcgtgcaagggtttttaggaagggagtaaatagagaagattatttatttattcgtgtatgtatgtatgtatttttaattaaatcagttgatyggttcaggattttttcgtaaaattttatcatgagaactttcaaacatacagaaaagttgaaagaattatacaaggaacatctgcacatcccctatctggctgctataatggatattttgctagatttgctttatcacacatccgtccatcccttcatacttctaaccacttctagccactcaccaatccatgttcttttttttataagttgcagatattggaatactttacttctaagctcttcaacattcatagccttaactacagttcacacttgttaacacagatttgattttaaatataaaatcattacatgtcacagctagttagcaaatccaatccatggagcctgattccagggctagtgcttatgctcatattcatcatcacacggcatctggatggagcctcttgagctttcagcagacgactgagccaagaggtgcttgccaatt

SEQ ID NO: 24394 - DNA, 820 bp, Homo sapiens
ccgtcaaacgtaggggagaaactttgctttaagtgaccacaagagaaaatgtgagagtgaaatcttagtttttcaccagtggaaaattagttaagggttttaatttagggttgtgggggctgggtgtgtggagaccgtaagggagctgggacaagcacagctgtgtgacaaatattaatggctatcgcaattctcaaactgagaaattcaggtcagcctgtagggcaagctgcctctaaatgcaacaacctttttatatggctgactacttcttccatgagtaatttttttattttttcacttagctcaagttggaattaatggttctagtgatttgtgttgccttagatgaaattcttaacattgcaattttattaatcctacctgcaaagagagagcactcgcgcctgtaatccctgcactttgggagggtgatttctcatttctcaaaactgagaaaatagtttttcatgtaagttaatatttaaattttcaaattaggggctgggcacagtggctcacgcctgtaatcccagcactttgggaggccgaggcgggtggatcacgaggtcaggagattgagaccatcctggctaacacggtgaaaccccatctctactaaaaatacaamaaattagccgggcatggtggtgggcgcctgtagtcccagctactcgggaggctgaggcaggagaatggcttgaacctgggaggcggagcttgcagtgagccgagatcgcgccactgcactccagcctgggtgacagagcaagactccgtctcaaaaaaatacataaataaacaaataaatttcaaatta

SEQ ID NO: 24395 - DNA, 820 bp, Homo sapiens
ccgtcaaacgtaggggagaaactttgctttaagtgaccacaagagaaaatgtgagagtgaaatcttagtttttcaccagtggaaaattagttaagggttttaatttagggttgtgggggctgggtgtgtggagaccgtaagggagctgggacaagcacagctgtgtgacaaatattaatggctatcgcaattctcaaactgagaaattcaggtcagcctgtagggcaagctgcctctaaatgcaacaacctttttatatggctgactacttcttccatgagtaatttttttattttttcacttagctcaagttggaattaatggttctagtgatttgtgttgccttagatgaaattcttaacattgcaattttattaatcctacctgcaaagagagagcactcgcgcctgtaatccctgcactttgggagggtgatttctcatttctcaaaactgagaaaatagtttttcatgtaagttaatatttaaattttcaaattaggggctgggcacagtggctcacgcctgtaatcccagcactttgggaggccgaggcgggtggatcacgaggtcaggagattgagaccatcctggctaacacggtgaaaccccatctctactaaaaatacaaaaaattagccgggcatggtggtgggcgcctgtagtcccagctactcgggaggctgaggcaggagaatggcttgaacctgggaggcggagcttgcagtgagccgagatcgcgccactgcactccagcctgggtgacagagcragactccgtctcaaaaaaatacataaataaacaaataaatttcaaatta

SEQ ID NO: 24396 - DNA, 1209 bp, Homo sapiens
aaggccagcatctcaatagcctctggggagggcccaggctctggaattgccctgggtcaaggtggcccctctcatagctcagcaatatccatgccggccttcagggggacatgcatggggagcttgccgtcttacatggctcttctcttatctgagtcattttcagtgctaatatatctactttacgagagagaagcattgggcctctctgttagacaggcccccaagtggccaagggcttttgctgttatgcgttcttatgacacatgtcaatgattctccaagtatggtccccagaccagcgacatccatgtcacctggagctagttagaaaagcaatcacttgggccctcctcaggccttctgagtcagaacctctgcaggtgggcctcagcaagtatgttttcacaaagcttccagatcacrctgccacacaatgaggtatgagaaccactgaaccactcaatgcccacacaccttccatctatcactttgtacctgaagaactggagtcatgtgtcagctctgcagctgtcaaaacaatttcccatgatgtcagccccctggcttcctctgacctttccccagatgaagtcagggctgatgggatcagctctcctcaagatcccagttcatctgaggccaagccccagacccctgaagtgttgctctatcaaccaacaagctgcccttccacatatcagtagcaggttttcctgtctgctgtgtttactctgcaaaatgatggcatggattaatgagcaattctatccaaaagtctaggatagactaaggacccagggcattggtgtgctatgtgcggttggttcacagtctgacattccacactcatcacacttgttaatgtttcctgccacaggcccctcactgagatgtggttggagttttttgatgtgattgtttgatgtgtctgtatccgacagcagacttcctaggaggttccctaaagcactgctcatgaaggaagagccctcaggtcatcgtatgtagttttcttttcatatctcctttcatttctcagacttcagggaacatgaaaattctgatgtcttctgcctccagatacccttcgctgaagagtcatgaacaacccatggggtgagcaggcctccctctgatgggtgcactcacatggatgcctgtgtcactaggaaagggccaatgttacccccagcaaccccaagaagg

SEQ ID NO: 24397 - DNA, 1209 bp, Homo sapiens
aaggccagcatctcaatagcctctggggagggcccaggctctggaattgccctgggtcaaggtggcccctctcatagctcagcaatatccatgccggccttcagggggacatgcatggggagcttgccgtcttacatggctcttctcttatctgagtcattttcagtgctaatatatctactttacgagagagaagcattgggcctctctgttagacaggcccccaagtggccaagggcttttgctgttatgcgttcttatgacacatgtcaatgattctccaagtatggtccccagaccagcgacatccatgtcacctggagctagttagaaaagcaatcacttgggccctcctcaggccttctgagtcagaacctctgcaggtgggcctcagcaagtatgttttcacaaagcttccagatcacgctgccacacaatgaggtatgagaaccactgaaccactcaatgcccacacaccttccatctatcactttgtacctgaagaactggagtcatgtgtcagctctgcagctgtcaaaacaatttcccatgatgtcagccccctggcttcctctgacctttccccagatgaagtcagggctgatgggatcagctctcctcaagatcccagttcatctgaggccaagccccagacccctgaagtgttgctctatcaaccaacaagctgcccttccacatatcagtagcaggttttcctgtctgctgtgtttactctgcaaaatgatggcatggattaatgagcaattctatccaaaagtctaggatagactaaggacccagggcattggtgtgctatgtgcggttggttcacagtctgacattccacactcatcacacttgttaatgtttcctgccacaggcccctcactgagatgtggttggagttttttgatgtgattgtttgatgtgtctgtatccgacagcagacttcctaggaggttccctaaagcactgctcatgaaggaagagccctcaggtcatcgtatgtagttttcttttcatatctcctttcatttctcagacttcagggaacatgaaaattctgatgtcttctscctccagatacccttcgctgaagagtcatgaacaacccatggggtgagcaggcctccctctgatgggtgcactcacatggatgcctgtgtcactaggaaagggccaatgttacccccagcaaccccaagaagg

SEQ ID NO: 24398 - DNA, 913 bp, Homo sapiens
tgtaattggtttctttctgatggctccatgctaaggccctgctctggcctaactgctttgggctttgtgtaatcaatcttaagtccttggcggtttttcttttagattttttttccatataaaatctctatctggccacacatggtggccgtgcctgtaatcccagcacgctgggaggctgaggcgggtggattgcttgaggccaggagttcaagaccagccctggccaacatggtgaaaccccatctctactaaaaatacaaaaatcagtggggcctggtggcgtgcacctgtaatcccagctactcgggaagctgaggcaggagaatcgcttgaacctgggaggcagaggttgcagtgagctgagatagtgccactgcacttcactccaggatgggcgaaaaagtgtctaaaaaaaattaaaatttaaattaaaaaaaaatatacaatctccgtcttctagattttataatgaggactctactttttccttttgggtagcatggcttgagccatcttgtcaggcatacctagcgtcagattcttttctgctaacagattttctctgtgaccctggagacattttctaacttttctgagactcatttattcaaatgtttatgtgacaggcattgtgctgggccctggagatacagtgatcaatggcatcctataaggttttgatatctgtgaagtcactgccaccattgacacattctagggactcagtaaattgtagctgtgtccgataccatcatttggaaagagcactatcagattttggattcaaactgaatgcagccaagcactgccttttggtaaaaatgtggacacagtaacrctagtagggggcagtgtgagggtgggagatgtgttttcagaagaaggaaactctagattagcatcacacaag

SEQ ID NO: 24399 - DNA, 1253 bp, Homo sapiens
ctgtaagagccgctcagagagctgccactgccataatttagcaactgatagtccgggccatttggataacgccccgagaaggagtttacaaagtacgagctcatttgggtgattttggagggcttgatttgtggatcgtggtcgttataaccctgtgcttcacgatttatgatgtattaatgaattatagcgatgcactgtacttcgttttgctatgtatgcggccaaatatgggggggggggttggaaggggggtgggggggcgttagggaatcacgtgcttttgttgaccagtcgtaaattctcgctgatgacctcaagaggtaattcatgctctatggttacaaataatgacgatccgagaatcgttagggccgattcaatgcgagcctccgagagagggggaaaaaaggagaagggggagaaacagagagaaggttggctttggcctctgagcagagcgcgccacctcccggcgaccgacgggagcgcgggcgtgagaccgccatggcggcgggcggctgcctccctgctggctccctgcaggctccctgcagtcgccgggagagaaagaaacccggccaaggctcagccacagggttgagccttttagagcaggggttgggctttttacccactttcttgtgggtggggttagcctctctatttggttctttctccctacatcatcattgtcgttattattttaactttggatgagaagatcaaagatagagttgcttttccctttcttgggctttgcaagtctccgaattggaggcggaaatgggggaagggttggaagttgtgtgtgaaaaacaattattgcaacgggttttccccaggagcttagyccggcctgcatcctggtggaactgctgttaccggtccacagcgcccaggccgagccggcagggctgggcgggaggcttgaaaaagaaggagaagcgttcacttctcctgggccacttggaagttcgaaatccccttccggacctccttggtggtccttagcccaggcgtggggagtgacagagcaggacagggaccccagaaaccgagcacagctggggctaagcggcctagttgccgaaaagactgcagcggccaccgcgtctgctgcttagtttgagtagtaacatgtgtctgagagtttgtaaagcgggatcccttcccctcctcctcggctattgcattcggaggccccactacaggcccctcactcgcagctaggcagtttgagaatttgcctg

SEQ ID NO: 24400 - DNA, 612 bp, Homo sapiens
attacctactgtatacaaactggctggattacaaggacctgctttacagactaatgttcattataattcacaagagtcaaggggatcttattgtacaatgaaatacagtagttgcggcctgctgtggactgaaaggtgccagcatccattctgcattcatatgttgaagtcccaacccctaaggtgactttattggagatagaaaccttatggaggttrgtaaggttaaacgaggtcctaagggtgaagtcctaatctgaaaggatatgtgtccttataagaagaaacaccagagaaccctctctgctcctacaaccatgtaaggacacagaagaaggcaaccatctgcaagccaagaggagagcccccaccagaaactgaatcagttcacaccttgaccttggacttcccagcctctagcacagtaagaaaataaactaagccctttattctatgatattttgttatagcagcccaaatagacaaagacagagacgcttcataaatcagactggtggcctgattaatttgtcttttgactatgccctcatcagtcatgttggagaatagtcccccaaatctatataagaactcacttataatttacacata

SEQ ID NO: 24401 - DNA, 543 bp, Homo sapiens
ttttccaaacctactctttttagtctgtgcatctggaagtgaaagttttagaaagggtaaagtcacttaatggaaagggcccagatctagcccctcggagccaagctgtccaactagaaattctgcattagtatttgcgggtgagtattaacctttgtcgggctaagccatagagaattgttttaattgcagtcagcctgattttatagtgaccttggatccagaatattacttagatattactagtatctacttcataaagtctctgtgaggatggaataagataatgaactcaaatgtaaagcaactccttctttacatgagtttgagtctgtagtataaaaattgtaagttatgtgttttatgatatatgcctctaaaaataaatacacatgcaattatacacacacacacacacacacacaagcatatatatatgtttgtaaacttacacctcrctcagtccatatattcctccactgtgaatagaaatgtatagaaagcaagcggtctttagggtggctatttggtggttaccagaca

SEQ ID NO: 24402 - DNA, 809 bp, Homo sapiens
ggaggggggctagggataaaaacactacacgttaagtacaatgtatactactcaggtgatgggaacactaaaatctcagaattcaccactatataattcatccatgttacaaaaaaccacatgtaccccaaaagctattgaaataaaaaataataaagacacttttacgaagatactagaattagttcatacaaaactagcatgggagcttctttggtagatgatgaactctgtgagggagggacatattcacttttgcatgcccagaatctagcatgatatttggcagacagtgggtgccagagaagtgtttattaatttggattttttaatgtaccttaattgtttaatgtctgtcttccttagcataggtatttcctagtctctacaaactgtgaataatgaggtataaagcacatacttatggtaacatcatacacagtgtcacaagattgatcctaacatagcttcacttttatgtaccttttatttcacttattacatagatgtgagtgaacaccccaaggaaagacaggtrttagggctttagacatatttaagaacgtgaacatgcacattagcctatagtttgggagcaacataaacactagaaaacttcattagtctccttcaagggtgtgttcatagtaggtactcaatagatgtcaagtgactgactgctaaagcaataatgggggctttgggcacttgtcaaaaataaaagctgaattaatgatgagaataaatttctgaccaacatgggaaaaatacctgtactattaaatcctggataactataattgtgccca

SEQ ID NO: 24403 - DNA, 650 bp, Homo sapiens
gaaggagttgtggtacrgtggaaaaccatgaacccctctaatttttgttgtacaagtacaagtggtgaaaatacaatgcttgtagtcttttcctgcttggaaagaagtgttgtcctcatctcatagaccatcctttcttagttaggaaaggtgagataagaatggctgttacagaaaataagaccattttggcttatgtaacctgagcaagaggtgctcttcctggtacacacttacttagttcagcaggctaccacacgaaagttcgaggtcaaaattccagctagtaatcagaatttctttgtctcttattgtcctctgggaatataatttccttggcatattgcagaactggtaaattagtaagtaaaacatcatttgtgcattcctgagttttctgtatatatatatatacacacacacacacacacacacacacacacacatatgtgtatatatatatacatatatataaaacatatatatgtccttcaacatatgtaactatgaataactatgctgtatacatacagtttccaatttgcagtttcaatatagtatacagtattcaatgaattatgttagatattcatattttattatgaaagtggctttgtgttagataattttgcccaactgtaggctaatgt

SEQ ID NO: 24404 - DNA, 650 bp, Homo sapiens
gaaggagttgtggtacggtggaaaaccatgaacccctctaatttttgttgtacaagtacaagtggkgaaaatacaatgcttgtagtcttttcctgcttggaaagaagtgttgtcctcatctcatagaccatcctttcttagttaggaaaggtgagataagaatggctgttacagaaaataagaccattttggcttatgtaacctgagcaagaggtgctcttcctggtacacacttacttagttcagcaggctaccacacgaaagttcgaggtcaaaattccagctagtaatcagaatttctttgtctcttattgtcctctgggaatataatttccttggcatattgcagaactggtaaattagtaagtaaaacatcatttgtgcattcctgagttttctgtatatatatatatacacacacacacacacacacacacacacacacatatgtgtatatatatatacatatatataaaacatatatatgtccttcaacatatgtaactatgaataactatgctgtatacatacagtttccaatttgcagtttcaatatagtatacagtattcaatgaattatgttagatattcatattttattatgaaagtggctttgtgttagataattttgcccaactgtaggctaatgt

SEQ ID NO: 24405 - DNA, 650 bp, Homo sapiens
gaaggagttgtggtacggtggaaaaccatgaacccctctaatttttgttgtacaagtacaagtggtgaaaatacaatgcttgtagtcttttcctgcttggaaagaagtgttgtcctcatctcatagaccatcctttcttagttaggaaaggtgagataagaatggctgttacagaaaataagaccattttggcttatgtaacctgagcaagaggtgctcttcctggtacacacttacttagttcagcaggctaccacacgaaagttcgaggtcaaaattccagctagtaatcagaatttctttgtctcttattgtcctctgggaatataatttccttggcatattgcagaactggtaaattagtaagtaaaacatcatttgtgcattcctgagttttctgtatatatatatatacacacacacacacacacacacacacacacayatatgtgtatatatatatacatatatataaaacatatatatgtccttcaacatatgtaactatgaataactatgctgtatacatacagtttccaatttgcagtttcaatatagtatacagtattcaatgaattatgttagatattcatattttattatgaaagtggctttgtgttagataattttgcccaactgtaggctaatgt

SEQ ID NO: 24406 - DNA, 650 bp, Homo sapiens
gaaggagttgtggtacggtggaaaaccatgaacccctctaatttttgttgtacaagtacaagtggtgaaaatacaatgcttgtagtcttttcctgcttggaaagaagtgttgtcctcatctcatagaccatcctttcttagttaggaaaggtgagataagaatggctgttacagaaaataagaccattttggcttatgtaacctgagcaagaggtgctcttcctggtacacacttacttagttcagcaggctaccacacgaaagttcgaggtcaaaattccagctagtaatcagaatttctttgtctcttattgtcctctgggaatataatttccttggcatattgcagaactggtaaattagtaagtaaaacatcatttgtgcattcctgagttttctgtatatatatatatacacacacacacacacacacacacacacacacatrtgtgtatatatatatacatatatataaaacatatatatgtccttcaacatatgtaactatgaataactatgctgtatacatacagtttccaatttgcagtttcaatatagtatacagtattcaatgaattatgttagatattcatattttattatgaaagtggctttgtgttagataattttgcccaactgtaggctaatgt

SEQ ID NO: 24407 - DNA, 650 bp, Homo sapiens
gaaggagttgtggtacggtggaaaaccatgaacccctctaatttttgttgtacaagtacaagtggtgaaaatacaatgcttgtagtcttttcctgcttggaaagaagtgttgtcctcatctcatagaccatcctttcttagttaggaaaggtgagataagaatggctgttacagaaaataagaccattttggcttatgtaacctgagcaagaggtgctcttcctggtacacacttacttagttcagcaggctaccacacgaaagttcgaggtcaaaattccagctagtaatcagaatttctttgtctcttattgtcctctgggaatataatttccttggcatattgcagaactggtaaattagtaagtaaaacatcatttgtgcattcctgagttttctgtatatatatatatacacacacacacacacacacacacacacacacatatgtrtatatatatatacatatatataaaacatatatatgtccttcaacatatgtaactatgaataactatgctgtatacatacagtttccaatttgcagtttcaatatagtatacagtattcaatgaattatgttagatattcatattttattatgaaagtggctttgtgttagataattttgcccaactgtaggctaatgt

SEQ ID NO: 24408 - DNA, 608 bp, Homo sapiens
aagacacgtctttttctgaggctgctgtgtacatttttttcaatgcgtcttgtcaacctgggcaagaaaatgaggactagaggggattgtcatgaacattgttcaatgcacttgctctgtcaaattgttttttaatattttactcagcccagaaatgagtttaacagttttctgtagcacagtaatttccagaatgcatgtgtgaggccactgagccgttgtgttcctcatcagagttaaaggaattgtattaatcttttcatagtctcccttcgcatacagcagagtgactgattgcttggcatatgctagtgtgccacatggtaccaaacagatggagascattcaggcagaagctgggtcgagccaagatgtgctccacaattttgtgtttgtgaagagaaacaactgggcgggctttctttgcttcctctggtatttggattctgaactaggaggggggaaaaatcaccctgaattaatcgctgtcacttctattgatctggattctattaagtgagaacacatttgcaattaatccacagaggcagagcaactcaaataaattagtttatgatgggcattataaaatgtatcaagagattttg

SEQ ID NO: 24409 - DNA, 550 bp, Homo sapiens
tttttttttcacagattttcactcttgttgcccaggctggagtgcaatggcatgatctcggctcactgcaacctccgcctcctargttcaagtgattctgctgcctcagcctcccaagtagctgtgattacaggtaccccccacacgcccggctaattttttgtatttttagtaaagatggggtttcaccatgttaagcaggctggtcttgaatgcctgacctcaggtgatccacccaccttagcttcccaaagtgctgggattacaggcgtgggccaccgcgcctggccaatgaacatattttcttttttctcagaggtaatattgttctgcttttcgtgtttataatttttgtcaccttctttttttgtcattatagttttgctatacatatatcatatatgtaatacacatatatatgaaatccctaaatatatattgttttagtgtaagtgataccaccctatgtgccttcttttgtcacttcatcaacaacatttatatatgtgagtttcttccattttgagacatgtatttcattgcataaacc

SEQ ID NO: 24410 - DNA, 550 bp, Homo sapiens
tttttttttcacagattttcactcttgttgcccaggctggagtgcaatggcatgatctcggctcactgcaacctccgcctcctaggttcaagtgattctgctgcctcagcctcccaagtagctgtgattacaggtaccccccacacgcccggctaattttttgtatttttagtaaagatggggtttcaccatgttaagcaggctggtcttgaatgcctgacctcaggtgatccacccaccttagcttcccaaagtgctgggattacaggygtgggccaccgcgcctggccaatgaacatattttcttttttctcagaggtaatattgttctgcttttcgtgtttataatttttgtcaccttctttttttgtcattatagttttgctatacatatatcatatatgtaatacacatatatatgaaatccctaaatatatattgttttagtgtaagtgataccaccctatgtgccttcttttgtcacttcatcaacaacatttatatatgtgagtttcttccattttgagacatgtatttcattgcataaacc

SEQ ID NO: 24411 - DNA, 550 bp, Homo sapiens
tttttttttcacagattttcactcttgttgcccaggctggagtgcaatggcatgatctcggctcactgcaacctccgcctcctaggttcaagtgattctgctgcctcagcctcccaagtagctgtgattacaggtaccccccacacgcccggctaattttttgtatttttagtaaagatggggtttcaccatgttaagcaggctggtcttgaatgcctgacctcaggtgatccacccaccttagcttcccaaagtgctgggattacaggcgtgggccaccgcgcctggccaatgaacatattttcttttttctcagaggtaatattgttctgcttttcgtgtttataatttttgtcaccttctttttttgtcattatagttttgctatacatatatyatatatgtaatacacatatatatgaaatccctaaatatatattgttttagtgtaagtgataccaccctatgtgccttcttttgtcacttcatcaacaacatttatatatgtgagtttcttccattttgagacatgtatttcattgcataaacc

SEQ ID NO: 24412 - DNA, 550 bp, Homo sapiens
tttttttttcacagattttcactcttgttgcccaggctggagtgcaatggcatgatctcggctcactgcaacctccgcctcctaggttcaagtgattctgctgcctcagcctcccaagtagctgtgattacaggtaccccccacacgcccggctaattttttgtatttttagtaaagatggggtttcaccatgttaagcaggctggtcttgaatgcctgacctcaggtgatccacccaccttagcttcccaaagtgctgggattacaggcgtgggccaccgcgcctggccaatgaacatattttcttttttctcagaggtaatattgttctgcttttcgtgtttataatttttgtcaccttctttttttgtcattatagttttgctatacatatatcatatatgtaatacacatatatatgaaatccctaaatatatattgttttagtgtaagtgataycaccctatgtgccttcttttgtcacttcatcaacaacatttatatatgtgagtttcttccattttgagacatgtatttcattgcataaacc

SEQ ID NO: 24413 - DNA, 593 bp, Homo sapiens
tacaggtgcctgccaccacacctggctaatttttgtattttttacagaaaccaggttataccatgttgcccaggctggtctcaaactcctggactcaagtgatccgctcacctcgccctcccaaagtgctgggattacaggcatgagccaccatgctcagcctaataaatcaattcttgattaaaaatgcaaatatatatatacgtacatatatttatataacctcatagtataaaactccccaatgtagttctccattctcttccaaaagctgacacacagaaaatgttctattttaagttggtcatgaattgatgatagttcctcattgctctgaataaaagaatagtctgcatctttgagtgtttattcagaaatacatttcaaaaaaatgacttaaaatagtttccaatttgaatattgttaaattaaaaaaaatcaaacccaaaatttgctgttagaagattttcatttagacatgtctcacttgaacttatagttcccttatgaaattggaaatcattcctagtagcggttttcwaaattatttgcttgcctattctctaaaggatttttcattcacttatttaaca

SEQ ID NO: 24414 - DNA, 545 bp, Homo sapiens
attcttggagataatgacactaaacaacagaagcattcctttaaagtttctgtagagaaaaatgttcagtgtggcaccattgctagataaaatgaatgtaaataaataagtgaagtaaaaataaataaaaatcagcaagctttcaaatttccaaatattctgaaatattaaaatatactttttatttaaaataatatacatagctcttaaaagtgatcttatcataatcttttaaatgttaaaatatcacagtttataaataggtatatgccaaaccatgaataaccacagattagtaagtgaattttagaagtagccaatttggaaataattcaaaatatagttattgtaattatttaattgccataaatttctcaagttctctagggcttttttcctcttctctataccgcttttattttmtatcaattcaacttactgagaggaattttcaaggctttttttcttttcagcaagcctgttagccatgctaagcaaatactgagtgccaggttttttaacttaatgacaagtggctggaaact

SEQ ID NO: 24415 - DNA, 411 bp, Homo sapiens
atagcatgtttaggtgggtctcaatttgctttctgtttttttagagacagggtcttgctctgtcactcaggctggagtgcagtggcacgcacatagctcactataaccttgaattcctgggctcacggcaacctccttcctcggcctcccaaagctctgggattacaggtgtttaccaccacacctggccttcaatttttaaacatataataaactgagctgtggtaaatattcttttttttctttttcttcttctttttttttttttttgagatggagtctcactctgttgtccaggatggagkgcagtggtgtgatctcggttcacggcaacctctgcttcctgggttcaagctactcctgcctcagcctcctgagtagctgggattacaggcacatgcctggctgatt

SEQ ID NO: 24416 - DNA, 411 bp, Homo sapiens
atagcatgtttaggtgggtctcaatttgctttctgtttttttagagacagggtcttgctctgtcactcaggctggagtgcagtggcacgcacatagctcactataaccttgaattcctgggctcacggcaacctccttcctcggcctcccaaagctctgggattacaggtgtttaccaccacacctggccttcaatttttaaacatataataaactgagctgtggtaaatattcttttttttctttttcttcttctttttttttttttttgagatggagtctcactctgttgtccaggatggagggcagtkgtgtgatctcggttcacggcaacctctgcttcctgggttcaagctactcctgcctcagcctcctgagtagctgggattacaggcacatgcctggctgatt

SEQ ID NO: 24417 - DNA, 593 bp, Homo sapiens
ggaatgcagtggtgcgatctcagctcactgcaagctcaacctcccgggttcacgccattctcctgcctcagcctcctgagtagctgggaccaaagacccctgccaccacgcccggctaatttttttgtatgtttagtagasacaaggtttcaccgtgttagccaggatgatctcaatctcttgaccttgtgatcgcccatctcggcctcccaaagtgctgggattacaggcgtgagccaccgcgcccagcccaaagtcaatgttttgaccaagagcaaggctaccacttgttattattaattaattaattaattaattaatttttgagacagggtcttactatattgcctaggctggcttcaaactcccaggctcaagtgatcctcctgccctgcctcctgagtagctggaattacaggtgcgtggcgccatgccttactatttatttctaaacacattgcagaacatggaatttagggaggacaaattttgatgaatcaaataggtatagtgatatgggtagaagattggtttactttatcataattccttaaatacatattgtgtacttgattaatgaaatgttaaaaata

SEQ ID NO: 24418 - DNA, 566 bp, Homo sapiens
tgaatgtggtaaacttggggacggccactaagcttcagtcagctaaatacaggycaagtattgctggaattttttaattattcagaaaacagaaatccatcagaacttattaacattagtgtcactaaagttgatctacaaccaccccccccgcccacatacacactctcacaactacgaagtttgactggctttttaaaaagaaaacaaatccagatatgtatgtgaatctcccaatttttgaaatctgaagtctcaaaatttttaaaacttctatgcatcccaaacaaaatgtgtgtctgggccagataaatcccagctgtccagttagcacccgagtcccacttacatgtgcccctactcctcagatggcaactggtttcactccaaagccagtctcctgcccacggacccttttcaaagaccggaggacctttagggtggcacgggaggctttgggaaattctgaggagctctttcacataagccctttctccttagacccagctgcctcccttcctgggtttaattgctttacctctgcatgtatgagctgcaacagaatt

SEQ ID NO: 24419 - DNA, 566 bp, Homo sapiens
tgaatgtggtaaacttggggacggccactaagcttcagtcagctaaatacaggccaagtattgctggaattttttaattattcagaaaacagaaatccatcagaacttattaacattagtgtcactaaagttgatmtacaaccaccccccccgcccacatacacactctcacaactacgaagtttgactggctttttaaaaagaaaacaaatccagatatgtatgtgaatctcccaatttttgaaatctgaagtctcaaaatttttaaaacttctatgcatcccaaacaaaatgtgtgtctgggccagataaatcccagctgtccagttagcacccgagtcccacttacatgtgcccctactcctcagatggcaactggtttcactccaaagccagtctcctgcccacggacccttttcaaagaccggaggacctttagggtggcacgggaggctttgggaaattctgaggagctctttcacataagccctttctccttagacccagctgcctcccttcctgggtttaattgctttacctctgcatgtatgagctgcaacagaatt

SEQ ID NO: 24420 - DNA, 566 bp, Homo sapiens
tgaatgtggtaaacttggggacggccactaagcttcagtcagctaaatacaggccaagtattgctggaattttttaattattcagaaaacagaaatccatcagaacttattaacattagtgtcactaaagttgatctacaaccaccccccccgcccacatacacactctcacaactackaagtttgactggctttttaaaaagaaaacaaatccagatatgtatgtgaatctcccaatttttgaaatctgaagtctcaaaatttttaaaacttctatgcatcccaaacaaaatgtgtgtctgggccagataaatcccagctgtccagttagcacccgagtcccacttacatgtgcccctactcctcagatggcaactggtttcactccaaagccagtctcctgcccacggacccttttcaaagaccggaggacctttagggtggcacgggaggctttgggaaattctgaggagctctttcacataagccctttctccttagacccagctgcctcccttcctgggtttaattgctttacctctgcatgtatgagctgcaacagaatt

SEQ ID NO: 24421 - DNA, 566 bp, Homo sapiens
tgaatgtggtaaacttggggacggccactaagcttcagtcagctaaatacaggccaagtattgctggaattttttaattattcagaaaacagaaatccatcagaacttattaacattagtgtcactaaagttgatctacaaccaccccccccgcccacatacacactctcacaactacgaagtttgactggctttttaaaaagaaaacaaatccagatatgtatgtgaatctcccaatttttgaaatctgaagtctcaaaatttttaaaacttctrtgcatcccaaacaaaatgtgtgtctgggccagataaatcccagctgtccagttagcacccgagtcccacttacatgtgcccctactcctcagatggcaactggtttcactccaaagccagtctcctgcccacggacccttttcaaagaccggaggacctttagggtggcacgggaggctttgggaaattctgaggagctctttcacataagccctttctccttagacccagctgcctcccttcctgggtttaattgctttacctctgcatgtatgagctgcaacagaatt

SEQ ID NO: 24422 - DNA, 452 bp, Homo sapiens
tcgggaggctgaggcaggagagccgcttgaacccaggaggcagagattgcagtgagttgagatcrcgccattgcactccagcctgggtgacagagtgagactccatctcaaaaaaaaaaaaaagaaaaaagaaaatatgtaggcccaaacatatctacaaaagactcaagaaaataaaagacattaaatatcaactagatagttgacaggtagattcacatccagaatttcctttcaaatttcttttttctttctacatctttaagggaagaaaggcttccatagtgtgtccagatatggttggcaagccgctggaaactcaagtctgcccaaataacaaatctacaccaacagcctagaggagatggaaggagatggtgtagggcaggggcaatggcccttcccttcagattagatgacttgcataaaaggtcaggaatcacaaactacat

SEQ ID NO: 24423 - DNA, 452 bp, Homo sapiens
tcgggaggctgaggcaggagagccgcttgaacccaggaggcagagattgcagtgagttgagatcgcgccattgcactccagcctggrtgacagagtgagactccatctcaaaaaaaaaaaaaagaaaaaagaaaatatgtaggcccaaacatatctacaaaagactcaagaaaataaaagacattaaatatcaactagatagttgacaggtagattcacatccagaatttcctttcaaatttcttttttctttctacatctttaagggaagaaaggcttccatagtgtgtccagatatggttggcaagccgctggaaactcaagtctgcccaaataacaaatctacaccaacagcctagaggagatggaaggagatggtgtagggcaggggcaatggcccttcccttcagattagatgacttgcataaaaggtcaggaatcacaaactacat

SEQ ID NO: 24424 - DNA, 1217 bp, Homo sapiens
cagagaggctgctttagaggggatggtggtgggcttattttgtggttgaggctcttaagggaggagagagaggacaggaggggaagggagggttcagccacagagctggcagccaggccaagaggatcagccaggagcaataagtggcttgagaatgctggtgataaataaagacatctttattgtctcttcccaaagcacacggtgtttctaacagagcttcattcattcccaggcaggctagagagaggacagaggtggagccaagacgacatagccaggagtagaaaggagccaggtggggcaggggtgccagggagggcagctggagggcgggtctcagggagccccagccacagtgacgaagatgtccttgtagcctttgatctccttgacctcgttgctgctgatgagaacctggagctggcggggtccagctttggtcgggtagaggtccagttgaatttggagggtgtgtccggccaccagagtcccaaggctgaaagtcagaaacagcctgtgagagcctcgaggacttcctgctggcggcaggggtgatctggttcccctctgggtgggtaagaggctcccactcaccaccaccactgagctcagcctttcctgaggagggtgagaaagtgggggcagagaggcactgcacaggagactgaggagggtcctgtgaygccatggggcacccctttcctgagaccagcaagggggaggtgggcagaagcgtcacttactcctttgctatctgcccattgatgaggccgcttccttccagcaccatcgtgcagctgctcagagccaccattaaggtgttggtgagggtgacatggactctcagcgccttgcccacctcagccctctcagacacctgtgtggagagaagtcagcaatcccatgggcaactggcctcgcttctgcactctggttcagttacccccacccccaggtccctggcgaccaccaggaactgcggcttagagctaatgtgccacagtggcgagggaggaatgtgagctgagagtacttgagattaacacatatacaggcctgcattaggtcacaatactccaaggagccaccaccaatcagcagttgccaccaagctgaaacccgtttctgtccccaccatctagttcaagatgtccacaagatttaaatggaagtgccagctccagtgggtggctactaggaaggctgtgttaaaa

SEQ ID NO: 24425 - DNA, 596 bp, Homo sapiens
tattttattctattctttccattttttctcactatgcttctgtttatacattttctattaacctgcctttgaattcactaatcctcttttgctgtgatcartctctgctaagcccatccaatgagtttatttcagatattttgttttgtagttctggaatatccatttgattcttatttatagagtctaatttgctattgaaattatctacctttttacccacttgtctatgtttccttttagtttttattttaacatttataatggtcatttcaagtccttgactgtagatttcaacatctgaatcacttatgggtctgctgctattatctatttttcttcttgattttcagtcatattttcatgttattcctgtggcttgtaatttttattacactggactttgtgtatagaagaacgtagagactgaagtcagcattattttcctccagagagtcttttctctgctattaacagatacagtgaggtattgagctgggtttaggccagacagcagctttaattaacaatcagtccacttcccacctctctttttcttgaggccaagatcagtaagtatctgttcaaggtgctta

SEQ ID NO: 24426 - DNA, 596 bp, Homo sapiens
tattttattctattctttccattttttctcactatgcttctgtttatacattttctattaacctgcctttgaattcactaatcctcttttgctgtgatcagtctctgctaagcccatccaatgagtttatttcagatattttgttttgtagttctggaatatccatttgattcttatttatagagtctaatttgctaytgaaattatctacctttttacccacttgtctatgtttccttttagtttttattttaacatttataatggtcatttcaagtccttgactgtagatttcaacatctgaatcacttatgggtctgctgctattatctatttttcttcttgattttcagtcatattttcatgttattcctgtggcttgtaatttttattacactggactttgtgtatagaagaacgtagagactgaagtcagcattattttcctccagagagtcttttctctgctattaacagatacagtgaggtattgagctgggtttaggccagacagcagctttaattaacaatcagtccacttcccacctctctttttcttgaggccaagatcagtaagtatctgttcaaggtgctta

SEQ ID NO: 24427 - DNA, 647 bp, Homo sapiens
aagagggtacctttccttccatatagcaaaccagacaatcagaatgtatcccacataaaatcagggttttggttctcctcagctgtgtctgtctgctcttggtcactaaaaggctaccttttcattgccaaagcataatattattttcttctcccaattccacatccaaaactatctatggaaattacagttttggaaagaggtttggaaagacccgatctcagagagactaattatctttaattctttgatgtaataataacatatgcaaatacttagggtgtctggggatcaaggctgtagtaaaagatatgatttttccaccctgtcatctgtgcctcagttggtgtaacactggggcagggagggaggaagcccttcttcaagcatattttcagctgtgcatcaaagtagaatccatacatatatatatacacacagaaatatataatacayatatattatatataacgtgtataatacacatatattatatataacgtgtataatacacatattatatataacgtgtataatacacatattatatataacgtgtataatacacatattatatataacgtgtataatacacatattatatataacgtgtataatacacatattatatataacgtgtataatac

SEQ ID NO: 24428 - DNA, 647 bp, Homo sapiens
aagagggtacctttccttccatatagcaaaccagacaatcagaatgtatcccacataaaatcagggttttggttctcctcagctgtgtctgtctgctcttggtcactaaaaggctaccttttcattgccaaagcataatattattttcttctcccaattccacatccaaaactatctatggaaattacagttttggaaagaggtttggaaagacccgatctcagagagactaattatctttaattctttgatgtaataataacatatgcaaatacttagggtgtctggggatcaaggctgtagtaaaagatatgatttttccaccctgtcatctgtgcctcagttggtgtaacactggggcagggagggaggaagcccttcttcaagcatattttcagctgtgcatcaaagtagaatccatacatatatatatacacacagaaatatataatacatatatattatatataacgtgtataatacasatatattatatataacgtgtataatacacatattatatataacgtgtataatacacatattatatataacgtgtataatacacatattatatataacgtgtataatacacatattatatataacgtgtataatacacatattatatataacgtgtataatac

SEQ ID NO: 24429 - DNA, 647 bp, Homo sapiens
aagagggtacctttccttccatatagcaaaccagacaatcagaatgtatcccacataaaatcagggttttggttctcctcagctgtgtctgtctgctcttggtcactaaaaggctaccttttcattgccaaagcataatattattttcttctcccaattccacatccaaaactatctatggaaattacagttttggaaagaggtttggaaagacccgatctcagagagactaattatctttaattctttgatgtaataataacatatgcaaatacttagggtgtctggggatcaaggctgtagtaaaagatatgatttttccaccctgtcatctgtgcctcagttggtgtaacactggggcagggagggaggaagcccttcttcaagcatattttcagctgtgcatcaaagtagaatccatacatatatatatacacacagaaatatataatacatatatattatatataacgtgtataatacacatatattatatataacgtgtataatacacatattatatataacgtgtataatacacatattatatataacgtgtataatacrcatattatatataacgtgtataatacacatattatatataacgtgtataatacacatattatatataacgtgtataatac

SEQ ID NO: 24430 - DNA, 647 bp, Homo sapiens
aagagggtacctttccttccatatagcaaaccagacaatcagaatgtatcccacataaaatcagggttttggttctcctcagctgtgtctgtctgctcttggtcactaaaaggctaccttttcattgccaaagcataatattattttcttctcccaattccacatccaaaactatctatggaaattacagttttggaaagaggtttggaaagacccgatctcagagagactaattatctttaattctttgatgtaataataacatatgcaaatacttagggtgtctggggatcaaggctgtagtaaaagatatgatttttccaccctgtcatctgtgcctcagttggtgtaacactggggcagggagggaggaagcccttcttcaagcatattttcagctgtgcatcaaagtagaatccatacatatatatatacacacagaaatatataatacatatatattatatataacgtgtataatacacatatattatatataacgtgtataatacacatattatatataacgtgtataatacacatattatatataacgtgtataatacacatattatatataacgtgtataatacrcatattatatataacgtgtataatacacatattatatataacgtgtataatac

SEQ ID NO: 24431 - DNA, 647 bp, Homo sapiens
aagagggtacctttccttccatatagcaaaccagacaatcagaatgtatcccacataaaatcagggttttggttctcctcagctgtgtctgtctgctcttggtcactaaaaggctaccttttcattgccaaagcataatattattttcttctcccaattccacatccaaaactatctatggaaattacagttttggaaagaggtttggaaagacccgatctcagagagactaattatctttaattctttgatgtaataataacatatgcaaatacttagggtgtctggggatcaaggctgtagtaaaagatatgatttttccaccctgtcatctgtgcctcagttggtgtaacactggggcagggagggaggaagcccttcttcaagcatattttcagctgtgcatcaaagtagaatccatacatatatatatacacacagaaatatataatacatatatattatatataacgtgtataatacacatatattatatataacgtgtataatacacatattatatataacgtgtataatacacatattatatataacgtgtataatacacatattatatataacgtgtataatacacatattatatataacgtgtataatacrcatattatatataacgtgtataatac

SEQ ID NO: 24432 - DNA, 1154 bp, Homo sapiens
ctattttttgtcaaaggtgctgtgagttgtggcccacccttgctcagtctcaatcatggaactggaaagcatcaaggtttcataagccattctcatttctgtacggtcctagacccaacggctcctagcagttctccagaacattagttgtggagagtctcaaaacaggcctaaaataatagtgtgaaaagtattacttaaatcgcccagataaaatattttgtctttgactaggaatagtcactacttaactaactttccaccactggctctttccccacttcaccccaaatggttacctaagagctggcaaagcaataaaccctagcgtctactaaacagcatcatgaacagagatggggctcaggtgactttattgaagtataacatccatgtaaaatgcatagatgtacatagtgtacatataccttaatacttctttacaggtaaacaacatctgtgtaaccatcatgaagctcagtaaatagagcctgaccggcaccccaggtgaactcagcttccgcctggtcactactcccaccccaggggaagctgctgtcttctatctttataatttgtctacagtaaaattcgcttttttggtgtatcatcctaggttttgacacatgcagagagtcgtgtaatcaccaccacaatcaagactgcgaaacagtcccactgtcccaaagaaattctctgatgcttttccctgtgtaatccagacctcctctcagccccagtctgtgacaaccgccgatctgttcgcagtgcctgtagttttgcctttcccggaatgtcgtatggagtgtaatgtagcgtttggggtgtggcttagcaaaatgtattgggtaggaatgcatggttttcattgctgagcagtattccattgtgtggatgcactcaccgcagcctattcattcactgcttgaaggactttggggttattttcatttgttcccgtgatagttgtgtatttctttgccaccctagacctacaggaacaagaggcagcaagcagaaaaggggttctgatgctgaaagccatgatgggcccggccccacccccaygcccccacttcatcagtgccgtgagcatccacatgcttagctggttgcacaggagcctgtcatgaaacaaattttaaaggcagagt

SEQ ID NO: 24433 - DNA, 526 bp, Homo sapiens
tttttcttctctagaagcaaagaattactagttttctttctaaattttattttttaatagataaaggctaaacatggtactataaactatcagcctacttacatattcttatcttatatgcaaagtttaaaatcttattaagatctgataccaagaactgaaacaaacctacatggtaaataccaaaatcaataataaatttatgctccttaaacatctctctgacttctactctttataaaagataaataacttggtagtggaaaatattttatgggctatcattcagtagagattattctcacttctctktgtcagttcttttgaataacaactttaaggagaaattcaggagcaaatacacctatatatctatttatatattatacatgtatgatatattaatgtatatatcacttatatgtcatatatgataaacatgataaatttatatatctatatgtaaatgtacatatctcttataacatatttataaataataatggcaaatcttttacagagaaag

SEQ ID NO: 24434 - DNA, 995 bp, Homo sapiens
tccctgtgatcactagaatgcatttctctttgagactacagactcctggcttaaccagggcaagcaggaacaggaccttctcattcctagggagaaatccactcttagggacttctttcatctcctgcttatctgtttccatctcatcatccttgggtggagggcctgggatgagatgtccagtggggcccggagggaagtcaggtcagccacattgaggcagtaccttgcaagagctgattcaagtatatgattttctgtggcaagaatctgtagaggaattcctcagcctcctggaaaagattctgcctgaagatctccacctgtttacaggcctcccgtctcaggcgcaccccacacggcttggccatatgctgcttcagttgctagatctctggcctcctaattaccgtatkcttcaatatattttaaatacattttagaagaaaatactgccggcatcaaaactttcacaggacaatattagaacaacactggcattctagggaaaacaatgttaaacattggcttaatggccataaactgtaataacttgaccaatcctaacccttctcttttgagctttgcctctcaaagggaggaccctcagccctcgtttgtggtgggtgaacattatcaatgcttgccactttgactccctgatttctatgcttccctgaggttgtcctacctgtgtttgacatgttttaaatttacatattattagtaagttattggcaatctatgattgctctgactttaaaacctctgtctttaagtttcttttgtatctctttgatacaaccaagatgcatcctggggattactatctgtcaccacttagtatcatcttcaattcagcttcttcatgttcagcattttgctcaaagccgtaatatgaccaaaaatgagtattaggttgaatgaaaaccttggaaacttggctgtcagcatgtacaacatatcctgtagggagtgtaatctcactttaaaag

SEQ ID NO: 24435 - DNA, 573 bp, Homo sapiens
tcaacataaattacctagtctgtggtattttgttatagcagcacaaaatagactaagacaggctttaactgctttctgatattttctgcaggatctgagtctttgttttctgctcaacaagctgctgagcagcaatcccagccccagggcccagagcaccttcctctgggagtccagcctcaggactgtgctctgcctgcccctactgcacaggcctcagagccacccacctcaactctggttcagccacagtcagaagcaagtaagatgctgtgctacactgatgagctctaygaatctgcttttcgttttcaggacctttccatttggctcctgcttatcaatatttatcactttcattgattgttctctatttattaatcttatttaggccctcattgccttactattgaattactgctccggtctcctagctgctttttctcctcaatccacgctatttactaatgccagcctgtacctttgattatataattgccctttcctgagccagcctggtgtaatgcaagagcctgagctttggagcgtcagataggattcaattctaggctc

SEQ ID NO: 24436 - DNA, 573 bp, Homo sapiens
tcaacataaattacctagtctgtggtattttgttatagcagcacaaaatagactaagacaggctttaactgctttctgatattttctgcaggatctgagtctttgttttctgctcaacaagctgctgagcagcaatcccagccccagggcccagagcaccttcctctgggagtccagcctcaggactgtgctctgcctgcccctactgcacaggcctcagagccacccacctcaactctggttcagccacagtcagaagcaagtaagatgctgtgctacactgatgagctctacgaatctgcttttcgttttcakgacctttccatttggctcctgcttatcaatatttatcactttcattgattgttctctatttattaatcttatttaggccctcattgccttactattgaattactgctccggtctcctagctgctttttctcctcaatccacgctatttactaatgccagcctgtacctttgattatataattgccctttcctgagccagcctggtgtaatgcaagagcctgagctttggagcgtcagataggattcaattctaggctc

SEQ ID NO: 24437 - DNA, 573 bp, Homo sapiens
tcaacataaattacctagtctgtggtattttgttatagcagcacaaaatagactaagacaggctttaactgctttctgatattttctgcaggatctgagtctttgttttctgctcaacaagctgctgagcagcaatcccagccccagggcccagagcaccttcctctgggagtccagcctcaggactgtgctctgcctgcccctactgcacaggcctcagagccacccacctcaactctggttcagccacagtcagaagcaagtaagatgctgtgctacactgatgagctctacgaatctgcttttcgttttcaggacctttccatttgsctcctgcttatcaatatttatcactttcattgattgttctctatttattaatcttatttaggccctcattgccttactattgaattactgctccggtctcctagctgctttttctcctcaatccacgctatttactaatgccagcctgtacctttgattatataattgccctttcctgagccagcctggtgtaatgcaagagcctgagctttggagcgtcagataggattcaattctaggctc

SEQ ID NO: 24438 - DNA, 612 bp, Homo sapiens
atgacaagggaaggaatggagcaattaaaattcctagttccaaccacttttcaacagaaagttgaaagtctcaaataagccagggctttgaaaacataacacttttgttcaaacatgccaatcaactcgtgatggagactgcattaattcttagatcaagagctcattacttataatgtaggtcaaggaggccatgtcagctctgctaagttagtctttgaggactgcaatttgcaaattagaaaaaagaaagtgttctaattaaaatgactctgtcatttctgggccttggaagtgtgccagaatgtcctttctgagcagaaaaagaactagccacaaaaatgcagtgggcttcacaatctacgcccatgcccatatccccgcctgtcaaggatataatggctaagaggcttagaaaatacagaaaaatcatgctgctataaagacacatgcacacgtatgtttattgcagcactattcacaataacaaagactyggaaccaacccaaatgcccaacaatgatagactggattaagaaaatgtggcacatatacaccatggaatactatgcagccataaaaaatgatgagttcacatcctttgtagggaca

SEQ ID NO: 24439 - DNA, 945 bp, Homo sapiens
attacacttctcagctgagctctcaaagagctctatgccctgtgaaaagcagtggctgagttggatgaacacatagcattattaattttgcactgggaaaacagattatgacaggaccacagaccacaatataaaaacttggcagttctttggtgtgatatattttaattagtatttgcaaataatcagagttacttgtgtacataaacgtgtgtttcacaactatggccagatgcaaccttttggtctgtttcaggaaaagacctattattccactaacaattatgctgccttagaaacataatgggagtgtaattgaagaaagcatgtctcagaaggttttgatatgcagaactggaagctattgtaattcctacatacatttccattagctatgccttatgtaatgtgagtgcagatttttacaacttagagttcccatcagtgtttttttgccacatcaccgggtttcttattttactgttttcttttcaactttgggtgctttatttccattctctaaaactaagtttcttgctcttacgagacttagtgttccttttgaacccaggtgttccacctgacagtgtttgtctttcatagactttccagaatagacatagtcaagatcagacacgtgagcttctctctcattttaatgtgaggaaaatcatctttcagagacaaggcaccgcttagaaatgtatgtccaggtatgaaagaacctttttaaaatggctggttgttccwgatccagatttctctgcacactggacttcgtagagtaagtgtggtagacaaagagactacactgcacaaccaccagtgaatatcattgctaagaagactttgggtcgtgtttctcagccactctcacagcttttgtagacttaatcatttgattttgaaacaagcagttagctaaatctattttccttttatgca

SEQ ID NO: 24440 - DNA, 945 bp, Homo sapiens
attacacttctcagctgagctctcaaagagctctatgccctgtgaaaagcagtggctgagttggatgaacacatagcattattaattttgcactgggaaaacagattatgacaggaccacagaccacaatataaaaacttggcagttctttggtgtgatatattttaattagtatttgcaaataatcagagttacttgtgtacataaacgtgtgtttcacaactatggccagatgcaaccttttggtctgtttcaggaaaagacctattattccactaacaattatgctgccttagaaacataatgggagtgtaattgaagaaagcatgtctcagaaggttttgatatgcagaactggaagctattgtaattcctacatacatttccattagctatgccttatgtaatgtgagtgcagatttttacaacttagagttcccatcagtgtttttttgccacatcaccgggtttcttattttactgttttcttttcaactttgggtgctttatttccattctctaaaactaagtttcttgctcttacgagacttagtgttccttttgaacccaggtgttccacctgacagtgtttgtctttcatagactttccagaatagacatagtcaagatcagacacgtgagcttctctctcattttaatgtgaggaaaatcatctttcagagacaaggcaccgcttagaaatgtatgtccaggtatgaaagaacctttttaaaatggctggttgttcctgatccagatttctctgcacactggacttcgtagagtaagtgtggtagacaaagagactacactgcacaaccaccagtgaatatcattgctaagaagactttgggtcgtgtttctcagccactctcacagcttttgtagacttaatyatttgattttgaaacaagcagttagctaaatctattttccttttatgca

SEQ ID NO: 24441 - DNA, 660 bp, Homo sapiens
ctctggaatgagtgtcttaatttctttatggccagctgttacatagaaaggtgggggaaatttaagagcaatatatttaggttttatggctggctttcaggaaacgggattctggcttctatggccggtcttggagaagaggaattctagtttctatggctcacctggggaagaatcagggtcaacagacaggagggcagagaaactttgcttctgcggccttcatttggggtatcattttttgggctccagcgttaccttcacagcaataacaaataactaggttttgccaggaacttggcaactctgagaggattaaagcaagactgctgccaacttctgttgcttccttatcacctcaagtcgtctcagatwaaagtctctgatagttgatctcaaggagttacacgtagcaattgggaagcacatttttatttgcttaagcttctaaagtctaatgtaatgtcatttgcacaaataaaaattaacagttggtcaactaagagagcaaagtatagagtgtttttcaagggatgactgtggctttcaactttaaaacacaaacctgattgaaatgtggtggtgtgaacatggcaatgggaggtacttttctgcaggtttaggagggagagaggccaaaagcaatgttgatgcttaaat

SEQ ID NO: 24442 - DNA, 660 bp, Homo sapiens
ctctggaatgagtgtcttaatttctttatggccagctgttacatagaaaggtgggggaaatttaagagcaatatatttaggttttatggctggctttcaggaaacgggattctggcttctatggccggtcttggagaagaggaattctagtttctatggctcacctggggaagaatcagggtcaacagacaggagggcagagaaactttgcttctgcggccttcatttggggtatcattttttgggctccagcgttaccttcacagcaataacaaataactaggttttgccaggaacttggcaactctgagaggattaaagcaagactgctgccaacttctgttgcttccttatcacctcaagtcgtctcagataaaagtctctgatagttgatctcaaggarttacacgtagcaattgggaagcacatttttatttgcttaagcttctaaagtctaatgtaatgtcatttgcacaaataaaaattaacagttggtcaactaagagagcaaagtatagagtgtttttcaagggatgactgtggctttcaactttaaaacacaaacctgattgaaatgtggtggtgtgaacatggcaatgggaggtacttttctgcaggtttaggagggagagaggccaaaagcaatgttgatgcttaaat

SEQ ID NO: 24443 - DNA, 660 bp, Homo sapiens
ctctggaatgagtgtcttaatttctttatggccagctgttacatagaaaggtgggggaaatttaagagcaatatatttaggttttatggctggctttcaggaaacgggattctggcttctatggccggtcttggagaagaggaattctagtttctatggctcacctggggaagaatcagggtcaacagacaggagggcagagaaactttgcttctgcggccttcatttggggtatcattttttgggctccagcgttaccttcacagcaataacaaataactaggttttgccaggaacttggcaactctgagaggattaaagcaagactgctgccaacttctgttgcttccttatcacctcaagtcgtctcagataaaagtctctgatagttgatctcaaggagttacacgtagcaattgggaagcacatttttatttgcttaagcttctaaagtctaatgtaatgtcatttgcacaaataaaaattaacrgttggtcaactaagagagcaaagtatagagtgtttttcaagggatgactgtggctttcaactttaaaacacaaacctgattgaaatgtggtggtgtgaacatggcaatgggaggtacttttctgcaggtttaggagggagagaggccaaaagcaatgttgatgcttaaat

SEQ ID NO: 24444 - DNA, 1211 bp, Homo sapiens
tgttttttttgtttttgtttttgagacagagtctcactctgtcggccaggctgggttgcagtggcataatctcagctcactgcaatctccaccctcccaggttcaagcaattctcctgcctcagcctcctgagtagctggggctacaggggcccgccaccacgcccagctaatttttgtacttttagtagagatagtgtttcaccatattggccaggctggtctcgaactcctgaccttgtgatccgcccgcctcggcctcccaaagtgctgggactacaggcgtgagccaccatgcccagcggtttttataggagttttaactacattaggtgtcttcaggaaatagcctataattgctagataatttttttgtgttataatttataaattgaaatgaaaatgtgtcagagtccaatatrcttaaccaacttttgagcaatgagttgttccacataacagttttccagattattttacctattaacacttacaggattagtgtcaggtttctctaaaggaaaaatattccttaaattattttcttccttttattgtttgagggttaacgcttgtttcatataataatgttaattttcacccaggctgaagtgcagtggtgtgatcttggctcactgcaacctcctcctcctgagttcaagcgattcttctgcctcagcctcccaaggagttgggattacaggcacccaccaccatgcccagctaatttttgtatttttagtagagacgggcttttgccatgttggtcaggctggtcttgaaatcctgacctcaggtgatccgcccgccttggtctcccaaagtgctgggattacaggcataagccaccgcgtctggccttactgtttttaaatgtacttcacattgctctttttgttattttgaaaagatacaaaattattttgcttcatatttatatagtaaaaaactcaaatggtacaaaagcatatatagggcaaggtcatccctgtctcccagccaccagttctcctcacccaagataactagttttttatgagtattttgtataatccttctggagattgcatttacaggtgattatttatatattctcttttttctttttttttatacaaatggtaatgtatcatacacagttgtgtactttgctttttttcacataacactatgttttgggcattattccttaccagaataagctcttttctt

SEQ ID NO: 24445 - DNA, 1211 bp, Homo sapiens
tgttttttttgtttttgtttttgagacagagtctcactctgtcggccaggctgggttgcagtggcataatctcagctcactgcaatctccaccctcccaggttcaagcaattctcctgcctcagcctcctgagtagctggggctacaggggcccgccaccacgcccagctaatttttgtacttttagtagagatagtgtttcaccatattggccaggctggtctcgaactcctgaccttgtgatccgcccgcctcggcctcccaaagtgctgggactacaggcgtgagccaccatgcccagcggtttttataggagttttaactacattaggtgtcttcaggaaatagcctataattgctagataatttttttgtgttataatttataaattgaaatgaaaatgtgtcagagtccaatatacttaaccaacttttgagcaatgagttgttccacataacagttttccagattattttacctattaacacttacaggattagtgtcaggtttctctaaaggaaaaatattccttaaattattttcttccttttattgtttgagggttaacgcttgtttcatataataatgttaattttcacccaggctgaagtgcagtggtgtgatcttggctcactgcaacctcctcctcctgagttcaagcgattcttctgcctcagcctcccaaggagttgggattacaggcacccaccaccatgcccagctaatttttgtatttttagtagagacgggcttttgccatgttggtcaggctggtcttgaaatcctgacctcaggtgatccgcccgccttggtctcccaaagtgctgggattacaggcataagccaccgcgtctggccttactgtttttaaatgtacttcacattgctctttttgttattttgaaaagatacaaaattattttgcttcatatttayatagtaaaaaactcaaatggtacaaaagcatatatagggcaaggtcatccctgtctcccagccaccagttctcctcacccaagataactagttttttatgagtattttgtataatccttctggagattgcatttacaggtgattatttatatattctcttttttctttttttttatacaaatggtaatgtatcatacacagttgtgtactttgctttttttcacataacactatgttttgggcattattccttaccagaataagctcttttctt

SEQ ID NO: 24446 - DNA, 552 bp, Homo sapiens
cagatgtccaaggactaccacatatccatggggaaaacagagtacaggtatttgtattttccccattttaataatctgggatttattttcaatatttctttctaccccatagtaatcctcaccaacaccaagacaccacactcatttcaaaaatatttgtgagtcctttatctaatcataaatatttctcatatctatctacttccttccatcgtcatttttactacaatgtagtgtatgtttctgctaggcaactacaataacagtggtgagatctcggctcactgcaagctccacctcccgggttcacgccattctcctgcctcagtcttctgagtagctgggactacaggcgcccgccaccacactcgsctaattttttgtatttttagtagagatggggtttcaccgtgttagccaggatggtctcgatctcctgacctcgtgatccgcctgcctcggcctcccaaagtgctaggattacaggcatgagccactgctcccggcctacaataactttttaactggtattcctttgtccactcttgccat

SEQ ID NO: 24447 - DNA, 1198 bp, Homo sapiens
attgtaaagcatttatggaaaatgaatttctctttagaaaagatctgccagtatcatatgcatgctctggctacaactttccacttcagatttctattcttctatatttatttagagtctcttctgctcagaaggcaatgatctttgcttgatgatgaactgtgtgaaatcctccccaagaagtagtcttcgatggggtcacttctgctctgttaggaggcacttcaccatgtctctatacttagayatgtgtctatacttagacaatgttacctgggtaactcctggtaacaggtcatttgcaatccacagattatgacatctctatcacccacaaaccattgtatatgattcttccattaccatagaggtgaaaaatttaaagtcactgctcatttttaagtccctatataacgatccctgtgtgtggatgtttctagtgtttagactgttggataaatggttttctactctatttacttttggagactggagttcatctggtgaaaatggccctcatggctacccttcaccttccagtggccgatgtgcctattgaattcacaatgacctagccctatgcgtattcttgtgattcttagagggacaagtgtcaaggtgcgtgtgtacactatgggagagtgccactgggtgttttccattaaacagtgggctctgtcgtacagtgctctcatgatgcactgttacctttcccaccacatctctcgccctgtttacctggaaggtacatgactttgttatcattagtttctatagttaagaattgagacaaatgtggacttcagtttttttcttttagttgattaacgtttaaaacaactgggcttagatatttgagctgaaaaaggaagtcagtttggttagtcagtgcttggggtgactgcattcattagtaagcacatatttacataagtttcagtggaaacacatttgtttgtacaaatacggaacagaataggaatatgtttccagcattctcacttggcaactcagaaaaagactcatcctgcagacacacatacaaatcaaccctcttcctcccctcccccagcattcagcatggaaagctggccgccctggttctttacggctcatttctaaacgtcaaattcacctcttacacagaatcttggaggtcatctggttgaactgatcccaatcagaagtgtcttccctg

SEQ ID NO: 24448 - DNA, 1198 bp, Homo sapiens
attgtaaagcatttatggaaaatgaatttctctttagaaaagatctgccagtatcatatgcatgctctggctacaactttccacttcagatttctattcttctatatttatttagagtctcttctgctcagaaggcaatgatctttgcttgatgatgaactgtgtgaaatcctccccaagaagtagtcttcgatggggtcacttctgctctgttaggaggcacttcaccatgtctctatacttagacatgtgtctatacttagacaatgttacctgggtaactcctggtaacaggtcatttgcaatccacagattatgacatctctatcacccacaaaccattgtatatgattcttccattaccatagaggtgaaaaatttaaagtcactgctcatttttaagtccctatataacgatccctgtgtgtggatgtttctagtgtttagactgttggataaatggttttctactctatttacttttggagactggagttcatctggtgaaaatggccctcatggctacccttcaccttccagtggccgatgtgcctattgaattcacaatgacctagccctatgcgtattcttgtgattcttagagggacaagtgtcaaggtgcgtgtgtacactatgggagagtgccactgggtgttttccattaaacagtgggctctgtcgtacagtgctctcatgatgcactgttacctttcccaccacatctctcgccctgyttacctggaaggtacatgactttgttatcattagtttctatagttaagaattgagacaaatgtggacttcagtttttttcttttagttgattaacgtttaaaacaactgggcttagatatttgagctgaaaaaggaagtcagtttggttagtcagtgcttggggtgactgcattcattagtaagcacatatttacataagtttcagtggaaacacatttgtttgtacaaatacggaacagaataggaatatgtttccagcattctcacttggcaactcagaaaaagactcatcctgcagacacacatacaaatcaaccctcttcctcccctcccccagcattcagcatggaaagctggccgccctggttctttacggctcatttctaaacgtcaaattcacctcttacacagaatcttggaggtcatctggttgaactgatcccaatcagaagtgtcttccctg

SEQ ID NO: 24449 - DNA, 561 bp, Homo sapiens
caaaaatcatcacaaaaatgcaagttttttttatcatgtccttgcattttcagtatacacagtttgaagcttgtgacttccrtgcgctgacaaaatcaatgtactcttaatattctaagacattcattacatagaattaacaattataatatatgaccagatttaaactatttatattttctttctacgaaattaaaaacattatgaggtctccaattgtttttcagaaaaaaagaaaaaaaaacaatttttttttttcaattagcagtatcatagaagtccactgatttcactattacaaatccattccaagctgctggctggtatgaaagaaaggaaaatttgtcaattatccaactaattatctgagtatatgacagccaaaccaaataatccctgtccccagtgaatattctcaactgaatagtctagataactaccatgcagatttaataaaatttctgagaatataaacatttgtgtatttctttcattaattcatgaatgaatatgccttcaatttgttcatctcaggcttctagaataatgaccacaataaaa

SEQ ID NO: 24450 - DNA, 561 bp, Homo sapiens
caaaaatcatcacaaaaatgcaagttttttttatcatgtccttgcattttcagtatacacagtttgaagcttgtgacttccgtgcgctgacaaaatcaatgtactcttaatattctaagacattcattacatagaattaacaattataatatatgaccagatttaaactatttatattttctttctacgaaattaaaaacatyatgaggtctccaattgtttttcagaaaaaaagaaaaaaaaacaatttttttttttcaattagcagtatcatagaagtccactgatttcactattacaaatccattccaagctgctggctggtatgaaagaaaggaaaatttgtcaattatccaactaattatctgagtatatgacagccaaaccaaataatccctgtccccagtgaatattctcaactgaatagtctagataactaccatgcagatttaataaaatttctgagaatataaacatttgtgtatttctttcattaattcatgaatgaatatgccttcaatttgttcatctcaggcttctagaataatgaccacaataaaa

SEQ ID NO: 24451 - DNA, 685 bp, Homo sapiens
ataagaaattattttgaatattgagggaaatcaatmctgatggaataaaggggaataaggagccaatttctgaaaaattgatgaataacatgaccatcctacatatgcacacacaagaaattgagaagtttaagaaaataagcagaaataatgattaaaaaaataaattagtgtttttattttaaaaatttggagattcataataaaacaataagtgcatttgctaagagggctaacatgagcactataccccaaaataatgtcaataacatagaagcacttttttcccataacacaggggttggcaaacttttctttagatggccagagagcaaataatttagggttacaggccatatttggtctccactccacactagttcttttcttttcttttcttttcttttttaaaagaatttttcagtttaaaaatgtttcctagctgggtgtacagcatacaaaaatagaccaagggtcttacttgtccaaaaaattgtagtttgcctactcctaatttgtattcttgaaataaatatgtctataccctacacaggatgatgcagtcggtaagatgtaagacgggacaaatgaagtctcttgataagacagttagtccaaatgagtccaaaagaacagaaaacccaatcaccagattctagaatattaccttttttttttttttttt

SEQ ID NO: 24452 - DNA, 741 bp, Homo sapiens
tcagggctggcacagtttcttattcttcgtaaatgctggatcaacactaattaaccaatgcattccctcatccaggactgtatacccctacccctaagaggtgtgycattcagcaggcctgtgaagccctctgctttttgtttttcactcaacaaactttccttgaggaccaactctgagacaggcactgtgtgcagcacttctttgttcttccagataagactgtgtctctttaaaaaactgtgcacacaagacttctctgtagccttcctttgtaacatggtagcccctgtctcacagctcttccagccaagatgacttcacagtccttctagctaccgtctgcttccacttcctatgggtggtccacagtgaaaacagcagttggacttcctcatccttcgtatctttgaaaatgtgtggagtttcccctcagccttctctccagcttcttaaacctttatcctgagagctgctttccagtttgtttcatcatcttgtttgttggcctatatccatttacaatttacccacagtatgaacacgatggctgaagtttttaatccctgaatctgtttttaattagttgagtttattttttacataaactccagttctaatttgaggattttactacattgactcagcttttaatcttctttaccaaaagtcttgcattcacaagcgtataaacaactcaagccctcactttatcctgtcataaaaccaactggggttttc

SEQ ID NO: 24453 - DNA, 741 bp, Homo sapiens
tcagggctggcacagtttcttattcttcgtaaatgctggatcaacactaattaaccaatgcattccctcatccaggactgtatacccctacccctaagaggtgtgtcattcagcaggcctgtgaagccctctgctttttgtttttcactcaacaaactttccttgaggaccaactctgagacaggcactgtgtgcagcacttctttgttcttccagataagactgtgtctctttaaaaaactgtgcacacaagacttctctgtagccttcctttgtaacatggtagcccctgtctcacagctcttccagccaagatgacttcacagtccytctagctaccgtctgcttccacttcctatgggtggtccacagtgaaaacagcagttggacttcctcatccttcgtatctttgaaaatgtgtggagtttcccctcagccttctctccagcttcttaaacctttatcctgagagctgctttccagtttgtttcatcatcttgtttgttggcctatatccatttacaatttacccacagtatgaacacgatggctgaagtttttaatccctgaatctgtttttaattagttgagtttattttttacataaactccagttctaatttgaggattttactacattgactcagcttttaatcttctttaccaaaagtcttgcattcacaagcgtataaacaactcaagccctcactttatcctgtcataaaaccaactggggttttc

SEQ ID NO: 24454 - DNA, 1264 bp, Homo sapiens
ccttttagatgcttttacaaaatcaccaccattctctcatgaaattcaattttgacgatgaagagcttgtcctacagtgttaaactgtggagacccaaactgttgcaattctaaagaatatttyccccctcaagagccaattgtagccacattgtggacaatatcatccttgtgagaatgcatgactcagtctagtaagattttaaccatgtaggattcttgagaaggaatgaagactgaggagattagagaagtaaaagtatccagatgttgtgaaaactgagttattttaagggttttgggtctctgtgggtgaagactcagtgttagaagtggaggtgttttcaggaaatagtaacttagtttaaaaacataggaaggcagaagctcaagatagggggaaaagtgtgagaaggcacctttactatactatggaagatatgactgtaagagggtaatataaattaatttttaggcagggaagaatgcttttgaattgttcacattaatcttacattctagctgtataaattcacacaggatgtatatatataggtaatgataatgctgatgtgtttattttcaagattttcaaggactgtgtggaataggatgctcatatgggctgccacatcgtaaacaagctggattattcctccttgccagtttaaaacaacccactgggttttcagggaacacagtcaaatcttaggaaacaaaaaaaagtacatttctctccatgtgtgcattcatgaatacttacagttttattccactgtcttgattcaggtcatataaatataatttaatttttagcttttaccctaaaatcatgagaattatttgcatgtcaatcattttataatcgtaaaatatatcagaaatagatttagcaaaaaatcataaacatttatttttctcattgtagtagcaattactttctgatcctctattttataatggcattatggtagattttgatttcgaggcacatttccagactttgtcagttcctgatattaatgaacaactcattgcacatgctttagcatattctgaaataacaatgtactgaagataatgacttagattgcatgtgtttccttttcactagacaattttagattttgaaagttctgaaaatgcagcagaagtacttggatccacttgggacaaaaccatacctggggctagtttgtacccattactagaggccaaggctatacaaataaacaatgcttggggctggaccaatgtgacattt

SEQ ID NO: 24455 - DNA, 1264 bp, Homo sapiens
ccttttagatgcttttacaaaatcaccaccattctctcatgaaattcaattttgacgatgaagagcttgtcctacagtgttaaactgtggagacccaaactgttgcaattctaaagaatatttcccccctcaagagccaattgtagccacattgtggasaatatcatccttgtgagaatgcatgactcagtctagtaagattttaaccatgtaggattcttgagaaggaatgaagactgaggagattagagaagtaaaagtatccagatgttgtgaaaactgagttattttaagggttttgggtctctgtgggtgaagactcagtgttagaagtggaggtgttttcaggaaatagtaacttagtttaaaaacataggaaggcagaagctcaagatagggggaaaagtgtgagaaggcacctttactatactatggaagatatgactgtaagagggtaatataaattaatttttaggcagggaagaatgcttttgaattgttcacattaatcttacattctagctgtataaattcacacaggatgtatatatataggtaatgataatgctgatgtgtttattttcaagattttcaaggactgtgtggaataggatgctcatatgggctgccacatcgtaaacaagctggattattcctccttgccagtttaaaacaacccactgggttttcagggaacacagtcaaatcttaggaaacaaaaaaaagtacatttctctccatgtgtgcattcatgaatacttacagttttattccactgtcttgattcaggtcatataaatataatttaatttttagcttttaccctaaaatcatgagaattatttgcatgtcaatcattttataatcgtaaaatatatcagaaatagatttagcaaaaaatcataaacatttatttttctcattgtagtagcaattactttctgatcctctattttataatggcattatggtagattttgatttcgaggcacatttccagactttgtcagttcctgatattaatgaacaactcattgcacatgctttagcatattctgaaataacaatgtactgaagataatgacttagattgcatgtgtttccttttcactagacaattttagattttgaaagttctgaaaatgcagcagaagtacttggatccacttgggacaaaaccatacctggggctagtttgtacccattactagaggccaaggctatacaaataaacaatgcttggggctggaccaatgtgacattt

SEQ ID NO: 24456 - DNA, 1264 bp, Homo sapiens
ccttttagatgcttttacaaaatcaccaccattctctcatgaaattcaattttgacgatgaagagcttgtcctacagtgttaaactgtggagacccaaactgttgcaattctaaagaatatttcccccctcaagagccaattgtagccacattgtggacaatatcatccttgtgagaatgcatgactcagtctagtaagattttaaccatgtaggattcttgagaaggaatgaagactgaggagattagagaagtaaaagtatccagatgttgtgaaaactgagttattttaagggttttgggtctctgtgggtgaagactcagtgttagaagtggaggtgttttcaggaaatagtaacttagtttaaaaacataggaaggcagaagctcaagatagggggaaaagtgtgagaaggcacctttactatactatggaagatatgactgtaagagggtaatataaattaatttttaggcagggaagaatgcttttgaattgttcacattaatcttacattctagctgtataaattcacacaggatgtatatatataggtaatgataatgctgatgtgtttattttcaagattttcaaggactgtgtggaataggatgctcatatgggctgccacatcgtaaacaagctggattattcctccttgccagtttaaaacaacccactgggttttcagggaacacagtcaaatcttaggaaacaaaaaaaagtacatttctctccatgtgtgcattcatgaatayttacagttttattccactgtcttgattcaggtcatataaatataatttaatttttagcttttaccctaaaatcatgagaattatttgcatgtcaatcattttataatcgtaaaatatatcagaaatagatttagcaaaaaatcataaacatttatttttctcattgtagtagcaattactttctgatcctctattttataatggcattatggtagattttgatttcgaggcacatttccagactttgtcagttcctgatattaatgaacaactcattgcacatgctttagcatattctgaaataacaatgtactgaagataatgacttagattgcatgtgtttccttttcactagacaattttagattttgaaagttctgaaaatgcagcagaagtacttggatccacttgggacaaaaccatacctggggctagtttgtacccattactagaggccaaggctatacaaataaacaatgcttggggctggaccaatgtgacattt

SEQ ID NO: 24457 - DNA, 1264 bp, Homo sapiens
ccttttagatgcttttacaaaatcaccaccattctctcatgaaattcaattttgacgatgaagagcttgtcctacagtgttaaactgtggagacccaaactgttgcaattctaaagaatatttcccccctcaagagccaattgtagccacattgtggacaatatcatccttgtgagaatgcatgactcagtctagtaagattttaaccatgtaggattcttgagaaggaatgaagactgaggagattagagaagtaaaagtatccagatgttgtgaaaactgagttattttaagggttttgggtctctgtgggtgaagactcagtgttagaagtggaggtgttttcaggaaatagtaacttagtttaaaaacataggaaggcagaagctcaagatagggggaaaagtgtgagaaggcacctttactatactatggaagatatgactgtaagagggtaatataaattaatttttaggcagggaagaatgcttttgaattgttcacattaatcttacattctagctgtataaattcacacaggatgtatatatataggtaatgataatgctgatgtgtttattttcaagattttcaaggactgtgtggaataggatgctcatatgggctgccacatcgtaaacaagctggattattcctccttgccagtttaaaacaacccactgggttttcagggaacacagtcaaatcttaggaaacaaaaaaaagtacatttctctccatgtgtgcattcatgaatacttacagttttattccactgtcttgattcaggtcatataaatataatttaatttttagcttttaccctaaaatcatgagaattatttgcatgtcaatcattttataatcrtaaaatatatcagaaatagatttagcaaaaaatcataaacatttatttttctcattgtagtagcaattactttctgatcctctattttataatggcattatggtagattttgatttcgaggcacatttccagactttgtcagttcctgatattaatgaacaactcattgcacatgctttagcatattctgaaataacaatgtactgaagataatgacttagattgcatgtgtttccttttcactagacaattttagattttgaaagttctgaaaatgcagcagaagtacttggatccacttgggacaaaaccatacctggggctagtttgtacccattactagaggccaaggctatacaaataaacaatgcttggggctggaccaatgtgacattt

SEQ ID NO: 24458 - DNA, 1264 bp, Homo sapiens
ccttttagatgcttttacaaaatcaccaccattctctcatgaaattcaattttgacgatgaagagcttgtcctacagtgttaaactgtggagacccaaactgttgcaattctaaagaatatttcccccctcaagagccaattgtagccacattgtggacaatatcatccttgtgagaatgcatgactcagtctagtaagattttaaccatgtaggattcttgagaaggaatgaagactgaggagattagagaagtaaaagtatccagatgttgtgaaaactgagttattttaagggttttgggtctctgtgggtgaagactcagtgttagaagtggaggtgttttcaggaaatagtaacttagtttaaaaacataggaaggcagaagctcaagatagggggaaaagtgtgagaaggcacctttactatactatggaagatatgactgtaagagggtaatataaattaatttttaggcagggaagaatgcttttgaattgttcacattaatcttacattctagctgtataaattcacacaggatgtatatatataggtaatgataatgctgatgtgtttattttcaagattttcaaggactgtgtggaataggatgctcatatgggctgccacatcgtaaacaagctggattattcctccttgccagtttaaaacaacccactgggttttcagggaacacagtcaaatcttaggaaacaaaaaaaagtacatttctctccatgtgtgcattcatgaatacttacagttttattccactgtcttgattcaggtcatataaatataatttaatttttagcttttaccctaaaatcatgagaattatttgcatgtcaatcattttataatcgtaaaatatatcagaaatagatttagcaaaaaatcataaacatttatttttctcattgtagtagcaattactttctgatcctctattttataatggcattatggtagattttgatttcgaggcacatttccagactttgtcagttcctgatattaaygaacaactcattgcacatgctttagcatattctgaaataacaatgtactgaagataatgacttagattgcatgtgtttccttttcactagacaattttagattttgaaagttctgaaaatgcagcagaagtacttggatccacttgggacaaaaccatacctggggctagtttgtacccattactagaggccaaggctatacaaataaacaatgcttggggctggaccaatgtgacattt

SEQ ID NO: 24459 - DNA, 519 bp, Homo sapiens
aaaagtaaactaagaggtttaaaaatattttctcaagcaaccatatttttgtactatattcttttaaaatgtacattgcattttcatgtcataaaactgactgaattttatcaatctgtatttttgaaaccaatccaaatatatgcattcaatttgccaaataatacctaccacataaaagacatcctcattatttataatttaaaattaattcaagttcataaaaataataacatataagtgaatatgttaacaaattcaggatttttctctagggmaatatgctaaaacttagaataagtattttaaaaagtctcttctttttaaaataacaaatgaaattgattttaaaatagatatttacaaaattgattgtatatttaatgtatgcagtatgtattagtatgaaatgacaaacctgtagtctttgagatttcagtgagcaaaagggaatattaaccaatgatgtattttcaaataagtagttcactcagcagatatttgcacaaaacctgtaat

SEQ ID NO: 24460 - DNA, 519 bp, Homo sapiens
aaaagtaaactaagaggtttaaaaatattttctcaagcaaccatatttttgtactatattcttttaaaatgtacattgcattttcatgtcataaaactgactgaattttatcaatctgtatttttgaaaccaatccaaatatatgcattcaatttgccaaataatacctaccacataaaagacatcctcattatttataatttaaaattaattcaagttcataaaaataataacatataagtgaatatgttaacaaattcaggatttttctctagggaaatatgctaaaacttagaataagtattttaaaaagtctcttctttttaaaataacaaatgaaattgattttaaaatagatatttacaaaattgattgtatatttaatgtatgcagtatgtattagtatgaaatgacaaacctgtagtctttgagatttcartgagcaaaagggaatattaaccaatgatgtattttcaaataagtagttcactcagcagatatttgcacaaaacctgtaat

SEQ ID NO: 24461 - DNA, 780 bp, Homo sapiens
acatctccttctctattttactgagttttcttcctcctcctcttacataaatatgcccatatccttgacttcaattcccctctatttaagctcatgtcatcatcaaaatatttatccactgccaaagataacctcttcctatacagatgactctgaaatatgtgcttttaccactcacttatggtccagtgttgaatttaaaagcacctgctagatagttctacttcactcaagttcatctccaaaactgaagctatttctacacataagccctcccattaacaatcacactttttcctgtatcccaaatttaaaacatttaagtcttccctctttcccactggcttactccctatatcccatgtcattacatttctacaatgaacaccttkaaaatatcctgcattaatttcacccttttctctccgttccattgacactacctcaatccaaaatttatttatatattttttgagacaacatatggctctactgcccaggctagagtgcagtggcgtgatcttggctcactacaacttccacctcttggactcaagctatcctgccacttcagcctcccgagcagttgggactacaggcgtgcaccaccacgcttggctatttttttgtagagatggggtttaagccctgttaaccaggctggtcttgaactcgtgagctcaagcgatctgcaatgcttcagcctcccaaagtgctaagatgacaggcgtgagccaccgtccttggccttgaatccaaaatcttattacctcattcctt

SEQ ID NO: 24462 - DNA, 780 bp, Homo sapiens
acatctccttctctattttactgagttttcttcctcctcctcttacataaatatgcccatatccttgacttcaattcccctctatttaagctcatgtcatcatcaaaatatttatccactgccaaagataacctcttcctatacagatgactctgaaatatgtgcttttaccactcacttatggtccagtgttgaatttaaaagcacctgctagatagttctacttcactcaagttcatctccaaaactgaagctatttctacacataagccctcccattaacaatcacactttttcctgtatcccaaatttaaaacatttaagtcttccctctttcccactggcttactccctatatcccatgtcattacatttctacaatgaacacctttaaaatatcctgcattaatttcacccttttctctccgttccattgacactacctcaatccaaaatttatttatatattttttgagacaacatatggctctactgcccaggctagagtgcagtggcgtgatcttggctcactacaacttccacctcttggactcaagctatcctgccacytcagcctcccgagcagttgggactacaggcgtgcaccaccacgcttggctatttttttgtagagatggggtttaagccctgttaaccaggctggtcttgaactcgtgagctcaagcgatctgcaatgcttcagcctcccaaagtgctaagatgacaggcgtgagccaccgtccttggccttgaatccaaaatcttattacctcattcctt

SEQ ID NO: 24463 - DNA, 719 bp, Homo sapiens
atgggaggcttgtttcccatggtctggacacttacaaagagaaactaacaagttccaattcctgatcttcagtccatgctttaagccagtaatttagaaccgaaaaaaataaaaaaaataaaaacaaaaagaataaaccaacaaaccaaatcaatgaacaaacaaaagccctcaaaatttgacaccaaagggtttttgaattataacatgagttgaagtcacagttttgccaggtttcttgtatgagaattcaggcattgtttgggaaagactggaaccctgaaatctggaatgaaggaatgttggagcacactgtaaaaaagtgaatatgttcccccatatttagagtacactccacagcaaaaccccactgrcactctcttgtcagtggaagcaggctgtctttacagtcttatgaggctatggttattttgcttgaaactttaaaatgaccttatctaagctaattacctggaaagggttgaccaattctcctcaaaccccatcttccctccttctcattatttttacacttcaaaccagggtcagaacccagcgtgaccgggaatccaattacaaagtcaaacccagaaggaaaagacttcataactaaacaattgcaaaaggttaccagtttatatcagcaaatattttgaatacttgtggaaatagatgtggaggtactaaaccaaagagtaaagaatataactttagatcaa

SEQ ID NO: 24464 - DNA, 551 bp, Homo sapiens
ttactttagtagaactaataaaaatgacaataagaatactttctgacctatcttatcaggtaattaagagaattaattaagataatgtataggaaggcactctgaaaactcttaagtgctaagataaatgtgaagtattattaagagggcagtcaaaggcatttcaaaataggagaaaggaatgtagcgtttttcttgatcaagccactctttccaaggtgccaagatccaagctgaaaaggaagctgtctctaaaackctgagtgtaagatatctgaaggaataaatgtgctgagagatagtatttggaagggaatgacaacaagaaattttaaatagtaagtgtcgaggtagaatattgggttcccataaaattctttctccaaaccaaaaacattgtgaggaactaaacagcaacagtgataccatcatcttaggaaatgccatagcaaaaacatttcttgttaaaatataaacttatcacctccttacatctgaaaccatttttaaagacttttgtaaacagtctcataattagcatcccacatgtt

SEQ ID NO: 24465 - DNA, 386 bp, Homo sapiens
ttgtttgatatttgatcatttrtttctgctttgttttgctgtgttttactcttgttttgtatgattttaagcttgctttcccttgtggttttagaatggcagtcagcagagtttggaactaaatgcttttgtttcaagtccagaagaaatgagagggaaaacaaatgagcaagacaaaaaaaaaaaaaagtaagcataaaagtcacccaaatatgcctgaagcatgagttgtgaagcctcccactgaatcaaagtgcaaagatttaagcagctttactagaaaaattcccagtcagaacttttttaagaaaaaattattctttttgtttcaggaataagatgtcaccttatttctctgattatattaattgtattcattttaatgt

SEQ ID NO: 24466 - DNA, 386 bp, Homo sapiens
ttgtttgatatttgatcatttatttctgctttgttttgctgtgttttactcttgttttgtatgattttaagcttgctttcccttgtggttttagaatggcagtcagcagagtttggaactaaatgcttttgtttcaagtccagaagaaatgagagggaaaacaaatgagcaagacaaaaaaaaaaaaaagtaagcataaaagtcacccaaatatgcctgaagcatgagttgtraagcctcccactgaatcaaagtgcaaagatttaagcagctttactagaaaaattcccagtcagaacttttttaagaaaaaattattctttttgtttcaggaataagatgtcaccttatttctctgattatattaattgtattcattttaatgt

SEQ ID NO: 24467 - DNA, 503 bp, Homo sapiens
tgtgtgatatggtcagtaacagagtgtgtcaaagtgctaaggaatcacagtggtggagactgatgagcaggtcagagaagttttcgttggaggggtactttctgaacgattcttgaagaatgaatgggagttaggggtggttggggaggacagtgttaattgtggcaggatggggtttgtggttggaacggtgctgtcttctggtccagctgtgcctggctccgaccaagggcagggtcaatgtgcactgcctgcagcaagcatagcagtttggcagggaggctcataacggggcgtttacccatcctcagaaagcaagggctttcctatgggactgttgttggctgctgcctgatggaggaacatgcactggaactcggggctaggaggttacatgcaaactcagttctacyaattgctagttggggcctttgatgacaccttttatgtctctgtaaaagttgtaaaatgtgcttctgtgagggctagatgagataaaaccc

SEQ ID NO: 24468 - DNA, 975 bp, Homo sapiens
tctctccattatatgaaaagtaggtgtctagtggggaggagcttccttctgaaatgctcagaaatgtaccgatgtccttagatgctgcagatggagcccagatcccagtgagcgactgctgggctgttcacagagagccagaggcccctttggaaagggtggatctccataacccatgggaggggagggacctccaacaatcttgttagtgcatcaagtaataratttttgacagatgctttcctgccttctagtccaaacttcaaaatccttcctgcactggtctcattggggttggtggttagttctcactttccccatttctgagaccagcaagagggctctgtttgcgccaagtcttcctgtaaacactgtggttatgcccacactaggcaatgccttcttggggagataacattgcatttattccaggactcctacagggaacaggaggggaagaaaattgcctctctgtgaaagcacattacaatgtggcctagcccaagctagactcactagaaatgttaactctgccctgcactttccattccccatcccctttcctctgccttttccaagcaaactcttactctaggaaatacatgtttgattttcttgggtgaccaccatctccaagagaacctcttagaagtaggccaaggagcaaagaagaagtcccataaaggtcaagagcatcttacaggaaaggaaagtggttacggcagattgcaattgtaggaggaatgacacaaaaggggtaggctagaaccagagtcacataagaacagccttctggaggcagggggatggatgaaagaatgtctttatgtcccttcaagggttatgattttgtatgtgcaaaattctgaactgtacatccagttgaacaaagtaaacatttatcaagcatctcctctgtgtcaggcttgaagtgagaaattcaaaggtggaaccaagcatggttccagagtacaa

SEQ ID NO: 24469 - DNA, 975 bp, Homo sapiens
tctctccattatatgaaaagtaggtgtctagtggggaggagcttccttctgaaatgctcagaaatgtaccgatgtccttagatgctgcagatggagcccagatcccagtgagcgactgctgggctgttcacagagagccagaggcccctttggaaagggtggatctccataacccatgggaggggagggacctccaacaatcttgttagtgcatcaagtaataaatttttgacagatgctttcctgccttctagtccaaacttcaaaatccttcctgcactggtctcattggggttggtggttagttctcactttccccatttctgagaccagcaagagggctctgtttgcgccaagtcttcctgtaaacactgtggttatgcccacactaggcaatgccttcytggggagataacattgcatttattccaggactcctacagggaacaggaggggaagaaaattgcctctctgtgaaagcacattacaatgtggcctagcccaagctagactcactagaaatgttaactctgccctgcactttccattccccatcccctttcctctgccttttccaagcaaactcttactctaggaaatacatgtttgattttcttgggtgaccaccatctccaagagaacctcttagaagtaggccaaggagcaaagaagaagtcccataaaggtcaagagcatcttacaggaaaggaaagtggttacggcagattgcaattgtaggaggaatgacacaaaaggggtaggctagaaccagagtcacataagaacagccttctggaggcagggggatggatgaaagaatgtctttatgtcccttcaagggttatgattttgtatgtgcaaaattctgaactgtacatccagttgaacaaagtaaacatttatcaagcatctcctctgtgtcaggcttgaagtgagaaattcaaaggtggaaccaagcatggttccagagtacaa

SEQ ID NO: 24470 - DNA, 563 bp, Homo sapiens
tctataattgaacattttaactaaccaagatattatctctttgccactgacattatttcaaattaagcttaactatttctttttagcctttggaaagtattctgaaagagtctgtgttctataaatatacttaaagaggcatgtcttataaaggatttggatactattcaatgatgtatgacttggctttagcttttttattcttaatctctcagcttttctcttcagcaggggaagagtacctaatggcctttcagtaatcccttggtaaatttttctttcaagcccattacttactgtgaaggtcaacttcattagtgtatttatcttatttttttcagcccaaaataggtatattgaaatgaatgggcctaatgtcaaatgtcccgactacatccyggaagagagagaatcttcagctgtattagttgatgcagttaaataatatgtactctccaggccctcatacaattgaaagttcagggtatcgttgctgctctgcttctaatccttccagaagtgattggtgctaggtgatggagtaactattaattgatataatg

SEQ ID NO: 24471 - DNA, 572 bp, Homo sapiens
cagggtctcaccctgggtcagcttcaggagggagatcttgggaggcaccatccagccaaagaggtagcggaagatggggttgttgccaaaggggatratgtcctggaaaacaaagattagggttggagagaaaaaaccaacaagggttgaatgtctccaagtgcaaggggccaggggccaggtcccattctgtgcttgacagaagcacgcctgagtccaattcccctctttggagggggtgtgatgggacctaggactttaccagtccaatctaggtttgcttctcagctctggcattcgccagtagtgatgaccccgggctagttacttaacttctttgagctcagtttccttatctgtaaaatgggccttgtgaggataatgagatattaataccaagtggaaggcactcaaccccatgcctggagtgcaataatgagctagctatcattcctgatctagctgttgagatctggctggaatagagctggcattccataaatgtttgagaaacgaatgctgttgaatgagcatagtgattcttagagaacttaagcagtctccctaggggc

SEQ ID NO: 24472 - DNA, 530 bp, Homo sapiens
tgaaagtatattgatgtttagtatacaattctcccaagacttctgcatgcttgaaattttcatgattaaaaattggggaaaaaagcttttagagagaaaggacagaatatttaccaaaaagttatagttacaataaaagaatgatttttattagccataccatagattccagaagacaatgtagtaatcactttactatactgagaataaataaatatcaacctaaaatttttaacytagctaaaaatttctatcaaaagaaagacaaatttgtacatacaacacttagagaatttaccacttagagatcactcactagaaaaactaaagaattcacttcagctagacaaaaagtgaaaccaaagaaaaagaacaatggtgagtacataaaatgatttaaaaaattgatttaagtaaatatcaactgtaaaaataatagtttcaaaatttatagttaaaaattaaatattaaacaataatagccaaatggtagagatggggtattcaatttgtagtgaaaccattacaag

SEQ ID NO: 24473 - DNA, 530 bp, Homo sapiens
tgaaagtatattgatgtttagtatacaattctcccaagacttctgcatgcttgaaattttcatgattaaaaattggggaaaaaagcttttagagagaaaggacagaatatttaccaaaaagttatagttacaataaaagaatgatttttattagccataccatagattccagaagacaatgtagtaatcactttactatactgagaataaataaatatcaacctaaaatttttaacttagctaaaaatttctatcaaaagaaagacaaatttgtacatacarcacttagagaatttaccacttagagatcactcactagaaaaactaaagaattcacttcagctagacaaaaagtgaaaccaaagaaaaagaacaatggtgagtacataaaatgatttaaaaaattgatttaagtaaatatcaactgtaaaaataatagtttcaaaatttatagttaaaaattaaatattaaacaataatagccaaatggtagagatggggtattcaatttgtagtgaaaccattacaag

SEQ ID NO: 24474 - DNA, 530 bp, Homo sapiens
tgaaagtatattgatgtttagtatacaattctcccaagacttctgcatgcttgaaattttcatgattaaaaattggggaaaaaagcttttagagagaaaggacagaatatttaccaaaaagttatagttacaataaaagaatgatttttattagccataccatagattccagaagacaatgtagtaatcactttactatactgagaataaataaatatcaacctaaaatttttaacttagctaaaaatttctatcaaaagaaagacaaatttgtacatacaacacttagagaatttaccacttagagatcactcactagaaaaactaaagaattcacttcagctagacaaaaagtgaaaccaaagaaaaagaacaatggwgagtacataaaatgatttaaaaaattgatttaagtaaatatcaactgtaaaaataatagtttcaaaatttatagttaaaaattaaatattaaacaataatagccaaatggtagagatggggtattcaatttgtagtgaaaccattacaag

SEQ ID NO: 24475 - DNA, 530 bp, Homo sapiens
tgaaagtatattgatgtttagtatacaattctcccaagacttctgcatgcttgaaattttcatgattaaaaattggggaaaaaagcttttagagagaaaggacagaatatttaccaaaaagttatagttacaataaaagaatgatttttattagccataccatagattccagaagacaatgtagtaatcactttactatactgagaataaataaatatcaacctaaaatttttaacttagctaaaaatttctatcaaaagaaagacaaatttgtacatacaacacttagagaatttaccacttagagatcactcactagaaaaactaaagaattcacttcagctagacaaaaagtgaaaccaaagaaaaagaacaatggtgagtacataaaatgatttaaaaaattgatttaagtaaatatcaactgtaaaaataatagtttcaaaatttatagttaaaaattaaatattaaacaataatagccaaatggtagagatggggtattcartttgtagtgaaaccattacaag

SEQ ID NO: 24476 - DNA, 518 bp, Homo sapiens
agagacttgcacaattaaaattagtagcagcacatgccacaggttaagagccagcatgagatgcccacctgtgcatagtggcatttgaaacgagctctgtctgcagagcaggcagcccagcaaaggagaaatttgcacagtgaggacaatactaccacagaaagtggctcagaatactttttgtacacgtggtatctccaggagggttggatatctgcaaaatcgttgaggcctggttttattgcctttaatttatgtataagacctcaggaagattagtaatttattcagtatcatacatgcagaaagaatctcccagtctccaaattcacatttcytctcagaagcatatttgcatagatcaagagcttgtggcaaccaaacttatgtaattagctcccatctatacatgtttactccacttagccacattcttagagccttcttcttctgaaattctaaaatgggaaacacctgcttccttctggcccaaaatgttactttggtttcagctttga

SEQ ID NO: 24477 - DNA, 1862 bp, Homo sapiens
tcaaggtcagatcaggtatcactttaaggatgtttctctgattacctcattccatctaattgcccaaatccaaatctggtggacctcctgtgtccctcttcaacacctgtgtgtacctagacaaaatttttcccatcacattttaattatttgtttcttactagcctactaagctcttgaagacaaaggactgtgtggcatattttaatggtctcagcrcttagctctgtgtctactctttagttatgtcctcaattttgggggaatgaaatccttttattataagaaatcaaaacagtgtatcctgattcagaaactttggagacttaggcagtaggaggctaattttgagactggcatatatttttaagagtactgggggaaaattttgaattgcatttagagtttacatggagtcatgtggtccttctggacttgctttaatattatgttcttagcactgcccagtatcagcaagctctttggaactgaaaataaggccagtgtctgtttattttactaattttcctaacttctaacctgttaacatcacgtaaaaaaaaatgtacccatctagttgcttcatttccttagcatatactttaaagtactcatgtgtaaggttccatttagtgtccttggtttgtagacagaggacaaaatccttgccctcagatgcttttagtctgttctagtagtaaccacagcagagcaagcatagtttggtaacttccaggtggacatattcatcattttgtccatgggggtaggagggtggtcttaacagtttgcaggtttaacccacatttcaaaaaacatgttaaaatatgaagtgttctaattaaatctattggcacagtaaatagatattttgggatattagtgaactaaagagatatttggggagatggcagctacaagctaaaatctgaacactttgattaatatttagaattaattgacaactacagagagccagtagtggtggtgctgataagaatgtggatggtaaccaaaacttagtctgtcttacagttttgcctacagctggtcatagtgaaaatatgtagtgtgaaagtgaatgtcattgatggacaagtcttctttaagacatttgacttcgttttctacttttgtccactccagattttttgccaaaacaatatggattttttttctttggcagaaataaaccccagctctctagctaccttgagcaaagaagggaagttattgatcgaatatcagtcaattcacagaatgatttggaagcctggaagaccagagttgcacaggaaccagggcaaccttgggtgatgaagcaacagaaactgctcatccttttgattgtgggatctccagtggattaaaaaaaaaaagacggccgggcgcagtggctcatgcctgtaatcccagcactttgggaggctgaggctggcggatcacgaggtcaggagattgagaccacggtgaaaccctgtctctactaaaaatacaaaaaattagccgggcgcggtggcaggcgcctgtagtcccagctactcgggaggctgagataggagaacggcatggacccaggaggcggagcttgcagttagccgagatcatgccactgcactccagcctgggagacagagtgagactccgtctaaacaacaacaacaacaacaacaacaacaacaacaacaacaacaacaaagacacccccccgccatcccatgcttattatatcattcctttgagattcaaacttctggggaagagagttgattaattttcccctttgtttctcgattataggtatgggtaaagattatgtatgggagaaggaccctccttagaatttctctagttgctgggca

SEQ ID NO: 24478 - DNA, 1102 bp, Homo sapiens
aaataagcatgaaagagtggccaccatccatctagtcctctgtccaggtgaggataaaaagtaagaaagggaatttcaaaagataagatctataggagtagttgttaacctttaggagaggaatgtcaggatgtgtggaaggggctagtatagttcaaaaatgttccccaagtcattctggattctggtaatatccttacctgctccctttgagagccattcatttatgtcacttctggggtttttgttagaagagaattagcagacatagataaagtaatttttgtttgaacttcatctagaatttggagtgctttagtctgcataataacaataacatcagggtgttaaatttttccccttaattttcaaggtggtttaatamtagtaagtgttacttcagtcatctgtgtgtgtggtaaacgtgtttgtgtttcatttacctgatggaaacttaaaactatcaaccgtacaaaaaatcttaaggattgtgacaataataaaacagttctttatagtttaaaatgtagttagttatataagatatacataaacaaaataattaagtggtaatgtcgcatagttacaattctgggtatgctcagaatagggagattacattaggagagtagtattttttaaactatggacccatggtccattgttggtttatgaaatcaatttaattgctatttactagtgtcacctcactcttttttaagtggactaggataggctagaaaatagatgttgtacaggactcttactactgcattgcagtaagatttggtattctgtgaaacttttaaatatatgaatgtttgtaactgtgtactaaattagatggaaaatatatttcttctgtgagttgcagccaaaagtgttggaaatccattgtaggatgttttgataagttgatgtgtacatttaaaaataaagtctctcaatttcgtctgcttgtagcattcattcctaaatttttaacatcttaactaatcacatatatatatttgtgtgtgtaagtataaagtatacacacatatatatgtgtacatatatatttttttttcttaataggtgcaatggatgagcttcatagtct

SEQ ID NO: 24479 - DNA, 836 bp, Homo sapiens
atccatccggagggcaaccagaggagtggggggtaaaactccacagggagaagggaatctctagcccaactgtgtaacagtgcsaacggtggtggggagaagcctccaggccagaacttaggggaggccataaatccagggtgcagactccacaggcagggaaagaaccaaccctttttctttcacagctgagaggtaggtagcctggggaagttttcaagcccagctcatccacacctggaaaaagactcagggctgttgggggcgggcacagtgggagtgagatgggccctatggtttgcaggggagctgagtgaggcctgtgattgccggctttcccccacttccctaacaacctacatgactcagcagaggcagtcataatcctcctagctacacaactccagtgacctgggaatctcacccccatcccccacagcagccgcagcaagacctgcccaaggagagtctgagctcagacactcctagcgccaccccaacttgatggttctttcctacccacccttgtagccaaagacaaagaacatataatcttgggagttctcggaccccacccactgccagttgttctccatactaccagagctgatgctgtctggaaagcagccacctcctggcagaaagccaaccaacacaaaaatagagcattaaaccaccaaagctagggaccctcatagagtccattgcatacaccggcccagccacctccaccagaacaggcactggcatccactgttgagagacccatagacagttcacatcacaggactctgtgcagacaacctccagtaccagcccagagcctggcagacttt

SEQ ID NO: 24480 - DNA, 949 bp, Homo sapiens
tgctctgaggaagcccacaattttcacaatggatagcatcagcatatctgcctttttcttcagaggaagatactatctttattagattagattcgaagcatgcctgccctttgctcaagagagagacagtaacttcaggcttatctctaaacacatattcttgaaaagacaatatatctgctatctgtaggcagtgtctttgctcacaagacatgcagaaacatgagagacccatagaaaattgtcacccaccaatgtaacaagacaatgtatacaaaagcttctcaagtcatccttttgggaaagaaaatgccatgcaaaaaaacaaaaacaaaaaaaaccaaaaatctcttaagattgtgcaacctgtatatcaaggcttcattttgcccaccataacttgccattgcctgaagccaggctgatcactgtgggagccagcactaacaatttactgaatgtcagcttccccaagccagaaaatgccccttctgatctgccagatggtttggggcctgatgcttggcatcctcacagctgccgcagtcgtgttccttggagtgggtgagtgataccttggataatgaaaaatgattggtaatttcttttacctgaagcctattctctatcaacatgctgtgaagaatcagaagtctgcctatttccaacccactctacaattgagccattgtagtggaaaaagcatcacagttctgactgggagtytccctaggaaaccctggcttgtaggattccagagagatgacagtaggaactatgaagaagaggcagatctcgcaacctgccctgctgctccttgcttggaagtagaaggttgccagacaaggatggtctgtggctaaactgtcctataggattcctgtttcaaagccctgccctttttcaaggggcctccttcccttattacattctgcagtctatctcttca

SEQ ID NO: 24481 - DNA, 992 bp, Homo sapiens
aaggattgcttttaataccttaacaaaataggtcattaaaaaaaatcaagtgcctttcagtattcttccaagtttcaataactgatcttttccattaaaaaacttttgattcattattccaaatcaacatatcatctaaatatttacacatagttagatgtagcttttccctaacctactcccttttatttattagtactcatttacatcttagtttgccacatttacagttctttgaaagtttcatctaatattcaccagaccattcacctcacaattttcctccctctttctaaataggtgaatttgtttactgcaaaatcgatggctacgctattaaaggttactatcacgattttaaaagacatgatcaccatcatttaccaagattcttaccacaaggaaatgatcacaaggttggacaaacaggctccaactcttaagggaaagggcttgcagttagatcacacagggcgggcagggaagcaagcggggaggggtaggtcggaaaaggcagtgcttgattcaattcaacattcactgcgccacttaccaagagccagaaaaagaaaaaaaaaaaaaaaaaaagccaaccagctgggcgttatttcgagcacggggccctgcaggtgggcctgtgggcggggacccggcgcccgggagggaaggggctggctcagagactatagacgggcggggaccgccccggcccgggcctccagygcccggcgcccgcacactcgccagcccagctgccggcacgccggccagccagccgctgccgcttaccagtggcgcctcgctgactccccgggggcagctcttcaacggttcccgcagtcagagcaccaccccgcggtggggtacctccagcccgcccgcagctctcggtccccgccgcgccgccactctcgcgagaagccaggaagtccgcgaagtggggggaggaggagcagggaggggcacttaacggtggtggctggttctgcgcc

SEQ ID NO: 24482 - DNA, 1030 bp, Homo sapiens
tagttcaagaccagcttgaacagcattgtgagaccctaactctacaaaatattttaaatattagctgggtgtggtggcatgtgtatgtggtcccagctactcaggaggctgagttgggaggactgcttgagccyaggaggtcaaggctgcagtgagccatgttcatgccactgcactccagtctgggcaacagagctgaaaccctgtcaaaaaaaaaaaaagaaaaagaaaagataagaaaagaaaaaagaaaagaaaagaaaggaaaagaaaagaaaagaaaagaaactctcttagaaactttaatacggtaaatcacatgaggtgttccccaaatttatatgttgtgggacccttttttgaaataagcatctcagcctttgaaaaacattgctaagtgaaattagaattcacaaattctagggtagaatttacctggtgacagaacaaatgaaagtcattgggaataaattccctgagtgcttatactgtatttgtttccatttacaaagtatcaaaattattttcacaaaaattatttgtgaatacatctttttttttttttttttttttgagacggagtcttgctctgtctcccaggctggactgcagtggcgcaatctcggctcactgcaagctccgcctcccgggttcacgccattctcccgcctcagcctcctgactagctgggactacaggcgcccgccaccatgcccagctattttttttgcatttttagtagagaaggggtttcaccttgttagccaggatgatctccatctcctgacctcgtgatccgcacgcctcggcctcccaaagtgctgggattacaggcgcgagccactgcgcccggcccttgtgaataaatctttaaataaaaattccactgagcttttaattatgtgcataaattatgtcacattttcataaatgtactgttactgaaattgaagtcttacattttgtaggtttataacaaatagcaccatccttaacagagttgcatttttcatgtttccaagttcctttt

SEQ ID NO: 24483 - DNA, 1030 bp, Homo sapiens
tagttcaagaccagcttgaacagcattgtgagaccctaactctacaaaatattttaaatattagctgggtgtggtggcatgtgtatgtggtcccagctactcaggaggctgagttgggaggactgcttgagcctaggaggtcaaggctgcagtgagccatgttcatgccactgcactccagtctgggcaacagagctgaaaccctgtcaaaaaaaaaaaaagaaaaagaaaagataagaaaagaaaaaagaaaagaaaagaaaggaaaagaaaagaaaagaaaagaaactctcttagaaactttaatacggtaaatcacatgaggtgttccccaaatttatatgttgtgggacccttttttgaaataagcatctcagcctttgaaaaacattgctaagtgaaattagaattcacaaattctagggtagaatttacctggtgacagaacaaatgaaagtcattgggaataaattccctgagtgcttatactgtatttgtttccatttacaaagtatcaaaattattttcacaaaaattatttgtgaatacatctttttttttttttttttttttgagacggagtcttgctctgtctcccaggctggactgcagtggcgcaatctcggctcactgcaagctccgcctcccgggttcacgccattctcccgcctcagcctcctgactagctgggactacaggcgcccgccaccaygcccagctattttttttgcatttttagtagagaaggggtttcaccttgttagccaggatgatctccatctcctgacctcgtgatccgcacgcctcggcctcccaaagtgctgggattacaggcgcgagccactgcgcccggcccttgtgaataaatctttaaataaaaattccactgagcttttaattatgtgcataaattatgtcacattttcataaatgtactgttactgaaattgaagtcttacattttgtaggtttataacaaatagcaccatccttaacagagttgcatttttcatgtttccaagttcctttt

SEQ ID NO: 24484 - DNA, 749 bp, Homo sapiens
caatgctgagtgatatagtcactgttgggataggtttttatttgggaaaatggagaggattctcaaaacagattcatggcttgcatgcagtgacaccctatcaagagcctggaaagacaccatgaaatcacctcaactcaagtggtgggcccacctaytcatagtcagtgttacattagccagctctagggctctgacaacataatgagttttgagatagtatactttaaagaaaaaaagaagagtttattttaaagcaaataactaaactgtattttaacttagcacaattaactgcagcatatttacttcatagccccttaacatgtcacttttaccaacaaagctttttccttcatattctaatcacaaaaatttctcaacaatttataacaatctgtaaatctgaccttgcaataaatagtcataaaatgttatttttattactattattatttttagagacaaggtctcgctctgttccccgagctggagtgcagtggtacaatcacagctcactagcctcaaacgattctccagcctcagcctcccaaagtagtgggatttcaggcatgaatcaccacacctggccttgaaacattatttttaaagcctaaattccagttggtatggtaccaaaatttagtttaacttcaaaattcacagtactgccgagaaatgggcgggtcctgaggttccagagaagtggggagtgaattcattccctggtggttttattctggcagcat

SEQ ID NO: 24485 - DNA, 749 bp, Homo sapiens
caatgctgagtgatatagtcactgttgggataggtttttatttgggaaaatggagaggattctcaaaacagattcatggcttgcatgcagtgacaccctatcaagagcctggaaagacaccatgaaatcacctcaactcaagtggtgggcccacctactcatagtcagtgttacaytagccagctctagggctctgacaacataatgagttttgagatagtatactttaaagaaaaaaagaagagtttattttaaagcaaataactaaactgtattttaacttagcacaattaactgcagcatatttacttcatagccccttaacatgtcacttttaccaacaaagctttttccttcatattctaatcacaaaaatttctcaacaatttataacaatctgtaaatctgaccttgcaataaatagtcataaaatgttatttttattactattattatttttagagacaaggtctcgctctgttccccgagctggagtgcagtggtacaatcacagctcactagcctcaaacgattctccagcctcagcctcccaaagtagtgggatttcaggcatgaatcaccacacctggccttgaaacattatttttaaagcctaaattccagttggtatggtaccaaaatttagtttaacttcaaaattcacagtactgccgagaaatgggcgggtcctgaggttccagagaagtggggagtgaattcattccctggtggttttattctggcagcat

SEQ ID NO: 24486 - DNA, 749 bp, Homo sapiens
caatgctgagtgatatagtcactgttgggataggtttttatttgggaaaatggagaggattctcaaaacagattcatggcttgcatgcagtgacaccctatcaagagcctggaaagacaccatgaaatcacctcaactcaagtggtgggcccacctactcatagtcagtgttacattagccagctctagggctctgacaacataatgagttttgagatagtatactttaaagaaaaaaagaagagtttattttaaagcaaataactaaactgtattttaacttagcacaattaactgcagcatatttacttcatagccccttaacatgtcacttttaccaayaaagctttttccttcatattctaatcacaaaaatttctcaacaatttataacaatctgtaaatctgaccttgcaataaatagtcataaaatgttatttttattactattattatttttagagacaaggtctcgctctgttccccgagctggagtgcagtggtacaatcacagctcactagcctcaaacgattctccagcctcagcctcccaaagtagtgggatttcaggcatgaatcaccacacctggccttgaaacattatttttaaagcctaaattccagttggtatggtaccaaaatttagtttaacttcaaaattcacagtactgccgagaaatgggcgggtcctgaggttccagagaagtggggagtgaattcattccctggtggttttattctggcagcat

SEQ ID NO: 24487 - DNA, 820 bp, Homo sapiens
ttgttaacagttatgttaacattgggggtagctgtgcaaggggtgtgagaatgctgttatatctttaaccttggcccatggttaaggtgtttccagtgtaaggtcactgttattccttgtagttaacatatatttggcaccacaggattcattctggaattctctttggcttatttataactttttttctttttctagtagtgagaaacctggctttcatgcagagtttacaaaygccaatttaaacttttgttttgtcatatgcaatgattttattacctgtctttatttcagagcttatgaatttttaattattctaagggctaacatagaactttttcatgttttctactcttcaagagtaggtaagactttagtttgtaatacattacaaaaggaatcctgtggttctctaagagctaatttgtcttggcaaaaggccttagcgagctgtgaatggtggatcatgcctgtaatcccagcactttgatctgagacggctggatcacctgaggccagaagtttgagaccagttttgccagcatggcaaaaccccatctctgctaaaaatacaaaaaattagccaggcataatgccatgcacctgtagtcccagctacttgggaggctgaggcaggagaatctcttgaacctcagaagtggaggttgcagtgagccgagatcgtgccactgcactccagcctgggaaacagcgagactgtctcaaaacaaacaaaaaaaccaaaaaacaaaaaaattagatgggcgtggtggcatgcacctacagtcccagctactcaggaggctgaggcaggagaatc

SEQ ID NO: 24488 - DNA, 669 bp, Homo sapiens
gttcagacacagtgaaaattcaggaatataagacaatgtaaaacactatcagagaaatgaggcaaagaatgatataaaaaaggtaatatcatgttcaagtctttgaggaagatttccaggttgaaaccaagccatagcttttagtatattttcattttaggttaggcaagaaagttagcgaactttgtcctcaaacctaggaccatttaaaaaagtgacaataaagaagacgaagaaatcatgaagagagtataaatttatgaaaatataacatttggccaggcgtggtggctcatgcctgtaatcccaacactttgggaggctgaggcaggcagatcacgaggtcaggagattyagaccatcctggccaacatggtgaaaccatgcctctagtaaaataaaaaaaattagccgggcatggtggtgcgtgcctgcagtctcagctactcgggaggctgaggcaggggaatcgcttgaacctgggaggcggagattgcagtgagctgagattgcaccactgcactccaaacctagtgacagagcgagactatctcaaaaaaaaaaagaaaatataacatttaaataagtcatttaggtttactgggctagttagtgatttgttagctatgataatgtttttattagtgggaaaatgttattttatagaga

SEQ ID NO: 24489 - DNA, 733 bp, Homo sapiens
taagtacttcatttcatacagccacagttattaatactttgctaagggctacccagctgctaaaaactgctgttatctcatactgagaatgctagttctatacctttgctctcaggctgtgaggaaggggtgctagtccaaaaggccatgggattagatttaaaaaggctaaaattaaatcctagaaaataaagaatatttcattttttaacattttaggaaacaaaatgaatatgcttttaaaacataaaaagccagaatccctcaatttataccaccaatctgtcttacatattcatttatccctgtagtttcattctttgctcctttaatacatgagcaagactgacatacaacacataaaatgagaacatctcaatatcatattttttttttttttttttttttttttggagacaaagtctcagtcactcagtcaggctggagtgcagtggcatgatttcagctcactgctacctccatctcctgtgctcaagcgatcctcctgcctcaacctcctgagtagctgctaattataggcacgcaccaccacgcccggctcatttttgtattttcagtagaaacagggtttcaccatgytggccaggctggtctcgaactcctgagctcaagtgatctgcccacctcaacctcccaaagtgctggcattctaggagtgagccaccgtgcccagcctcaatatcatgttttctgagtgacaaaagaaacagaa

SEQ ID NO: 24490 - DNA, 532 bp, Homo sapiens
gtgagccaccgtgctcggctgcttatttcttaattctacaaatttgccagtatttaacatgccgtattgttgtttttttgagacggagtctcgctctgtcgcccaggctggagtgcagtggtgagatctccrctcactgcgagctccacctcccgcgttcacgccattctcctgcctcagcctcccgagtagctgggactacaggcgcccgccaccacgcccggctaattttttgtatttttggtagagacagggtttcactgtgttagcgaggatggtctctatctcctgacctcgtgatccacccgcgtcagcctcccaaagtgctgggattacaggcgtgagccaccgcgcccggctgtattgttgttttttaaaaaattattttagtgtttattgtatctcctcttccaactaaaatgtatgttctgaatacactgacattcatggattttttcctagtgcttagaacaatgcctggcccctataggaagcaccaattatatatttattgagtgaaagaatgaattta

SEQ ID NO: 24491 - DNA, 1129 bp, Homo sapiens
ccaggtctaactgcaaagccccttctcttttcctttatgcatgacccctaattctcctcgaagctgccattttcacagggagaaacgcaaggcttggagagctagagaaacattctcacgacctcgcagaagtgactgagttctcaagcttatgtgttctgattccaggtcaaggggttgccagacctcattaaagtcttgtagcagattttaagagttactattgcatttttaaaatttacccatgtgtgtcattgtaaacacacttagcaatattgttctttaaaacacacaagcttatgagccagttctttacaagaacaacatatggctgtccatgaaaataaaggtttcggaaggtgtgctgtctactgttggttgcccgcsttctttcatgcttgccaaatcctgagtttattcagctgtttggtggccatgtgcttcaaggaaacataggcccctttctggtgccatgaggtgaatcctggttcgtttcagccagctgtggtcattctgttcccactgggaaaggtgtttagaaaagggaatatgggcctggtgcagtggctcatgcctgtaatcccagcactttgggaggcagaggtgggcggatcaccttaagtcaggagttccagaccagcccagccaacatggtgaaaccccatctctactaagaatacaaaaattagctgggcatggtggtgggcgcctgtagtcccagctactcgggaggctgaggcaggagaatcgattgaacccaggaggtggagattgtggtgagctgagatcgtgccactgcattccagcctgggcaacagagcgagactctatctcaaaaaaaaaaaggaaagggaagatgatgcagttctgaccagggaggcctgagatgtacctgccgggaggattctggaacatccaccatgcttcttaaaagcgacacaagaaagagactctttttcataggcatgagggtatggcccggggcaccagggtggctcactgataacgtgaaggaacagtatgagaacaaaagtccatccttgagaacaagagtcagaaggacacaaaacatttagatccttgagtctgacattgagcctctgatttactcggccctgtgattgcccta

SEQ ID NO: 24492 - DNA, 505 bp, Homo sapiens
tgcatgcaatatgtaagtgtatataaggatgccctggccaggcacggtggctcgcgcctgtaatcccagcactttgggaggccgaggcgggcgggatcacttgaggtcatgagtttgagaccagcctggccaacatggtgaaaccccgtctctactgaaaatacaaaaatcagctgggcgtggtggctcgcacctataatyccagctactcgggaggctgaggcagaaggattgcttgaacccaggaggcggaggttgcagtgagccaagattgtgctactgcactccagcctgggtggcagagtgagactccatctcaaaaaaaaaaaaaaaggatgccctttattctggacagaggtaagagttcattaatctcaagggtatctatgaccctgaaaaagtgaagagccactggagtggagagatggaaaagtttgtgaaaggctgtgcctaagggtgtcagatgagtgtgcaggtgcagtgaggtctacctgtttggttgtag

SEQ ID NO: 24493 - DNA, 602 bp, Homo sapiens
ggtatatttagaattggaaagactgttcgattgacatcccaaatctggatgctctttggcagaggaaaataaattttaagacgtatctctcttgttgagaaactgactcaaaatcaggattcatgagcttggtaaatgccaggtatctcaacaatcacacctgagataaacatcaccaagtccacttgcctctaccagaagatgaaaggcccaaatccctggagataaaataacttttttctaaatccatttatttcctagacaaatgacctgtctaatgaactgtgatattaayaaatcagaatctttggcattaagaatttcttattatgggctgggcacagtggctgtcacctgtaatcccagtgcttgggaggctaaaatggatcacttgaggccaggaatttgaaaccagcctgggtaacatagtgagaccctgtctctacaaaaaaaattaaaaagcctggcatggtggcacatgcctgtagtccctattactcaggaggctgacgtgggaagatcacttgagcccaggcaaggctgccaggagatatgatcgctccactgcactccaggctggatgacagagcaagaccctgtct

SEQ ID NO: 24494 - DNA, 1570 bp, Homo sapiens
aaatgaccatgcttggcttcaaaggggatttttctaaagtatcacccttatcaggaatttgggaagatgtcctttatcttaaagaagccttcatctctacccaattcacaaacaatgtttatcatgagtcttaaactttatagatgtttattattctctctaattcaaacttcaattaatctcacgtagcgagctttgttagtattttgattttttttcaaaaccatcttttgactttatcacctgtagtggtttgaatggtcatctcagaaaagatgtattcatgttctaatccccagaacctgtgactgtgaccttatttgaaaagagtctttacagaagtgattaatttagggatcttgatgagattatcctggattacccaggtaggccctaaatccaataatatgtccttacaagagacagaatagaatacacagacacaaaggggaaggccgtgtgaatgaaggtgaagcagagtttggagtgaagctgccacaagtcaagggacacctggaaccaccagaagctggaagaaacaaagatccaccctagagccttcggagggagcatggccctgccaacaccttgatttcagatttctagtctccagaactgtaagaggacatatttctgttgttttaagccactcagcttgtggtaatttgttaaatcagccctaggaaattattatattgctggacctgactgtttctccctatacgtcatggtgtgtttatctactatttctcccactttctctggaattatctagctgtttcatttgtacaataaaagttcttaaaatgcagtttgtttgtgtttcaactttttgtctaatatattcatttaaggctataaatttctccttttgcattctaatttcatgatattctacaaagctgaacacagggattattcattatttctcattttaaatagtttaccatgtccgtttgacttttctcatggtaaaatttacttagaaatattacgtggaatatttggccacatttttattgtacatttctaaattcacattaattattggtaatagaagaaaacctaggcaataccattcagaacataggcacaggcaaagatttcataaggaagatgccaaaagtgattgtagcaaaagcaaaaattgataaatgggatctagttaaactaaagagcttctgcacagcaaaagaaactatcaayagagtaaatgcacaacctacagaatgggagaaaattgttgcaatctatgcatctaacaaagcctaatatccagcatctataagcaacttaaatttacaagaaaaaacaaaaacaaacttacaagaaaaaaacaaacaaccccgttaaaaagtgggcaaaggacgtgaacagacacttctcaaacgaagacatacatgcacccaacaaacatgaaaaaaagcccaagatcaccgatcattagagaaatacaaatcaaaaccacaatgagataccatcttacaccagtgagaatggctgttattaaaaagtcaaaaaacagcagatgctggcaacgttgtggagaaaaaggaacgcttttacactg

SEQ ID NO: 24495 - DNA, 1570 bp, Homo sapiens
aaatgaccatgcttggcttcaaaggggatttttctaaagtatcacccttatcaggaatttgggaagatgtcctttatcttaaagaagccttcatctctacccaattcacaaacaatgtttatcatgagtcttaaactttatagatgtttattattctctctaattcaaacttcaattaatctcacgtagcgagctttgttagtattttgattttttttcaaaaccatcttttgactttatcacctgtagtggtttgaatggtcatctcagaaaagatgtattcatgttctaatccccagaacctgtgactgtgaccttatttgaaaagagtctttacagaagtgattaatttagggatcttgatgagattatcctggattacccaggtaggccctaaatccaataatatgtccttacaagagacagaatagaatacacagacacaaaggggaaggccgtgtgaatgaaggtgaagcagagtttggagtgaagctgccacaagtcaagggacacctggaaccaccagaagctggaagaaacaaagatccaccctagagccttcggagggagcatggccctgccaacaccttgatttcagatttctagtctccagaactgtaagaggacatatttctgttgttttaagccactcagcttgtggtaatttgttaaatcagccctaggaaattattatattgctggacctgactgtttctccctatacgtcatggtgtgtttatctactatttctcccactttctctggaattatctagctgtttcatttgtacaataaaagttcttaaaatgcagtttgtttgtgtttcaactttttgtctaatatattcatttaaggctataaatttctccttttgcattctaatttcatgatattctacaaagctgaacacagggattattcattatttctcattttaaatagtttaccatgtccgtttgacttttctcatggtaaaatttacttagaaatattacgtggaatatttggccacatttttattgtacatttctaaattcacattaattattggtaatagaagaaaacctaggcaataccattcagaacataggcacaggcaaagatttcataaggaagatgccaaaagtgattgtagcaaaagcaaaaattgataaatgggatctagttaaactaaagagcttctgcacagcaaaagaaactatcaatagagtaaatgcacaacctacagaatgggagaaaattgttgcaatctatgcatctaacaaagcctaatatccagcatctataagcaacttaaatttacaagaaaaaacaaaaacaaacttacaagaaaaaaacaaacaaccccgttraaaagtgggcaaaggacgtgaacagacacttctcaaacgaagacatacatgcacccaacaaacatgaaaaaaagcccaagatcaccgatcattagagaaatacaaatcaaaaccacaatgagataccatcttacaccagtgagaatggctgttattaaaaagtcaaaaaacagcagatgctggcaacgttgtggagaaaaaggaacgcttttacactg

SEQ ID NO: 24496 - DNA, 974 bp, Homo sapiens
tcagagcatctacttagtgtgaatctagcctcttgaagaaaggtttatcaaagaggttgttacatgcaaaataaaaatagtgactctaagagcattttaacctaccagaaactgatatcttgacctctctaattaagatgtttgttgtcagttatcaccctaatctgactggagaaaacaatcagggtgagatgaagaaagaactgcagagaatcaattggcaagcttatctttcaaaactccgtgtacagaaaaagcttgacaaggagggaagaaccacttctgtgaatttaatgaggtttggatgacaggctgggcctcttgatttgcaatattcaggatcaccctgttttggtttttgttttgttttgttttttaaaactgttgtcctaaaataagccctttttcatttgytctttttggtttgttttactgtgcattgtgtaatgtgagcagacaatgataattcctctttaaaattcaaacataaagagtaggttaagagagatccaccataaaacctgttcctgcacctagtaattttttctgcttgttctagcactggaagttgatcctgcctttttacctagtgattacccaggcagtgctacaacctgaacaaatatttattgtagccagaaaacacttcaaatggtaagacaactctttcaatatttactattctgcaattggccagaacgctaatgacttttaaacacaccaagaaagattaatagatttgaatgatagctatgacactctcaagttacttggttagtggcaagtaatggtatagagcatataatgattgatgaaataactactatagaataacaaaatagtaccatgcaaacgggctcctttatactggcattagattctactcacagcaggttttgctgcacatgcaagggcagctcatttctgtccagctcatataacaacttccttgataaatctttccccaataggtt

SEQ ID NO: 24497 - DNA, 533 bp, Homo sapiens
aacatggtgagaccccgtttctaccaaaaatagaaaaattagctgggcgtggtggtgtgcacctgtagtcccagctacttgggaggctgaggcaggaggaaacgcaaaaggaaatgattttgtttgtttgtttgttttgttttgtttgttagttcatgtcttttattaactcatacagttccttgtcttctggtttgttgaagcagtaagtcagacaacatttgccacaataatgtctgtcatagtggcttgccataaacactccagcaccacattcatcagaagggcactctcgatgaaggtgactaattttgccattctcgtctaccttatagtatttcaggacagccagcttaatcttcttyctcttgtgcttattcttcttgggagtggtgtaagacttcttccttttcttagcaccaccacgaagtctcaacacaagatgaagagtagactccttttgaatgttgtagtcagacaaagcacatccatcctccagttgcttgctagcaaagatcagtctttactgatca

SEQ ID NO: 24498 - DNA, 592 bp, Homo sapiens
agagccagggtgttcattaaaatcatgtataaacgacgggaattcttcctctgtctgtaggatcctcaagagagcttattattttgaggaagaaattaccagggaggtttaagggcatctattgagcaaaattatagtactcacaggaaactcaaggcctttagccagcccaagtagaaagagtcataaatacgggtcgaggacaaatttacaccactgagaggtctttggggtagggagtggagctttcaggcgtgagagtgaagtgtcacctcacctgtccctgtctgctctgcccttctccctttctgtccatacagcttacaggataagaggggtcaaagcccccttctgtttgggaggagctggcacattcttcatcctccccaagaccaagggggaatgcaggagggctcgtgggaaggacaggcttttaaggtctgcgtcccttccaggtaaagggcttctcctcrctcacgcaggggcatggccatcttgccaagttgggatcccacgtgggagcgtgggatcgaaacactggatggtactaatgattttgtcctgagctcctgtcctcctgtctcaagaagcc

SEQ ID NO: 24499 - DNA, 1116 bp, Homo sapiens
atccaggacccttgtgcctgctcctttgcctttctcccctcctggccactgtccccagctcctggctgagcatactgctcatggcacctggcctttttggatctccaggaacaacagtccttgtaccccaggtgtgttcagctgattcatgtgaggtgacttaatcagtgacaatgccccattcaggatggccctcctggaagacgccctggggtcaacttaactggtgggagtttctgagcaattctcttatccacaagccacatcctgaaaccccaaatttgttagactggttcagacttctccaagcacagcaaggagagtaaattatgtaaggatgactgacagtcattagttctatcagagaggggtccttcagagatgccatagtagtttatgaggatgctatatctgggcctcagtcatttgaatgggagtgagtttagggttgtgcattgctcctgtggtgcccatggagatttcccttggagcaccgccctgccctggacttggctcctcactggagagggagttacctcctctagctccacagatggctacccatggcctgaccaaaggttcactccaagggaggcaccttcagcagggccctgcccctgcccagcttccctccagggcagcctgaggcatggactactaggtctgggcagtgcaggtgataaagggctgccatctggagtgggacagctggatagcagtgacctgcctccctggtttgtggtggtagtgtgcgaacaggcaccttgagtcatcaggggagtattctggctccaaggaaaccctgtaaggacactttgatcccactcagagactgtttcttcaggaatccgtcttgggtctttctccaaggagtctgtttcagtgagggctttgccttgcttaacataaacagtgccccagagacttccccacatctcagctaagccagcgaaggagggatttggggtgggctgccttgtctgatgaccccaggccaagctgtctttgaggctcatcatggagccttcctctgactttcattgactgcgtctctttggacatacagygaccactgtgtttggtgtttggcacctgctggtgagcacagtgggggca

SEQ ID NO: 24500 - DNA, 585 bp, Homo sapiens
aaattaggcaagcctggttttcctctgtgtttaccagctgacgcacagtctctgaacttacaagtacatggctggctgggcagtcatgcccagttttcacaatttattattccttttaatggctctcttttcatcccaatgaaatactctgtctcttaatttcacrtgaatatcctttacctgggaaagtggaagaaaaacgataacactcgtttctaattaatttcttacatttccctcagtgaagtgtatctaaagaagcaaaacttactgaatcaagtttaatgacataataaattcttcctttccgacaatgctatggcttaattcactagtgcactttaagcttttgcctttagcgactgatgggtcattagtctgtatgtaatccagcaatcggactccttggagtctaaactcaatcagcaagcaccaaatcagtagtttctgaaatatgactggtaggtcaagtgtccccaaaaagagtgcctggggcatcccagatggagaatagggcatgacaagcaacaaactaggacagaatttgatgccagcattcactaaagacttcattcattctaactc

SEQ ID NO: 24501 - DNA, 514 bp, Homo sapiens
tctttactgctgtgagaccaaggcactgccaaacacaaaaacttattttaaaaagaattgaaaacatttattttccttttgagaagaaaaacttcttaatcagacttcttactcagtataatttaagagtttatttggcataacttactaagattcatgtaaatcagaagtcaaaatgtcacttagaaatctttgtatttaaagraacttgttccgcgaatacagaggttctagaaaatgttggtctgtgaaattttatacatataaacatgatggaagaaaaagaaattagaaaaagattcactcctccccatcccttcacccaggggaagaaaacctatgttatgaatggagacatttagtgagatgggtattaacagacaagtgctaaaccctatgaaatataacaaggagagtccgattctaatgataaacatgctattgttcatttctaactgtctgaaataatcctgggttttacttaaattgtgccaaaaacttacttaaattgtgt

SEQ ID NO: 24502 - DNA, 1921 bp, Homo sapiens
aataaaaatatctaccccaaagtatcaggtgaaccaaatatgaatttatgcaaagttcttactacagagctaggcagatagtaagcatttaataaaaggctggctaatcttaataaaaataatacattgtaaaacaattttagttattttatgttttgtaccatctagacatgtcaaaaatatagattactatatttgtttttagattcatgtggtgtaattagatactaaactgcatatgcagactattgtttatcaactgaatctgtcaccatattcatgcatgtgctgggtcttttgaaagaccaattataagcaacaaaaatacaatttcaatgcttatgcttgcatgtttacaatcttgttagtactctgttagcaatgaaaattacaatattgaatttgttaatatgctggaaaaccaccatcccatgtaygttattaaagtcatgtttaattgtttctctaagtgtaaaagacaaaacttttttcagtcataatttacagtttaaaaagctttaatttggtatcatgaaaatgaaaatatggtgatatgttttttaatgagaaaaggagagaaagacataaaatgtaaccaatatggctaaatgaattgaagtaaaataagttgacattgtgtttcatgaataacaattgcatagtaattaaagaaaaataatattgttggtataatttatcatctagtatgtggaactcatgttttgaccattaattaattaacttgttttgctgaaaaatgatatattaaactagttttcatttgaatttaattttgttctatttgtaaatatgcttgggatttatagttctatatagctataaacattaagagtttattctattctgactataaaccatttccaacctagtggtatgttctgagccattccaaacttagtggtgaaaaagaaccatcattttattttgctcatggattttgcaaatcaggaattcatacaggccacagtggaaattgcttgattctgcaaaagcattggcttatagctaaaactatctggaggtttctttacccaggttctagcgctgagatgaaactaagaatggcttagctgggattatcaaccaaagtgcctgcaggtgacctctcaatgtggcttgggcttttcagacatgagtcttcagacttcttacattatgacttagaaatccaagaccaagttatctaggaaacaaggtgcctgatcttttataatggccacacaagtcacgcaatattacttctggtatactctatcagttacattgtcatggagcactcagattcaagtgaaagagacctagacctgatttcttgatgggagaaatgtcaaagaatttgccaccatttttgaaaactacacttgtgtgccttctgaccataaattgtttatgcacataacacacaggaaaaatgaacttactctcttccaagaccctcaaatgacttgtaagatcaagttcatactacataatttcattatttaaatagaaccagatacagttgaggctcctcagatgcaatttttttattattacagttcatttagatccatctgtctcctaccactaccacatctgacattcaatggtgggattacttcaacagacattttttttttcctagagtgaaaaagaaggtacataaaagttgcttctagttcgtaacaattctgtaaaccagccagccctacctgccattatttgattaggaccgaggcctgctccctgaaaatgattatctgcagcatgtggctccaccttgccatttgtatcatgttcacattttagtttactgcccatagacatttgaggctataaaggcctctttttattttatattgttcacatccctttcaatctaggctggattctactaaaaactctgtcagtgttttatgca

SEQ ID NO: 24503 - DNA, 1921 bp, Homo sapiens
aataaaaatatctaccccaaagtatcaggtgaaccaaatatgaatttatgcaaagttcttactacagagctaggcagatagtaagcatttaataaaaggctggctaatcttaataaaaataatacattgtaaaacaattttagttattttatgttttgtaccatctagacatgtcaaaaatatagattactatatttgtttttagattcatgtggtgtaattagatactaaactgcatatgcagactattgtttatcaactgaatctgtcaccatattcatgcatgtgctgggtcttttgaaagaccaattataagcaacaaaaatacaatttcaatgcttatgcttgcatgtttacaatcttgttagtactctgttagcaatgaaaattacaatattgaatttgttaatatgctggaaaaccaccatcccatgtatgttattaaagtcaygtttaattgtttctctaagtgtaaaagacaaaacttttttcagtcataatttacagtttaaaaagctttaatttggtatcatgaaaatgaaaatatggtgatatgttttttaatgagaaaaggagagaaagacataaaatgtaaccaatatggctaaatgaattgaagtaaaataagttgacattgtgtttcatgaataacaattgcatagtaattaaagaaaaataatattgttggtataatttatcatctagtatgtggaactcatgttttgaccattaattaattaacttgttttgctgaaaaatgatatattaaactagttttcatttgaatttaattttgttctatttgtaaatatgcttgggatttatagttctatatagctataaacattaagagtttattctattctgactataaaccatttccaacctagtggtatgttctgagccattccaaacttagtggtgaaaaagaaccatcattttattttgctcatggattttgcaaatcaggaattcatacaggccacagtggaaattgcttgattctgcaaaagcattggcttatagctaaaactatctggaggtttctttacccaggttctagcgctgagatgaaactaagaatggcttagctgggattatcaaccaaagtgcctgcaggtgacctctcaatgtggcttgggcttttcagacatgagtcttcagacttcttacattatgacttagaaatccaagaccaagttatctaggaaacaaggtgcctgatcttttataatggccacacaagtcacgcaatattacttctggtatactctatcagttacattgtcatggagcactcagattcaagtgaaagagacctagacctgatttcttgatgggagaaatgtcaaagaatttgccaccatttttgaaaactacacttgtgtgccttctgaccataaattgtttatgcacataacacacaggaaaaatgaacttactctcttccaagaccctcaaatgacttgtaagatcaagttcatactacataatttcattatttaaatagaaccagatacagttgaggctcctcagatgcaatttttttattattacagttcatttagatccatctgtctcctaccactaccacatctgacattcaatggtgggattacttcaacagacattttttttttcctagagtgaaaaagaaggtacataaaagttgcttctagttcgtaacaattctgtaaaccagccagccctacctgccattatttgattaggaccgaggcctgctccctgaaaatgattatctgcagcatgtggctccaccttgccatttgtatcatgttcacattttagtttactgcccatagacatttgaggctataaaggcctctttttattttatattgttcacatccctttcaatctaggctggattctactaaaaactctgtcagtgttttatgca

SEQ ID NO: 24504 - DNA, 1921 bp, Homo sapiens
aataaaaatatctaccccaaagtatcaggtgaaccaaatatgaatttatgcaaagttcttactacagagctaggcagatagtaagcatttaataaaaggctggctaatcttaataaaaataatacattgtaaaacaattttagttattttatgttttgtaccatctagacatgtcaaaaatatagattactatatttgtttttagattcatgtggtgtaattagatactaaactgcatatgcagactattgtttatcaactgaatctgtcaccatattcatgcatgtgctgggtcttttgaaagaccaattataagcaacaaaaatacaatttcaatgcttatgcttgcatgtttacaatcttgttagtactctgttagcaatgaaaattacaatattgaatttgttaatatgctggaaaaccaccatcccatgtatgttattaaagtcatgtttaattgtttctctaagtgtaaaagacaaaacttttttcagtcataatttacagtttaaaaagctttaatttggtatcatgaaaatgaaaatatggtgatatgttttttaatgagaaaaggagagaaagacataaaatgtaaccaatatggctaaatgaattgaagtaaaataagttgacattgtgtttcatgaataacaattgcatagtaattaaagaaaaataatattgttggtataatttatcatctagtatgtggaactcatrttttgaccattaattaattaacttgttttgctgaaaaatgatatattaaactagttttcatttgaatttaattttgttctatttgtaaatatgcttgggatttatagttctatatagctataaacattaagagtttattctattctgactataaaccatttccaacctagtggtatgttctgagccattccaaacttagtggtgaaaaagaaccatcattttattttgctcatggattttgcaaatcaggaattcatacaggccacagtggaaattgcttgattctgcaaaagcattggcttatagctaaaactatctggaggtttctttacccaggttctagcgctgagatgaaactaagaatggcttagctgggattatcaaccaaagtgcctgcaggtgacctctcaatgtggcttgggcttttcagacatgagtcttcagacttcttacattatgacttagaaatccaagaccaagttatctaggaaacaaggtgcctgatcttttataatggccacacaagtcacgcaatattacttctggtatactctatcagttacattgtcatggagcactcagattcaagtgaaagagacctagacctgatttcttgatgggagaaatgtcaaagaatttgccaccatttttgaaaactacacttgtgtgccttctgaccataaattgtttatgcacataacacacaggaaaaatgaacttactctcttccaagaccctcaaatgacttgtaagatcaagttcatactacataatttcattatttaaatagaaccagatacagttgaggctcctcagatgcaatttttttattattacagttcatttagatccatctgtctcctaccactaccacatctgacattcaatggtgggattacttcaacagacattttttttttcctagagtgaaaaagaaggtacataaaagttgcttctagttcgtaacaattctgtaaaccagccagccctacctgccattatttgattaggaccgaggcctgctccctgaaaatgattatctgcagcatgtggctccaccttgccatttgtatcatgttcacattttagtttactgcccatagacatttgaggctataaaggcctctttttattttatattgttcacatccctttcaatctaggctggattctactaaaaactctgtcagtgttttatgca

SEQ ID NO: 24505 - DNA, 1921 bp, Homo sapiens
aataaaaatatctaccccaaagtatcaggtgaaccaaatatgaatttatgcaaagttcttactacagagctaggcagatagtaagcatttaataaaaggctggctaatcttaataaaaataatacattgtaaaacaattttagttattttatgttttgtaccatctagacatgtcaaaaatatagattactatatttgtttttagattcatgtggtgtaattagatactaaactgcatatgcagactattgtttatcaactgaatctgtcaccatattcatgcatgtgctgggtcttttgaaagaccaattataagcaacaaaaatacaatttcaatgcttatgcttgcatgtttacaatcttgttagtactctgttagcaatgaaaattacaatattgaatttgttaatatgctggaaaaccaccatcccatgtatgttattaaagtcatgtttaattgtttctctaagtgtaaaagacaaaacttttttcagtcataatttacagtttaaaaagctttaatttggtatcatgaaaatgaaaatatggtgatatgttttttaatgagaaaaggagagaaagacataaaatgtaaccaatatggctaaatgaattgaagtaaaataagttgacattgtgtttcatgaataacaattgcatagtaattaaagaaaaataatattgttggtataatttatcatctagtatgtggaactcatgttttgaccattaattaattaacttgttttgctgaaaaatgatatattaaactagttttcatttgaatttaattttgttctatttgtaaatatgcttgggatttatagttctatatagctataaacattaagagtttattctattctgactataaaccatttccaacctagtggtatgttctgagccattccaaacttagtggtgaaaaagaaccatcattttattttgctcatggattttgcaaatcaggaattcatacaggccacagtggaaattgcttgattctgcaaaagcattggcttatagctaaaactatctggaggtttctttacccaggttctagcgctgagatgaaactaagaatggcttagctgggattatcaaccaaagtgcctgcaggtgacctctcaatgtggcttgggcttttcagacatgagtcttcagacttcttacattatgacttagaaatccaagaccaagttatctaggaaacaaggtgcctgatcttttataatggccacacaagtcacgcaatattacttctggtatactctatcagttacattgtcatggagcactcagattcaagtgaaagagacctagacctgatttcttgatgggagaaatgtcaaagaatttgccaccatttttgaaaactacacttgtgtgccttctgaccataaattgtttatgcacataacacacaggaaaaatgaacttactctcttccaagaccctcaaatgacttgtaagatcaagttcatactacataatttcattatttaaatagaaccagatacagttgaggctcctcagatgcaatttttttattattacagttcatttagatccatctgtctcctaccactaccacatctgacattcaatggtgggattacttcaacagacattttttttttcctagagtgaaaaagaaggtacataaaagttgcttctagttcgtaacaattctgtaaaccagccagccctacctgccattatttgattaggaccgaggcctgctccctgaaaatgattatctgcagcatgtggctccaccttgccatttgtatcatgttcacattttagtttactgcccatagacatttgaggctataaaggcctctttttattttatattgttcacatccctttcaatctaggctggattctactaaaaactctgwcagtgttttatgca

SEQ ID NO: 24506 - DNA, 1921 bp, Homo sapiens
aataaaaatatctaccccaaagtatcaggtgaaccaaatatgaatttatgcaaagttcttactacagagctaggcagatagtaagcatttaataaaaggctggctaatcttaataaaaataatacattgtaaaacaattttagttattttatgttttgtaccatctagacatgtcaaaaatatagattactatatttgtttttagattcatgtggtgtaattagatactaaactgcatatgcagactattgtttatcaactgaatctgtcaccatattcatgcatgtgctgggtcttttgaaagaccaattataagcaacaaaaatacaatttcaatgcttatgcttgcatgtttacaatcttgttagtactctgttagcaatgaaaattacaatattgaatttgttaatatgctggaaaaccaccatcccatgtatgttattaaagtcatgtttaattgtttctctaagtgtaaaagacaaaacttttttcagtcataatttacagtttaaaaagctttaatttggtatcatgaaaatgaaaatatggtgatatgttttttaatgagaaaaggagagaaagacataaaatgtaaccaatatggctaaatgaattgaagtaaaataagttgacattgtgtttcatgaataacaattgcatagtaattaaagaaaaataatattgttggtataatttatcatctagtatgtggaactcatgttttgaccattaattaattaacttgttttgctgaaaaatgatatattaaactagttttcatttgaatttaattttgttctatttgtaaatatgcttgggatttatagttctatatagctataaacattaagagtttattctattctgactataaaccatttccaacctagtggtatgttctgagccattccaaacttagtggtgaaaaagaaccatcattttattttgctcatggattttgcaaatcaggaattcatacaggccacagtggaaattgcttgattctgcaaaagcattggcttatagctaaaactatctggaggtttctttacccaggttctagcgctgagatgaaactaagaatggcttagctgggattatcaaccaaagtgcctgcaggtgacctctcaatgtggcttgggcttttcagacatgagtcttcagacttcttacattatgacttagaaatccaagaccaagttatctaggaaacaaggtgcctgatcttttataatggccacacaagtcacgcaatattacttctggtatactctatcagttacattgtcatggagcactcagattcaagtgaaagagacctagacctgatttcttgatgggagaaatgtcaaagaatttgccaccatttttgaaaactacacttgtgtgccttctgaccataaattgtttatgcacataacacacaggaaaaatgaacttactctcttccaagaccctcaaatgacttgtaagatcaagttcatactacataatttcattatttaaatagaaccagatacagttgaggctcctcagatgcaatttttttattattacagttcatttagatccatctgtctcctaccactaccacatctgacattcaatggtgggattacttcaacagacattttttttttcctagagtgaaaaagaaggtacataaaagttgcttctagttcgtaacaattctgtaaaccagccagccctacctgccattatttgattaggaccgaggcctgctccctgaaaatgattatctgcagcatgtggctccaccttgccatttgtatcatgttcacattttagtttactgcccatagacatttgaggctataaaggcctctttttattttatattgttcacatccctttcaatctaggctggattctactaaaaactctgtcagwgttttatgca

SEQ ID NO: 24507 - DNA, 1979 bp, Homo sapiens
tcctaaataatgaaatccgtgaaggaccttgtttcctaatcctgggtccccacgggttctggccccgctgactgtaaggaaacctcagtttcccagctatccctcccctctccccagactcagctgtgttactaccaggataacacagggctctgcaaactcagacacctgcgggtggtgggaggggggctggcgcacgcaggtggggctgtgggaattggagactggaggacagagactccaaggggcattcatttccctgtaggactgatctgttgccagatcttgtgactttgagaaaccagaaatctggatttatgtgaaaccttctgatttttaaatgttggcaattaattcacattttaatatatacaggggagttcaaaggaaacatgcctagggggaacctgtttgcttcctctcgtctgctgggcagagcactgtcttatctcattattcaccccatgtacaggaaacacttaatacatgctggctactgttattatcccaaaccccagcggccttcatggagcatgggcttgtatctatttcttgccaggaaatacagtgtaacctcaactctggtaacactgaaagtccgaggcccacctccatcaatggctgcagtgtggcgttttctctaaactgtcagtgaccagagtacccacgttcgtgtaactccctggagaggcagtggggcggcatctgcacctgtctgcactccttactcctctgctcttttgctgcacattctcactctcctcacccctccccatccccctcacctgcagcccccagctgggagtggggcccacttgcccttccacgtcttcttgttctagtgcttgaataactggctgtggcattaattccccattttatcaattggctcgatatgcaaaaggcctataaaggaacactttggttagccaagtcggaaattgttcttcctagatctaatgcaaawatatatatatatatatatatatatatatatatatatataaatgacaaaaggatccctcctctaacctgtgcactttgcttagtggtaaaagtaaacacctagcaagaacgatgaccttcctatgcccctgttacctcccgcagttacaggtccaccctccctggggaagtttttaaaaactccaagagcccaggaattaatattctaattgaggcgattctaatctgaagacagggttgaaaccttgctgggtagtcagataattaaagaagaccttcatcttcagggtcacagggagaagacccaaccttccttcacaagttactgataaaatcgggccactctctggaagaaaaaacttttcacaaataaatcctttaaataagatgtattaaattttctaataaaatgcacctgtagccaactgctgctggaggctttaacacccatggctttcctactgtgagctcccttagggctcctgcttggatttttttaactccttctccacctgctaaaatgtaggtctggctaagccttcttcaggtgccagagaatgttcccttcacccagactctccaggtctctgctcagctgagactcttcacttgctgcagtttgcatgaagttgcctcatgttcccgcctaaaccacaggttccttaaaggtgggatcagggcttccatgtcactaccgtagctccagcagctcaccagtctcatcttcactatagtcaaaagcagaaattttggacatccaaggcagagccatctttgagctttagtaggtgcctttcaggtgaggaagaggccacaaggccatttctaggtctccagaattttcagaaaatgagctaagttaagctgctcccaggtaagcacaattagtaatggactaaaaataaaacaggaacaaaaatcagaggggaaaaggtaaagtcactgatatggtttggctgtgtcccacccaaatctcttcctgtagttcccataatccccacgtgtggaggaag

SEQ ID NO: 24508 - DNA, 1979 bp, Homo sapiens
tcctaaataatgaaatccgtgaaggaccttgtttcctaatcctgggtccccacgggttctggccccgctgactgtaaggaaacctcagtttcccagctatccctcccctctccccagactcagctgtgttactaccaggataacacagggctctgcaaactcagacacctgcgggtggtgggaggggggctggcgcacgcaggtggggctgtgggaattggagactggaggacagagactccaaggggcattcatttccctgtaggactgatctgttgccagatcttgtgactttgagaaaccagaaatctggatttatgtgaaaccttctgatttttaaatgttggcaattaattcacattttaatatatacaggggagttcaaaggaaacatgcctagggggaacctgtttgcttcctctcgtctgctgggcagagcactgtcttatctcattattcaccccatgtacaggaaacacttaatacatgctggctactgttattatcccaaaccccagcggccttcatggagcatgggcttgtatctatttcttgccaggaaatacagtgtaacctcaactctggtaacactgaaagtccgaggcccacctccatcaatggctgcagtgtggcgttttctctaaactgtcagtgaccagagtacccacgttcgtgtaactccctggagaggcagtggggcggcatctgcacctgtctgcactccttactcctctgctcttttgctgcacattctcactctcctcacccctccccatccccctcacctgcagcccccagctgggagtggggcccacttgcccttccacgtcttcttgttctagtgcttgaataactggctgtggcattaattccccattttatcaattggctcgatatgcaaaaggcctataaaggaacactttggttagccaagtcggaaattgttcttcctagatctaatgcaaatatatatatatatatatatatatatatatatatatatataaatgacaaaaggatccctcctctaacctgtgcactttgcttagtggtaaaagtaaacacctagcaagaacgatgaccttcctatgcccctgttacctcccgcagttacaggtccaccctccctggggaagtttttaaaaactccaagagcccaggaattaatattctaatygaggcgattctaatctgaagacagggttgaaaccttgctgggtagtcagataattaaagaagaccttcatcttcagggtcacagggagaagacccaaccttccttcacaagttactgataaaatcgggccactctctggaagaaaaaacttttcacaaataaatcctttaaataagatgtattaaattttctaataaaatgcacctgtagccaactgctgctggaggctttaacacccatggctttcctactgtgagctcccttagggctcctgcttggatttttttaactccttctccacctgctaaaatgtaggtctggctaagccttcttcaggtgccagagaatgttcccttcacccagactctccaggtctctgctcagctgagactcttcacttgctgcagtttgcatgaagttgcctcatgttcccgcctaaaccacaggttccttaaaggtgggatcagggcttccatgtcactaccgtagctccagcagctcaccagtctcatcttcactatagtcaaaagcagaaattttggacatccaaggcagagccatctttgagctttagtaggtgcctttcaggtgaggaagaggccacaaggccatttctaggtctccagaattttcagaaaatgagctaagttaagctgctcccaggtaagcacaattagtaatggactaaaaataaaacaggaacaaaaatcagaggggaaaaggtaaagtcactgatatggtttggctgtgtcccacccaaatctcttcctgtagttcccataatccccacgtgtggaggaag

SEQ ID NO: 24509 - DNA, 611 bp, Homo sapiens
cacagcctagatgtatggttrttctattgactggctttcttaccaggaaattgatgggacctctggtctacttccttaggactttctattcaggaagcctaaaaccttgttaaaaggttgccatttgcagtatcattcaagatgttgattagaattaaagctcctgggctaaaagtacccttaaaagtcatctaatcaaaccctttcatttaacaaatgaaaagccaagccccagtgctctcactgggagtgtcagtggctttacttctaccgcatgataccctttaaagatgagactcagagaaacaagctgatttttacccggctccaccaggcttttatcatccatcactgggggagtagacattatatctggcaaaatgccctctgattctctgtttgcgcaaaatagtaccaaaaaaactaattaatccctgccaggcacagtggctcaaacccataatcccagcactttgggagaccaaggagggtggatcacctgaggtcagaagttcaagatcagcctggccaacatggcgagactctgtctctactaaaaatacaacaattagccaggtgtggtggtgcatgcccgtaatctcagttactcg

SEQ ID NO: 24510 - DNA, 808 bp, Homo sapiens
aagcaactccatctctccccacttcatccttctcagccctcggtcctctgtgatctggctcatgttcctgctgccttactgaggctgctttagtaagggtactagtaagcttccaactggcaactccaaatgactattttcagtatacaacttacttggagtctacttagcatcttcagttattgaacttcctcctttaactcacttccaaaatactactctctcctccttccttctctatttctttgttggctcttcttcctctgccttctcttcaaatatttctacttcctctcactccttctagttctcttttctgtttccacaatacttgttctatcaactactcctttcacttcattcacaataatactgatgattcccaagcatatatctctcatcatgcgtccccctcacatatctgctctttaattcttctttttaattcattkgataccttctaaaagtctctcacaattcagatagtccttcaagccaggaacatgggagtcattctcaaattatctttctcactcaccccctgtcccatctccaaatttttatataagcttcagatttcatggactgtacttaaaaattttttatagttgatgtgtctctatttcagcagctactgtgttatcatttctcatcttagactattacaatctttctggctgtgtttacagatctttccagtccacccccacactgaggtcaggagatctttctaaaatgtatttcatactctatcttgcttaaaactttcaagtgcttaacaactaaatgcagtatatatttccagatt

SEQ ID NO: 24511 - DNA, 515 bp, Homo sapiens
tatttccagcaatggcagtatcaccagaacaagttcatggtcttccagggtgacttgtcaggaagaaaataatcattgtgtctccgcagtgactttgagcaagtcacttgtcttctctgagctccaacttcttcgttagaaaaaaatgagrgcagagcctgccatttgcaacaacatgggcaaatctggaggacattgtgctcagtgaaataaggcagacacagaaagaaaaatactgcataatctcacttatatgtagtatctagaaaaacgtttttaatccaatgcataaaaacagatggtagaagctgggcatggtgatgtgggcctgtagtcctagctactagggagactgaggcgggaggatcacttgagctgaattcaaggctgcagtaatccgtgatggcaccactgcactctaccctgggcaacagagcaagaccctgtctctaaaattgaattaaattaataaataaaaacaaaataacataaagagtagaatggtagttggaggg

SEQ ID NO: 24512 - DNA, 515 bp, Homo sapiens
tatttccagcaatggcagtatcaccagaacaagttcatggtcttccagggtgacttgtcaggaagaaaataatcattgtgtctccgcagtgactttgagcaagtcacttgtcttctctgagctccaacttcttcgttagaaaaaaatgagagcagagcctgccatttgcaacaacatgggcaaatctggaggacattgtgctcagtgaaataaggcagacacagaaagaaaaatactgcataatctcacttatatgtrgtatctagaaaaacgtttttaatccaatgcataaaaacagatggtagaagctgggcatggtgatgtgggcctgtagtcctagctactagggagactgaggcgggaggatcacttgagctgaattcaaggctgcagtaatccgtgatggcaccactgcactctaccctgggcaacagagcaagaccctgtctctaaaattgaattaaattaataaataaaaacaaaataacataaagagtagaatggtagttggaggg

SEQ ID NO: 24513 - DNA, 515 bp, Homo sapiens
tatttccagcaatggcagtatcaccagaacaagttcatggtcttccagggtgacttgtcaggaagaaaataatcattgtgtctccgcagtgactttgagcaagtcacttgtcttctctgagctccaacttcttcgttagaaaaaaatgagagcagagcctgccatttgcaacaacatgggcaaatctggaggacattgtgctcagtgaaataaggcagacacagaaagaaaaatactgcataatctcacttatatgtagtatctagaaaaacgtttttaatccaatgcataaaaacagatggtagaagctgggcatggtgatgtgggcctgtagtcctagctactagggagactgaggcgggaggatcacttgagctgaattcaaggctgcagtratccgtgatggcaccactgcactctaccctgggcaacagagcaagaccctgtctctaaaattgaattaaattaataaataaaaacaaaataacataaagagtagaatggtagttggaggg

SEQ ID NO: 24514 - DNA, 639 bp, Homo sapiens
tcaactgagattgcaccattgcactccagcatgggtgacagagcgagaccccatctgaaacaaaacaacacaaaacaaaacaaaacaacaacaacaacaacaaaaaacctaagttggaaaaggactggatagggaacaaagaaaaacctttgaaagccctcaaggtaaataaatggaaaaggagagggaagaagggaaaggaatagggaggcaaacgtatcctaaagatctcatcccattaggtagagaggaagtgggagcagtgaacatcttggagtgggacacagtgtggcttgctgagggaaatgttcaatattttgttttcaaataagaatgaagtaataggcagctgggcgcggtgtctcacacctataatcccagcactttgggaggccaagatgggcggaacacttaaggtcaggagttcaagaccagccaggccatgatggtgaaaccctgtctctaccaaaaacacaagaaattagcccagtgtggtgatgggcacctgtagtcccagctacttaggaggctgaggcaggagaatcgcttgaacctgggaggcggaggttgcagtgagccgagatcatgccactgcrctccagcctgggcaacaaagtgagactctgtctcaaaaaaaaa

SEQ ID NO: 24515 - DNA, 1298 bp, Homo sapiens
gagtagctgcgaatacagtgmctggctgatttttgtatgtttagtggagacagggtttcactgtgttggccaggctggtctcgaactcctgacctcaggtgatccccccgcctcagcctcccaaagttctgggattacaggtgtgagcccctgtgtccgacctattttcctctttttctttttactttttcccttccctttatttcttcctttcactgttttcatcttttatgtctctcaccctcgcccttcctcagttcaattcaaagagcaatatactgccatatctggagaatttttagctggaatttaatctttattttaaaagagtaagaatttataccaattattatgttttcgactgaggtcgttttacagaaggaattcttttttttatgtaggaatgtgttttaagactttttgtttctaatgtcttagttttctagagaaaaaaaggtaaaagattgacattattctcatagtcttttactcttttctcaaaggtcttagttcaggtcctaattttctttcaattatactcatttatttaaccagtctcctttaggtggtcatttgggttgtatacatattcttgtctgtgttttatcagcactgtattatataatttcatgtatgtacaaataaatatttgaaggataacattctaaaattgctgagttaaagggtatatgcatttataaacttgacagatattaccagttgtcctctataaagtgaaactggtttatatcaccacagctaacatataaatgtctgttttctaccatattattaaattactgaactttatccatctgatggaaaaggagaaatctgattgtactttattttttatatttttaatatttttatgagacttcttggcatgttggccaggatggtctcaaactccagcctcaagcaatcctctcacctcagtctcccaaagttctgggactacaggcattagctaccatgcctggccctgattaccaccccaccccccccccccgccccctttttttttttttgagacaaggtctcactctgtcacccatgttagagtgtggtggtgtgatcactgctcactgcagccttggcctcctgggctgaggtgattctcctgcctcagcctcccaagtagctgggaccacagacacatgccaccatgcctggctgatttttttaattatttgtagggaagtggtctcgctatgttgcacaggctaggctcaaactcctgagctcaagttatcctcccacctcggcctcccaaagtgctgtaattacaggactga

SEQ ID NO: 24516 - DNA, 1847 bp, Homo sapiens
gtagctaagaatctcaaaatacattaacgtgactttrcagtcacaactaatgagcaaagctgtcaggataatttttcatgctctcaaacctagacatagaagatctatgctggaaagcatttaataataaatagctaactagtttaaaccctgaaagagacatgcagaactggtccaaagcgttcttagctgagaatatcagctaaattcagatgtcatttttgctacaaatgtgctgcacactggtgaaatatttgacaaaggagaagtagatgtaactatggaaatcataactttaattgacaacaacatgaaaattcagaaggataacaagcatcatggatggagaagacaattatgcaggagtaaaaaatctaatatgagctgcagaatttattaaaagagtctatttttcctctctggatatttcccactactttagaaagaagaagaagaaggatggaaagaatattcttcctgttaatgaaaataggacaaaggaacagccaggacattcctacctggtttccagatgaactgattatcctttttgccttccaaatgagctgcatgggacagcaagagagaaagcaatagaaagagcttcctcatgctcctccatacccagcaagtgactgttaggttgctctttggaaacatgcttcagatttttcagcctcttgacttgcctattcctaaaagagaaaaagaaaaatcaggtaagtttcttctgtaaagaaaagataacaactcattttgactgctagaacctttattatgatggtattgcaaatttttcattagcatgaagatagtacatataatatcaaccctgtgggaaaagctacaaaaagcaaatccacattctgtttttaccatgttttgtattattttttgtagtgaagtgtattaatgaatgaaatctaccactggatgataaaactacttatttccccaattgctttttattttatacttttggtaaaaaaagatcaatgtaacgtgataatattatcatggattctcacaggatccaaagtagttacttgattcccatagtagctctaaaaagaaaagaaacaaaagcctgaggtggttaactcatgtttatacttttggtaagaaaataagctttaatggtacacattattaaaagaaagtagtaaatatatgttatgttaaatgttaaatgtataccttttatttctctgaaataacatcaggtaagtttcttctgcacaaaaaatcaagtaagtttcttctgtacagaaatgataaaaactgactttgactgctagaacgtttattatgatggtattgcaaattttctattgccatgaagatagtctttataatattaacatttgaaggtcagcagttaattagccaagttttcaatcctcacccactgaaggcctcatcaattctatggactccacagtccctgtgtcggtatattttattcttaaaagcagagttggcagataccttgtatattccctcccttctactcagacaaagtccatgaggagctcatgatttggagaaagagatatgcatacacaacaagtccaaagcagggcaagggatgctctaacagtagtattaagaaagtgggatggaaagactgaggacaaggcaactagttcctctgtgctgtgcaaaaaagagaggaaagcctcacacaagataatatttgagaagagactagggaaacattaggacttgaaggagttgggaagggcatctcaggcagagaaaacaacaaggcgttgaaatgcgttttgtgtttggggactggtgattaggctggtggttgctgtgaaggacgcaaacaagagggagga

SEQ ID NO: 24517 - DNA, 536 bp, Homo sapiens
gttttcactgaactctgatacagctgtgaaaataagaaaatcaagtgtaacatttttccatcagtgaaaatagagatagatggagcctaattattaaaagtgtcatgtaccttagtcacccaggtgcttagataaattgtccagctctccagcacattttaaccataaaagagagtaagagataagctctaactcattaacrctgtatgaaattgttcagtttattaataaaagactacaataaccgaggcttgtgggtttataagggagatttataactagcatttgcaggaaaaaaatgtgtacatttgctgttaataagttgaaagcaaaagtttttctccttgcaataagcatatatacacaggtcgtgcattgtgttgtaattatggtctttaaaccagagaactgctaaattagcacatctaatgaaatcaatacattctggggtgcaaagaacatttgtgaggtctgcaaggagaactatttagcatggcatggccgccctctgattccacagagtgctgattcatcac

SEQ ID NO: 24518 - DNA, 1330 bp, Homo sapiens
cctttaatctataacaaaagttgaaattattaaaaaaaaaaaaggaaaatcttctagattattatgacaaacaagcagccttaacctaggtgattctatttccaagccgtcaaaggataagtctctgaaatgattcaaagaagttctttaaaatatctatgtttatcctctgattttaaaaagaatggtagccaggcatggtggcaggcgcctgtaatcccagctactaaggaggctgaggcaggagaatcgcttgaacccaggaggcagagcttgcaggaaccgagatcacaccactgcactccagcctgggggacagagtgagattccgtctcaaaataaataaataaataaaatttaaaataaaagaaaaagaaaaagaatggaaaagaatctggtaatccggttgtacccttcgctcaaatagtctctggctcttgtaagacagctgcttggtggcattggatgatttccaatagctattacctaaatttctccatgaagctactcatcatggtacagaaaaaaatgcttagcatctcaattaagtattgctggggaaactttaaaaaggttattttcaggtcctgtgttacttgtcaactatagaaacctggaaaaagtataaaaatgaggcatggccagaaatcaaagcttcaaaggccttttgaaccctctcagatggattaccctctaggagatttgaatatattttagctattgtatgtttactttcaggatgggtaaaatatttccttgccaaaaaaactacagcttacagtcactaaaaagcagctcgattttgtgattccaacctggagcagaccaactttgctaccaagtggctgaggattacattttatggtaattatgaaagaattctgtgatgcactattactcaaaaattacacttttcttaccacccaaaatcttatgaaatgtttggaaataccaataacatccttaaattaaaattcataaaactttcagaaatatttgagcttggcccaagatactcccactagcccttatggccatacaatccactccccgaggatgaatcaattgtcaccttatgaactggctagctggaaggttcatgcattttgaaatttttactttgtaaaatttttttgtagacatggggtctcactaygtgttgcccaggctgatctcaaacttatggcctcaagcaatcctctcacctaggactcccaaagtgttttgccactgtctgtaattcaaagccattcttcatgtatcccaaattgtagcctctgccttccatcttactggctgctggatgtgtcaatgatcaccagatccccgt

SEQ ID NO: 24519 - DNA, 327 bp, Homo sapiens
ttagtgactatttctgacttcagaagatctctaaagctaagaacatcgttgaattgggcattttctatttaactagagaataaagaatcttgggaggtataaatagtgctttttgatgttgagtttgaggaattttccctagccaagaacagccttacttaaaattccttgtaattgtgacttcattaataaatcaggaaaataaaggaagatatgtataaatctttttggtggtttctgtacacattcgctatgtttatttgctatgcatttagaagataggctacaccgattgatttaaacctttatttmtgtatataatagagg

SEQ ID NO: 24520 - DNA, 566 bp, Homo sapiens
agtatttaaagtattcatttttacattaaaaaaaaaccatcagtagtctttatagtctacacactgaccttcagactaaccatgcttctaataattctctgtaaaaaaatttaatagggtctttattgccagattcaaggatagcatttcagggctctaaatgctgtaggaaaacagattaaaagcccttattccactcatgcattactttgaacagttatggaatatctactgcgtaggtgtctctttgaaaaataaaattagttacacatcaagagaacaattcagctrtttattgaacagttattgtcagtcagatgctttcccccaaatcacccaatttcatcctcatgacagccatttaaatgaattacctgaagcttagagaagtaacctgcccaatgtcacaaagcaagtaagtggctgagttcaaattcaaactcacatctctgcatctatacttttagtatatgtgtgtgtatatatatatatatacatatatatatacacaccatatatatagtgcatatatatctctcaaatgtggaacgttctctacaattaag

SEQ ID NO: 24521 - DNA, 1019 bp, Homo sapiens
gggatccttccagaccctccacaggtgctcaggcattgrcagagttacaaatcttcagcccagaggccataactgccaaatgggaaaggacaaaggtttgccctccctgtactggatatgagattgggtaacacttgcttagagcctacgatttgccaggttccatgtttagtgctttatatatatgatatcatttggttctcacagtagtcctgggagaaaggaatagttgtcctcttaagtagaaaaacttgtgccagaaaacttacttaccctactcaaggacatacagttaataaatagcagggcaggaccaaaatgtaacatctgtttaacttggagatatttccacgaaatattgttaaaggagaaaagcaaaatgcaaaagtgtgcatacaatatacatatataaagaaatacgttattatcagaaaagtacagaaggatacatttaaggttgttaatctgggatatgggagaaggtgggataaggatgtaaaaagtacatacatcacacatttatgcatctgcaaaaactatgcacgtgtgtaagtatatgtacatataaaaagttatgaaatttatgcaaaagttataataaatagaaatgaattaattttgactaattaatagacattttatgaaattcaatagccatttctaataaaagttcttagtatactttattgttatgggtgtgtcatttaaatcctggattattaacagaaatcaaaagtaagcattacattgaacattaaaactctgggcatgttcaccttaaaatcaggaacaaggctaggaatccaactatcattctctgttattcaacattactctagaagttctggttcatacaacacaagaaaaggaagtataaggtgaaaactttagaaaggaagacacaaaattacgcatgcagataataatgttattaaaaacatatctatacacacacttacatatatcaacacagcactgccttcataccacataggaccaaccctgggtgtgttagttag

SEQ ID NO: 24522 - DNA, 1019 bp, Homo sapiens
gggatccttccagaccctccacaggtgctcaggcattggcagagttacaaatcttcagcccagaggccataactgccaaatgggaaaggacaaaggtttgccctccctgtactggatatgagattgggtaacacttgcttagagcctacgatttgccaggttccatgtttagtgctttatatatatgatatcatttggttctcacagtagtcctgggagaaaggaatagttgtcctcttaagtagaaaaacttgtgccagaaaacttacttaccctactcaaggacatacagttaataaatagcagggcaggaccaaaatgtaacatctgtttaacttggagatatttccacgaaatattgttaaaggagaaaagcaaaatgcaaaartgtgcatacaatatacatatataaagaaatacgttattatcagaaaagtacagaaggatacatttaaggttgttaatctgggatatgggagaaggtgggataaggatgtaaaaagtacatacatcacacatttatgcatctgcaaaaactatgcacgtgtgtaagtatatgtacatataaaaagttatgaaatttatgcaaaagttataataaatagaaatgaattaattttgactaattaatagacattttatgaaattcaatagccatttctaataaaagttcttagtatactttattgttatgggtgtgtcatttaaatcctggattattaacagaaatcaaaagtaagcattacattgaacattaaaactctgggcatgttcaccttaaaatcaggaacaaggctaggaatccaactatcattctctgttattcaacattactctagaagttctggttcatacaacacaagaaaaggaagtataaggtgaaaactttagaaaggaagacacaaaattacgcatgcagataataatgttattaaaaacatatctatacacacacttacatatatcaacacagcactgccttcataccacataggaccaaccctgggtgtgttagttag

SEQ ID NO: 24523 - DNA, 1019 bp, Homo sapiens
gggatccttccagaccctccacaggtgctcaggcattggcagagttacaaatcttcagcccagaggccataactgccaaatgggaaaggacaaaggtttgccctccctgtactggatatgagattgggtaacacttgcttagagcctacgatttgccaggttccatgtttagtgctttatatatatgatatcatttggttctcacagtagtcctgggagaaaggaatagttgtcctcttaagtagaaaaacttgtgccagaaaacttacttaccctactcaaggacatacagttaataaatagcagggcaggaccaaaatgtaacatctgtttaacttggagatatttccacgaaatattgttaaaggagaaaagcaaaatgcaaaagtgtgcatacaatatacatatataaagaaatacgttattatcagaaaagtacagaaggatacatttaaggttgttaatctgggatatgggagaaggtgggataaggatgtaaaaagtacatacatcacacatttatgcatctgcaaaaactatgcacgtgtgtaagtatatgtacatataaaaagttatgaaatttatgcaaaagttataataaatagaaatgaattaattttgactaattaatwgacattttatgaaattcaatagccatttctaataaaagttcttagtatactttattgttatgggtgtgtcatttaaatcctggattattaacagaaatcaaaagtaagcattacattgaacattaaaactctgggcatgttcaccttaaaatcaggaacaaggctaggaatccaactatcattctctgttattcaacattactctagaagttctggttcatacaacacaagaaaaggaagtataaggtgaaaactttagaaaggaagacacaaaattacgcatgcagataataatgttattaaaaacatatctatacacacacttacatatatcaacacagcactgccttcataccacataggaccaaccctgggtgtgttagttag

SEQ ID NO: 24524 - DNA, 724 bp, Homo sapiens
tcacatgctcttgaggatttccctgagctttactgctctgaaattctgtgtttatgcttgcacatggtgaggtggaattcagagagagccatgaggtaaaacaaaaacaaaaccaacaaatyagggtgaggggatcttctagaaaggtggagtaaagaccttcagaaatctgctctttcatacaagcagtgagaactgtccaaatcaactttttcagaattctggaaattacttaaagtcttacagcagtctgggtgcttactcaagaaaaacagctgaatctcagtaagaggagcaagacctgtggcattccaaattgccctaattccatcccactctcacagctcggtcaggccatgcaaatcaacaaccttaaaaccggcagttgtgaaaacacagcctagcagctactgcagggtgcagaacaggctcggagtcccccaaaagcccatccctagagaatttgtcactatttgacctgacagctcagggctcgtctgtttcatttgactcagaggttgttccatgcaaccagccctacccatagggcatttatcaacaataagcaaaaggcagttgtttaacattgcattacctgaggtgccattacaaattcaggctaacaagaggctaagcacaaaatataagaggaacactggtgaattagataactgtatgggttttgaaaagctttgccatattcctacaaatctagaaggccaca

SEQ ID NO: 24525 - DNA, 978 bp, Homo sapiens
ccctttctccattttcaaagccagtggcaatggatctcataccttgaatctctctgactttcccttctgcctcatttctcttctgtttccagctgaagagtgttctctgcttttaacagctcatgtgattagattggccccacctggataatccaggctaatctcctgatttaaagttgtacccgccaggtgcggtggctcaggcctgtaatcccagcactttgggaggctgaggcgggtggatygcttgaagtcaggagtttgagaccagcctggccaacatggtaaaaactagtctctactaaaaatacaaaaattagccgggcatgatggtgtgtgcctgtagtcccagctactcaggaggttgaggcagaattgcttgaactcaggcggtggatgttgcagtgagccaagatcgcaccactgcactccagcctgggcgacagagcaagactcagtctcaaaaataaataaataaataaataaaaaagtctgtatcttaattacatctgcaaagtccctttgccatgaaacgtaacatattcagaggttgcagggattagagcatgaatatctttgaagggtcattattctgcctaccacaaggattgctggttgttctaaggcctgaactcatcctgggtctgatatgagtgaagtccaccctaaatcagcatgttggcactattctggcagcccaatactgcatgaatccatgaaagaaaaatcccactggtcagcaagagcaatctacttgccagaacaccctcttggaatgagatctgactaggatgcctgggacccccacatgggcatgaatcccagaatcccttaggcaatgtggtccactctacaagtggtatagggtttgagaacatccctaaaggaagaaacaggaactgaggccaacataggtccctgtctaggctcctgcttggatggaattgctgattctgggtgttcccaggcatgggagag

SEQ ID NO: 24526 - DNA, 978 bp, Homo sapiens
ccctttctccattttcaaagccagtggcaatggatctcataccttgaatctctctgactttcccttctgcctcatttctcttctgtttccagctgaagagtgttctctgcttttaacagctcatgtgattagattggccccacctggataatccaggctaatctcctgatttaaagttgtacccgccaggtgcggtggctcaggcctgtaatcccagcactttgggaggctgaggcgggtggattgcttgaagtcaggagtttgagaccagcctggccaacatggtaaaaactagtctctactaaaaatacaaaaattagccgggcatgatggtgtgtgcctgtagtcccagctactcaggaggttgaggcagaattgcttgaactcaggcggtggatgttgcagtgagccaagatcgcaccactgcactccagcctgggcgacagagcaagactcagtctcaaaaataaataaataaataaataaaaaagtctgtatcttamttacatctgcaaagtccctttgccatgaaacgtaacatattcagaggttgcagggattagagcatgaatatctttgaagggtcattattctgcctaccacaaggattgctggttgttctaaggcctgaactcatcctgggtctgatatgagtgaagtccaccctaaatcagcatgttggcactattctggcagcccaatactgcatgaatccatgaaagaaaaatcccactggtcagcaagagcaatctacttgccagaacaccctcttggaatgagatctgactaggatgcctgggacccccacatgggcatgaatcccagaatcccttaggcaatgtggtccactctacaagtggtatagggtttgagaacatccctaaaggaagaaacaggaactgaggccaacataggtccctgtctaggctcctgcttggatggaattgctgattctgggtgttcccaggcatgggagag

SEQ ID NO: 24527 - DNA, 1106 bp, Homo sapiens
acccactttggcctcccaaaatgccgggattacaggtgttaaccaccacggccggccagcttccytctttattttcctcctcagtccctcaggaaaaggtgcagtggtattggtgcctctttgaagtgttccagtccagtgtaatgaacgagagttacatcaatttccaagaatttctttccctaaactggagtgatttaagccatgaatcagagagggagggaaatttctggtgtaaacatcaaccactgaacctttcaatgtctttgaacccatcaacttcactggacctcttcctaaaaaatcagatgagagctgttactcaagtcagttagctctgtactttcaaacatttttttaaggagctcaaggaattgccaaagaaaaggagaactgtttggtgtgatttctaaaaaactttcctaaatattgcattttttaggcaatgtgacaatctcaaagcactttgctgagggcaacattttgttgtggtctaacaactgttaaatttctcttcttgccctgattcccttaatttagattgagaatatctgtagagaaaagaagtgagacatcacgtgagtaaatacaacattgaaaagcccagcatttacagattagcaggaaaggttctgacaacaacttgattaatgcgaaactaaactaaattaatctctgatcaccataaaaaggagaagctgaaatgtttgttttttcccatgaaggatttttttcctgtgttttatgtggaattgactaaaaaaaagtccacaatttcaaaacttttttggcaaaaactttgtgtacctgcagctagcatttcagccagcatgagcaagtacgaggaagtgaaaggactaaagaagagaatacagtcaaaggaaaatcatggaataaagaaagaccagacacagagataatatacatactttttttaaaaaaaaggaaggaagttgagggaaactttttttgttatttcccatatctagtcagtcaacaagttttattttgttttgttttaaagagatgggtcttgttctgtcacctgggctggagtacagtgatgttgtcatagctcactatagtctcaaattcctgggctcaag

SEQ ID NO: 24528 - DNA, 1106 bp, Homo sapiens
acccactttggcctcccaaaatgccgggattacaggtgttaaccaccacggccggccagcttccctctttattttcctcctcagtccctcaggaaaaggtgcagtggtattggtgcctctttgaagtgttccagtccagtgtaatgaacgagagttacatcaatttccaagaatttctttccctaaactggagtgatttaagccatgaatcagagagggagggaaatttctggtgtaaacatcaaccactgaacctttcaatgtctttgaacccatcaacttcactggacctcttcctaaaaaatcagatgagagctgttactcaagtcagttagctctgtactttcaaacatttttttaaggagctcaaggaattgccaaagaaaaggagaactgtttggtgtgatttctaaaaaactttcctaaatattgcattttttaggcaatgtgacaatctcaaagcactttgctgagggcaacattttgttgtggtctaacaactgttaaatttctcttcttgccctgattcccttaatttagattgagaatatctgtagagaaaagaagtgagacatcacgtgagtaaatacaacattgaaaagcccagcatttacagattagcaggaaaggttctgacaacaacttgattaatgcgaaactaaactaaattaatctctgatcaccataaaaaggagaagctgaaatgtttgttttttcccatgaaggatttttttcctgtgttttatgtggaattgactaaaaaaaagtccacaatttcaaaacttttttggcaaaaactttgtgtacctgcagctagcatttcagccagcatgagcaagtacgaggaagtgaaaggactaaagaagagaatacagtcaaaggaaaatcatggaataaagaaagaccagacacagagataatatacatactttttwtaaaaaaaaggaaggaagttgagggaaactttttttgttatttcccatatctagtcagtcaacaagttttattttgttttgttttaaagagatgggtcttgttctgtcacctgggctggagtacagtgatgttgtcatagctcactatagtctcaaattcctgggctcaag

SEQ ID NO: 24529 - DNA, 1106 bp, Homo sapiens
acccactttggcctcccaaaatgccgggattacaggtgttaaccaccacggccggccagcttccctctttattttcctcctcagtccctcaggaaaaggtgcagtggtattggtgcctctttgaagtgttccagtccagtgtaatgaacgagagttacatcaatttccaagaatttctttccctaaactggagtgatttaagccatgaatcagagagggagggaaatttctggtgtaaacatcaaccactgaacctttcaatgtctttgaacccatcaacttcactggacctcttcctaaaaaatcagatgagagctgttactcaagtcagttagctctgtactttcaaacatttttttaaggagctcaaggaattgccaaagaaaaggagaactgtttggtgtgatttctaaaaaactttcctaaatattgcattttttaggcaatgtgacaatctcaaagcactttgctgagggcaacattttgttgtggtctaacaactgttaaatttctcttcttgccctgattcccttaatttagattgagaatatctgtagagaaaagaagtgagacatcacgtgagtaaatacaacattgaaaagcccagcatttacagattagcaggaaaggttctgacaacaacttgattaatgcgaaactaaactaaattaatctctgatcaccataaaaaggagaagctgaaatgtttgttttttcccatgaaggatttttttcctgtgttttatgtggaattgactaaaaaaaagtccacaatttcaaaacttttttggcaaaaactttgtgtacctgcagctagcatttcagccagcatgagcaagtacgaggaagtgaaaggactaaagaagagaatacagtcaaaggaaaatcatggaataaagaaagaccagacacagagataatatacatacttttttwaaaaaaaaggaaggaagttgagggaaactttttttgttatttcccatatctagtcagtcaacaagttttattttgttttgttttaaagagatgggtcttgttctgtcacctgggctggagtacagtgatgttgtcatagctcactatagtctcaaattcctgggctcaag

SEQ ID NO: 24530 - DNA, 616 bp, Homo sapiens
taaccccattgtattgggaattagatttcaacatacaagttatggagggacacaaacattcagaacacagcaactgccaaagcaggaaggctacaatcatcaattgtgtggcctmaacaagataggccagttcaggctgtagcatacaactacagaggctctcttcttgttacatgtccattgtgggttggctatagctctgctccatgtcctctttaccccagatctgacttgacttagcattctctatctgaaacattgacaactgtcatggcagaaaataaaagagaccatgataaaccatttcctggttctaaagttccttctccagagtgatacacactacttacacttctacttacatttcattggccaaagcaaattacgtgacaaagccaggtatcaatgggacacagaaatataatccccatgcaagaaggtgcagtgaatatgtttaacaagcagtctaccacatcccaggatgacagctgcatattaggctcaaaaaacagtcattcagaaccggagcagaagatggagcgctacgggagggagttttacaggtgggaaaatgcaactggcagattatctgctttatataagcactggcaaaaga

SEQ ID NO: 24531 - DNA, 616 bp, Homo sapiens
taaccccattgtattgggaattagatttcaacatacaagttatggagggacacaaacattcagaacacagcaactgccaaagcaggaaggctacaatcatcaattgtgtggcctaarcaagataggccagttcaggctgtagcatacaactacagaggctctcttcttgttacatgtccattgtgggttggctatagctctgctccatgtcctctttaccccagatctgacttgacttagcattctctatctgaaacattgacaactgtcatggcagaaaataaaagagaccatgataaaccatttcctggttctaaagttccttctccagagtgatacacactacttacacttctacttacatttcattggccaaagcaaattacgtgacaaagccaggtatcaatgggacacagaaatataatccccatgcaagaaggtgcagtgaatatgtttaacaagcagtctaccacatcccaggatgacagctgcatattaggctcaaaaaacagtcattcagaaccggagcagaagatggagcgctacgggagggagttttacaggtgggaaaatgcaactggcagattatctgctttatataagcactggcaaaaga

SEQ ID NO: 24532 - DNA, 616 bp, Homo sapiens
taaccccattgtattgggaattagatttcaacatacaagttatggagggacacaaacattcagaacacagcaactgccaaagcaggaaggctacaatcatcaattgtgtggcctaaacaagataggccagttcaggctgtagcatacaactacagaggctctcttcttgttacatgtccattgtgggttggctatagctctgctccatgtcctctttaccccagatctgacttgacttagcattctctatctgaaacattgacaactgtcatggcagaaaataaaagagaccatgataaaccatttcctggttctaaagttccttctccagagtgatacacactacttacacttctacttacatttcattggccaaagcaaattaygtgacaaagccaggtatcaatgggacacagaaatataatccccatgcaagaaggtgcagtgaatatgtttaacaagcagtctaccacatcccaggatgacagctgcatattaggctcaaaaaacagtcattcagaaccggagcagaagatggagcgctacgggagggagttttacaggtgggaaaatgcaactggcagattatctgctttatataagcactggcaaaaga

SEQ ID NO: 24533 - DNA, 883 bp, Homo sapiens
agagagactgtttgggaaggagatgaggttagctggccagatgctgctgagggggtgagagagagaagagcccacgagtgtccttcgggtaggggactctggagacaaatttccggggaggggtgctgagggcagaagcagggtgcactgggaagcaggtggtgtggacatgagggaggagaggtagtggatggagacaggattagagagaggagaggagggagcctgcagagaggagggcgcgggtggatttgggagatggggatgtctttaaattgggaaggagcagatccaggagatagtgtgaaaaattggggaggagcatttggacgcatggtcagagggggagccacagaggcaggcaaccctgggaggtggcaggaaatggcagggaagaagcatgtcctgggacccctggggacagcacggtggacagagatggccttgggatgcatgctgtggcctcatgctgaggaagctgcctggacacacctctaaccactgtctctgcctgtctcttccttctgcctccgctgggcccgacgctccgcagctgtgtgctcctgccttcttcctccagggccttctccaaacggtattggagcttaaccttctccaggttcttgttcccctgtcctcagcaagcaggctcctgaagatgcggagcctggtccccagcctttagagaggaatgtcatcaccayggagctcgagggagccccgagggacagaccgaggaaatgagggataaagtggatactgcccagcgtttgggggcctagagaggaaatattctgggaggaatgtattcatgagttttccttagtgattttaagagaacaagtgtatgagaaagattggtctttctgccactccactcagg

SEQ ID NO: 24534 - DNA, 516 bp, Homo sapiens
caagtggcctatagaacctggacacaaactctgcctcagggagttcatagtaggttgggaaacagacaaacacacaaaactgagaggtgcctggatggagttgtgttaaggaccaagtgctctagaaggtcagggaaggccagtgtcagtacaggactttgggaaaatggggaaggcttcctggaaggaataggactcttaggatagatgagattttgataggctgggagggagaagaaaatagtgttttaagaggggccaaaagcataggcaaaggtttgaaagaaaattgcttaatgtgtgtctagaacaagaataaagcagaaagataagtaaggctgagggtataggttgggactctcaatggtkaatggggaggagtgatgggggaaaggagcagcgttagtgactgctatgcctagtcatggcagagtcccaggtaaaagggaatgctggtaacactcacccggtctttatttaaaattttgatattttgttcatcatggactattgaca

SEQ ID NO: 24535 - DNA, 1212 bp, Homo sapiens
tccctggggcagccgtggtcctcagagctgcaatccaaagtgcttgcctcagctagggcacgatgtggctgcatatggcttgtgggtgtggccctggggagagccctatgctgtgatgcacacgcaaaacccagcccctcaccttcccctccaccgctttttgggaatctgcctctccctcctcttagctttcctggaagagggatttgtctgtgagtgtgtctggctgtccttcatctgaccaccttgctctagcaacacccctactcccctttttcctttttttttttttttttgaggagtggggtcccgtgcagggagaggccaggcccctgcacacagtagcccagtgtctgaggccccaggcctccaggcctgctctttacaatgcctttgttgtgtgttttttcctcccatgggcgggtggggcacgtgtgtaggtctgggtgatttttgtttgaaagccaccccctccccgttctccccccagcgctgagctcattgcctgggctgatggggctgctggaaggagtcagcctgctcgggggccagcgtggggggtgctgccaacaccaatacagcgtgcacagccgctacaatgtgcaattgtgatctttgtgtaaacgcggtcggtctggggcccgcatgcttataaaaataaagcgtagggaagcacggggcggggcgggaacaaaaggggctttttcgctggctctctaatatggttttatttatcggaatgcgccctcctttccttactggaacctggagaggttctctgccgagcttggagctgatggtatcacagccagacggtttcattaaatgcacagatgcctctgggccctgccaggggcaggacggaaagggctcagggccggccctgccaggtccagtgcatggaaaggrgagccccatgccagagaggctcccaccaggtaggggtgggcagttctctctggctccttcccctgccaagggcctcccattgccctcttctgttccacagaatcaggctcaaaaccattttcctgcaggaagtcctccatgatttgtgcctgatggctgtcaggctgatcccaggctggtggctgccttctattaaccagacccagcattgctcagccagtgggtggccatggctgagtccgccccttaacttagatacctcctgctcttaaaatcagctctttgggcaacaggtacaacctt

SEQ ID NO: 24536 - DNA, 1212 bp, Homo sapiens
tccctggggcagccgtggtcctcagagctgcaatccaaagtgcttgcctcagctagggcacgatgtggctgcatatggcttgtgggtgtggccctggggagagccctatgctgtgatgcacacgcaaaacccagcccctcaccttcccctccaccgctttttgggaatctgcctctccctcctcttagctttcctggaagagggatttgtctgtgagtgtgtctggctgtccttcatctgaccaccttgctctagcaacacccctactcccctttttcctttttttttttttttttgaggagtggggtcccgtgcagggagaggccaggcccctgcacacagtagcccagtgtctgaggccccaggcctccaggcctgctctttacaatgcctttgttgtgtgttttttcctcccatgggcgggtggggcacgtgtgtaggtctgggtgatttttgtttgaaagccaccccctccccgttctccccccagcgctgagctcattgcctgggctgatggggctgctggaaggagtcagcctgctcgggggccagcgtggggggtgctgccaacaccaatacagcgtgcacagccgctacaatgtgcaattgtgatctttgtgtaaacgcggtcggtctggggcccgcatgcttataaaaataaagcgtagggaagcacggggcggggcgggaacaaaaggggctttttcgctggctctctaatatggttttatttatcggaatgcgccctcctttccttactggaacctggagaggttctctgccgagcttggagctgatggtatcacagccagacggtttcattaaatgcacagatgcctctgggccctgccaggggcaggacggaaagggctcagggccggccctgccaggtccagtgcatggaaaggagagccccatgccagagaggctcccaccaggtaggggtgggcagttctctctggctccttcccctgccaagggcctcccattgccctcttctgttccacagaatcaggctcaaaaccattttcctgcaggaagtcctccatgatttgtgcctgatggctgtcaggctgatcccaggctggtggctgccttctattaaccaracccagcattgctcagccagtgggtggccatggctgagtccgccccttaacttagatacctcctgctcttaaaatcagctctttgggcaacaggtacaacctt

SEQ ID NO: 24537 - DNA, 1823 bp, Homo sapiens
tcataattgtccagcccagtggctttcagctggctgagcattagaatctccgggacagcactgcccagggaatcttaatgcacatccaggactgagaatcactgacttagccccagggttctgaaagtgtggcccattcttgagtcctacttcaagcccactgaagcaattctgagggcagcccagcaacctctgtatcaacttgccctccagggccttctcacacatgcacgagtttcagaagccctgattcagaccacatttcccactgaattgttcttaccaagacctcattttctttcctcttcctggacgggggcttcattcccttactgctgctctccttccttcttctggaggtcttggtagaaaatgttgagctttgactggtacccaggtgcactggatgcattacctgattacatgccaagttcagctgcatctatgagaagtagtcatctgggctgtgtttggacacctccattgtccttcacaaggcagcccacacaatttttagagagttcttgggaggccctcccttcatgcaagccctccttcaccagccctgcccctccagctctccctccctgtcctaagctcctgctctcagtgctgcccgctcctgggggttctaggttggttctcctcagcttgccaaggccacaggctcccaagcccttcccatcacctgctgctcttctctttccttttgttgcttccagagattcctggcgtccaggcttatgctttagcctttcccagcgtccctctgcactgacatccatcacaccttctttcccagggaccactttaggggcgtggctgggaagtgcatcattcttacccttggtgggaggtggtttctgttggctcctcttagtggtggcatctggcatgctgacctctggccccgcctagtgckccttgatactaatagagaactttttccccttccaacccctctcaccatctcctggatgtgccacatcccatggctgtgggccaggtgcaggagacatcaaggatcctggatgaggtgagctgggcgtggtggttgggatgggtgggccgaggtagagggaaggtgaagccagccttcaagcacacacctggagccttccaggttcctggtgcccagcaggcatctgtcacatggagacctgtctggattttattccccatgctgtgtgtggattcagggctgcccagagtgtgtcctgggggtgatcctggtctaagaaggcttgctgtcctgctaggaggccagatttcacccagacaacatgaatagcaatacagattcttaaatgattaagtaccaggtggcacattttgaagaataaattgtttggaaggggccagagtagtcaaggaagcctttctggtggaggtggcattagtcaaatgtctttatgcccatcagcacttaggaagaaagtgagaaacatggctttggctcaaaaggccaaggaccagtttgggtcctggctggtttgggggatggggcgagctggggacctcctagggacgggaagaagtttagagtttgcatttagataaagcaaggctgcatcctttgccatgggaggagagatgcacgttccctatggcctcctgtgcatctgtgggtggattgtcgtgagccaggccagagggtgggtggcagagacctgggtggagagacaggaaggagagccctggtcagatgaggcgttgggaaaagggcagccacttcctgccattagggaatccccagaccgacagcggacactatttgacattttcagtgtaatttggacttgaagtgcagagtcaggatgtgg

SEQ ID NO: 24538 - DNA, 1823 bp, Homo sapiens
tcataattgtccagcccagtggctttcagctggctgagcattagaatctccgggacagcactgcccagggaatcttaatgcacatccaggactgagaatcactgacttagccccagggttctgaaagtgtggcccattcttgagtcctacttcaagcccactgaagcaattctgagggcagcccagcaacctctgtatcaacttgccctccagggccttctcacacatgcacgagtttcagaagccctgattcagaccacatttcccactgaattgttcttaccaagacctcattttctttcctcttcctggacgggggcttcattcccttactgctgctctccttccttcttctggaggtcttggtagaaaatgttgagctttgactggtacccaggtgcactggatgcattacctgattacatgccaagttcagctgcatctatgagaagtagtcatctgggctgtgtttggacacctccattgtccttcacaaggcagcccacacaatttttagagagttcttgggaggccctcccttcatgcaagccctccttcaccagccctgcccctccagctctccctccctgtcctaagctcctgctctcagtgctgcccgctcctgggggttctaggttggttctcctcagcttgccaaggccacaggctcccaagcccttcccatcacctgctgctcttctctttccttttgttgcttccagagattcctggcgtccaggcttatgctttagcctttcccagcgtccctctgcactgacatccatcacaccttctttcccagggaccactttaggggcgtggctgggaagtgcatcattcttacccttggtgggaggtggtttctgttggctcctcttagtggtggcatctggcatgctgacctctggccccgcctagtgcgccttgatactaatagagaactttttccccttccaacccctctcaccatctcctggatgtgccacatcccatggctgtgggccaggtgcaggagacatcaaggatcctggatgaggtgagctgggcgtggtggttgggatgggtgggccgaggtagagggaaggtgaagccagccttcaagcacacacctggagccttccaggttcctggtgcccagcaggcatctgtcacatggagacctgtctggattttattccccatgctgtgtgtggattcagggctgcccagagtgtgtcctgggggtgatcctggtctaagaaggcttgctgtcctgctaggaggccagatttcacccagacaacatgaatagcaatacagattcttaaatgattaagtaccaggtggcacattttgaagaataaattgtttggaaggggccagagtagtcaaggaagcctttctggtggaggtggcattagtcaaatgtctttatgcccatcagcacttaggaagaaagtgagaaacatggctttggctcaaaaggccaaggaccagtttgggtcctggctggtttgggggatggggcgagctggggacctcctagggacgggaagaagtttagagtttgcatttagataaagcaaggctgcatcctttgccatgggaggagagatgcacgttccctatggcctcctgtgcatctgtgggtggattgtcgtgagccaggccagagggtgggtggcagagacctgggtggagagacaggaaggagagccctggtcagatgaggcgttgggaaaagggcagccacttcctgccattagggaatccccagaccgacagcggacactatttgacattttcagtgyaatttggacttgaagtgcagagtcaggatgtgg

SEQ ID NO: 24539 - DNA, 530 bp, Homo sapiens
  misc_feature (1)...(530): n = A,T,C or G
ctgagagccaaagaaattcatggacacattacccaggttcaggaaaatgataaactcwtccatgctagtgtttccttataaagaaaatacttcatataactaattattttttaagaaatagatattcaataaggtatctttaaacaaaaacacacaaaaaccaaagttgcatattgatcagtcaacagaaatgnntcggctgaagctcacgggaatcgaatcttgaatttcctcagaagcagtggctccatttgagttaattcagtgcttgtggcagccactgcaagcaagaactgcctggacaacacatgagtgatgctgtctcgcaccctccagaccagtccacctccagctgagttccactgagcaatatctatgggcacatgaggcacagaggagtcccctgaccgagccctgcctaaattcctgacttacagaatctgtgagatatgataaaatggttgctgttgaatccattaagctttggatcacctgagatgcagccataggtaatcagaatgtggtaccag

SEQ ID NO: 24540 - DNA, 530 bp, Homo sapiens
  misc_feature (1)...(530): n = A,T,C or G
ctgagagccaaagaaattcatggacacattacccaggttcaggaaaatgataaactcttccatgctagtgtttycttataaagaaaatacttcatataactaattattttttaagaaatagatattcaataaggtatctttaaacaaaaacacacaaaaaccaaagttgcatattgatcagtcaacagaaatgnntcggctgaagctcacgggaatcgaatcttgaatttcctcagaagcagtggctccatttgagttaattcagtgcttgtggcagccactgcaagcaagaactgcctggacaacacatgagtgatgctgtctcgcaccctccagaccagtccacctccagctgagttccactgagcaatatctatgggcacatgaggcacagaggagtcccctgaccgagccctgcctaaattcctgacttacagaatctgtgagatatgataaaatggttgctgttgaatccattaagctttggatcacctgagatgcagccataggtaatcagaatgtggtaccag

SEQ ID NO: 24541 - DNA, 530 bp, Homo sapiens
  misc_feature (1)...(530): n = A,T,C or G
ctgagagccaaagaaattcatggacacattacccaggttcaggaaaatgataaactcttccatgctagtgtttccttataaagaaaatacttcatataactaattattttttaagaaatagatattcaataaggtatctttaaayaaaaacacacaaaaaccaaagttgcatattgatcagtcaacagaaatgnntcggctgaagctcacgggaatcgaatcttgaatttcctcagaagcagtggctccatttgagttaattcagtgcttgtggcagccactgcaagcaagaactgcctggacaacacatgagtgatgctgtctcgcaccctccagaccagtccacctccagctgagttccactgagcaatatctatgggcacatgaggcacagaggagtcccctgaccgagccctgcctaaattcctgacttacagaatctgtgagatatgataaaatggttgctgttgaatccattaagctttggatcacctgagatgcagccataggtaatcagaatgtggtaccag

SEQ ID NO: 24542 - DNA, 530 bp, Homo sapiens
  misc_feature (1)...(530): n = A,T,C or G
ctgagagccaaagaaattcatggacacattacccaggttcaggaaaatgataaactcttccatgctagtgtttccttataaagaaaatacttcatataactaattattttttaagaaatagatattcaataaggtatctttaaacaaaaacacacaaaaaccaaagttgcatattgatcagtcaacagaaatgnntcggctgaagctcacgggaatcgaatcttgaatttcctcagaagcagtggctccatttgagttaattcagtgcttgtggcagccactgcaagcaagaactgcctggacaacacatgagtgatgctgyctcgcaccctccagaccagtccacctccagctgagttccactgagcaatatctatgggcacatgaggcacagaggagtcccctgaccgagccctgcctaaattcctgacttacagaatctgtgagatatgataaaatggttgctgttgaatccattaagctttggatcacctgagatgcagccataggtaatcagaatgtggtaccag

SEQ ID NO: 24543 - DNA, 530 bp, Homo sapiens
  misc_feature (1)...(530): n = A,T,C or G
ctgagagccaaagaaattcatggacacattacccaggttcaggaaaatgataaactcttccatgctagtgtttccttataaagaaaatacttcatataactaattattttttaagaaatagatattcaataaggtatctttaaacaaaaacacacaaaaaccaaagttgcatattgatcagtcaacagaaatgnntcggctgaagctcacgggaatcgaatcttgaatttcctcagaagcagtggctccatttgagttaattcagtgcttgtggcagccactgcaagcaagaactgcctggacaacacatgagtgatgctgtctygcaccctccagaccagtccacctccagctgagttccactgagcaatatctatgggcacatgaggcacagaggagtcccctgaccgagccctgcctaaattcctgacttacagaatctgtgagatatgataaaatggttgctgttgaatccattaagctttggatcacctgagatgcagccataggtaatcagaatgtggtaccag

SEQ ID NO: 24544 - DNA, 561 bp, Homo sapiens
atcttgaattctagttcctgtaatccccaaatgttgtgggagggatctggtgcaaggtaattgaatcatgggggcagttacccccatgctgctgttctcatgacagtgagtgggttgtcacaagatctgatggcctttttccccttttgcttggcacttctccttgctgtcgccatgtgaagaaggacatgtttgcttcctcttctgtcatgattgtaaatttcctgcggcctctccagccatgctgaactgtgagtcagttaaacctctttcctttataaagtacccagtcttgggtatgtctttattagcagcttgagaatagacgaatacacatggggactacacagatggcygagcatgatatttggtgcatagattaagcagaaaagatttggaaattagggtcaggaattgtttaagctttgaagggcaaagatggcttgaggaatagctcctgaggcctgtgggaacaactatcatgaggaaagactcagaaaatgagaactgggcattgccatacaacctggccagctcttgtccacggaggggattcctgtg

SEQ ID NO: 24545 - DNA, 561 bp, Homo sapiens
atcttgaattctagttcctgtaatccccaaatgttgtgggagggatctggtgcaaggtaattgaatcatgggggcagttacccccatgctgctgttctcatgacagtgagtgggttgtcacaagatctgatggcctttttccccttttgcttggcacttctccttgctgtcgccatgtgaagaaggacatgtttgcttcctcttctgtcatgattgtaaatttcctgcggcctctccagccatgctgaactgtgagtcagttaaacctctttcctttataaagtacccagtcttgggtatgtctttattagcagcttgagaatagacgaatacacatggggactacacagatggctgagcatgatatttggtgcatagattaagcagaaaagatttggaaattagggtcaggaattgtttaagctttgaagggcaaagatggcttgaggaatagctcctgaggcctgtgggaacaactatcatgaggaaagactcagaaaatgagaactgggcattgycatacaacctggccagctcttgtccacggaggggattcctgtg

SEQ ID NO: 24546 - DNA, 476 bp, Homo sapiens
agctgatttagaccctgacagtctcttgccctctgcttgcatgaagcatttcgattccccgcccccctgccccccccatgtctctacccaatctccagggtgtggacatttatccttcctgaccaccatggtcagaagggagggttgcctctgcagaattctggctgcagttacagcctgcacagttcatttggtaatcatgggccgccttgggacaagccgactgttgccagcctacattgttacttagacttaattctgtcttgcacattaaatgtttgcatgtggatacsttgtgtgcatggtaggcagggactgctgcctgtatttcttttctgtagtcatgctgttcatctggtaagatttcagcaaagacattttgaggaagtaagaagcttctgctcttctggagagatggagagtgtctaaaagagcactgggaggaaagtggtgcccatgtggtacatgtggtgccc

SEQ ID NO: 24547 - DNA, 895 bp, Homo sapiens
aaactaatactttggcaacacattaatttactcactcttttaaacatgactatcacgtaggtggggaatcttaacaaaatatagctttcattaagatcactgtaagacattaataactgaggttaagatttgattctttacagaaatagaagctgtgtcatagaaggaatcaaagttgcaggcagattcagaatttcaaaatcacatctcagcttgtgccacttatcttgaacaaatctctcaactattctgaatccacttttctaatcttaaaatgggactattattctccggaatgttgggcagattaagtgagaaaacctatatgagacagcttgagaaactatcaagtactcggcaagtggtacgtatttttactgttatattttactctcaatagaggcttatttatttatttatttattttattatactttaagttttagggtacatgtgcacattgtgcaggttagttacatatgtatacatgtgccatgctggtgcgcaaggtaatttacagattcaatgccatccccatcaagctaccaatgactttcttcacagaattggaaaaaactactttaaagttcatatggaaccaaaaaagagyccgcatcgccaaggcaatcctaagccaaaagaacaaagctggaggcatcacactacctgacttcaaactatactataaggctacagtaaccaaaagagcatggtactggtaccaaaacagagatatagatcaatggaacagaacagagccctcagaaataactctgcatatctacaactatctgatcttcgacaaacctgagaaaaacaagcaatggggaaaggattccctatttaataaatggtgctgggaaaactggctagccatatgtagaaagctgaaact

SEQ ID NO: 24548 - DNA, 593 bp, Homo sapiens
tattaatcaatttctaaaggaaaatgttggtgagaagacactggagaactgatccattcataagcagaagaagatagttaaaacagattgagagtgaattgggatttacctgatattacggagggagattcttcctggctgacatctagaagagaagcacaggatgatgggaaaggttacatctcgaattttgcaagattcacaggtgttctacagggaaaggggacttctcaccacaccccatgcatcccctaggttagctcrtcagctaccatctgtgaagctgctggaaggggaggaaggtgtaaggggaggcagggttgttaccacacagagcaacagccatgaactcaatatagaagagcccctttttttcttccctagcatccttcaagacttaatgctaatttagtttacacatgccaggtacttcaatgtgatattttggtattcttatgccctccatctcctataaatacattgcttatattcacaagctttctcaatttcggtaaccagaagtaattgtttcaatacaatcttacctataccactcccagcacattgaaatactgtgtgtaggggaaagaaaa

SEQ ID NO: 24549 - DNA, 838 bp, Homo sapiens
aaaaaaaaaaaaaaagcaaaaaagaaaaggatggcactgttgtgcactcatggatgacctccttgaagagttgacatctgagcagagatctgaagttgccaaagcattcaatccagtgagctcaggggaagagcagtccaggcacagggaatagcacatacaaaggctctgacatgggaacaaacttgtcatgttcgacaaaggcagtggggttggggatgggggttgaagctyagtgaacgaaggaaagaagttaggttggagaggggtcagggccagaaaatgaagggcctttttgtttcacgtacagagaaagcctcctgaaggatgttaaacaggggaatgatgtgacctgatttctgttttgcaaactagtcctgactgctgtgtggagaatagactgtggaaaggcaagaatggaagcagaaagactatgtgggcgccgagtgaaattgtcccggcagtgggtgatagtggcttgggagcagtgaaggtggggccggtggtcatttttgggacatattttggagatgaagctgacacagtttgctgatggactggctacaggtaaccagggaaactggaggaatcaaaagaaggaaattttttaaatgcccctatgtttttggcttacttgatccaacagatttttatacttcatatttaatcctcacaacagcccattttatggctgaggaaactgaggcatctctaagggacagaacaagcaaatgcaggtcggcttgccactagaagccgcaaaagagcctttctgcttgagttcctttttctcatttgcatcgctccattctttccttggggactggcttgccaccca

SEQ ID NO: 24550 - DNA, 838 bp, Homo sapiens
aaaaaaaaaaaaaaagcaaaaaagaaaaggatggcactgttgtgcactcatggatgacctccttgaagagttgacatctgagcagagatctgaagttgccaaagcattcaatccagtgagctcaggggaagagcagtccaggcacagggaatagcacatacaaaggctctgacatgggaacaaacttgtcatgttcgacaaaggcagtggggttggggatgggggttgaagcttagtgaacgaaggaaagaagttaggttggagaggggtcagggccagaaaatgaagggcctttttgtttcacgtacagagaaagcctcctgaaggatgttaaacaggggaatgatgtgacctgatttctgttttgcaaactagtcctgactgctgtgtggagaatagactgtggaaaggcaagaatggaagcagaaagactatgtgggcgccgagtgaaattgtcccggcagtgggtgatagtggcttgggagcagtgaaggtggggcmggtggtcatttttgggacatattttggagatgaagctgacacagtttgctgatggactggctacaggtaaccagggaaactggaggaatcaaaagaaggaaattttttaaatgcccctatgtttttggcttacttgatccaacagatttttatacttcatatttaatcctcacaacagcccattttatggctgaggaaactgaggcatctctaagggacagaacaagcaaatgcaggtcggcttgccactagaagccgcaaaagagcctttctgcttgagttcctttttctcatttgcatcgctccattctttccttggggactggcttgccaccca

SEQ ID NO: 24551 - DNA, 1017 bp, Homo sapiens
agaagaaagaaagaagaactgagacttaaatgaagcttaactggtacatctggactctgatgagtgagaagtccaagcaaatagaaaagccacagccaaacggtgagtcccttccatggttagaacacatctgtcttaactcagaaatcacgcctaatcttgttaatatttttcttaggcggcaataagcactttttaactgtttaaatttagcaggaaacattttgtttataattctgaatttgaatgggctaattacggtgcacacaggcggtaaataacagatgaggcagaagataaatggagtgatagagccacagtctttaatccttagaggctttcactcactctcccatcttcattgtcttactgcactcttccgatatgattgaccatcttccaattctgtggatggagggagagaggatatttcattgaaaacactgtccttacattctcagtcttctcagagaatatgcttctcttatttgtcatcactgaacactagarctcccccaatgacacaacttttcttgtgtatttttttactatggttaaaaaaaacacacaacataaaatgtgccagcataatcgtttctaagtgtagagttcactaatgttaagttattgacattgttatgaaacagatcttcagaacttttttcatcttacaaaactgaatcagtgtaccctttaaacaataacccctcattccttgctcctctcagctcctggaaatcaccgctttactttttttctctatgaatttgacttccctaggtacttcatgtaagtggaatcatacattatctgtgtgttttttttttttttgagacagagtcttgctctgtcacccaggctggagtgcagtggtgcaatctaggctcactgcaacctctgcctctcgggttcaagcgattctcctgcctcagcctcccaagtagctgggattacaggcgccaccactacacccagctaatttttgtaattttagtagagacagggtttcaccatgtt

SEQ ID NO: 24552 - DNA, 1017 bp, Homo sapiens
agaagaaagaaagaagaactgagacttaaatgaagcttaactggtacatctggactctgatgagtgagaagtccaagcaaatagaaaagccacagccaaacggtgagtcccttccatggttagaacacatctgtcttaactcagaaatcacgcctaatcttgttaatatttttcttaggcggcaataagcactttttaactgtttaaatttagcaggaaacattttgtttataattctgaatttgaatgggctaattacggtgcacacaggcggtaaataacagatgaggcagaagataaatggagtgatagagccacagtctttaatccttagaggctttcactcactctcccatcttcattgtcttactgcactcttccgatatgattgaccatcttccaattctgtggatggagggagagaggatatttcattgaaaacactgtccttacattctcagtcttctcagagaatatgcttctcttatttgtcatcactgaacactagagctcccccaatgacacaacttttcttgtgtatttttttactatggttaaaaaaaacacacaacataaaatgtgccagcataatcgtttctaagtgtagagttcactaatgttaagttattgacattgttatgaaacagatcttcagaacttttttcatcttacaaaactgaatcagtgtaccctttaaacaataacccctcattccttgctcctctcagctcctggaaatcaccgctttactttttttctctatgaatttgacttccctaggtacttcatgtaagtggaatcatacattatctgtgtgttttttttttttttgagacagagtcttgctctgtcacccaggctggagtgcagtggtgcaatctaggctcamtgcaacctctgcctctcgggttcaagcgattctcctgcctcagcctcccaagtagctgggattacaggcgccaccactacacccagctaatttttgtaattttagtagagacagggtttcaccatgtt

SEQ ID NO: 24553 - DNA, 540 bp, Homo sapiens
gaaacaaaaagcttaaartaactgagtaacttacctattgtgacactacaaaactatcaataatcaggaaatggtcccatgtcttattagttcccagacctagtacttgatattaaaacacatcaatttttcagactcaaaattttgttggctattacaaaaactataaagtggactactccaatgaacagttttaagactgatttgttttaaatgacccacacacaaaattagtgagagataaaacacacaggtgccaccctttcttgtaatatcaatttacagaaacctttatataagtcacataaatgcttctccttttccccaatttgcttggttcacgggaacagatacgctaacatcaaactgccatgttggttaattctgagacattcaaaacctaaaataagcaaagtaataatactgaataagccacctctttctccatggcagcctggtgtttcttgataagtttctccatttctgcagcaaaattgttacgctgagtttcaagatctttgtctaatctgaggcgatgtt

SEQ ID NO: 24554 - DNA, 826 bp, Homo sapiens
gtgtggccaggaacaggggagggaactgaagagagagcagcctctcctccaaaaccccctccctggccagtgtagaccatactcacacagaagagcaacctgaggtcgggacgggcatgtttctgtcaccactaagtccctagtgtccatcatttgttaattcactcactcactctttcatccattstttcaacaaatatttatgaaacacctactgagtgttccagccactgggaatacaacagtgaaaaagacaggactcctgccctctcagagcttaccttctaacaaggagcggcaggtcatgaatacagtaagcaaatcatgacagagtgaagagaataataatggagtcaagacagtatctggggcaatctggaaaggcctagctgaggcggtggccctgagctgagctaaggcatagagggaaccgccggaagaactatgagaacacattccaggcaggggagcaagcgcaggacctaaagtgggagagcccagaagcgacctgctgcagcccgcttaccccagctagtgaactcccatttcatctccacgtagaagtcctgggcctggaggacgaaggggagagaggctaagtctgcactggagaagggctcaagggctcccgtggaggctgagaggctgggcctcaccttgcgcagcttctccaggagcacggggatgcccgccagccgcttcaccacccgctggtagtcccggtaccgaagcaccagctgcaccagctccaggtcccgggtactcacagcctcctggagcactgggggagggcgaggcaaggtcacagggcaggacccttcagcca

SEQ ID NO: 24555 - DNA, 848 bp, Homo sapiens
ttgctcaacattgtcaggtacacaggaaaaaattcacaggagagctcatgctaggtggagctgtgaggctctcactggggacagaattaagtgtttcaacaggaatggaactagaggtactttgggcaggcagcagaggggaagattcctggagaagggagctggatcttaaaggacaaaaggaaataaaggaagaggcagggagagagggacagacataagcctcataaaacatccacccagggaacacctttctacccaaaaagaaactaatcatttcaaacaaatgtttctctaccctctaggaaaggattgcattttctgccagatctgattgaagcaggcagatattttgtaactgcacctccttgcctagcaaaaaatgttccaacttgtcagtcatcctccatctcaggtgcattctgcctgctccaggtgatgtggcccatctgacacatgcagctcattttcccaatattcctgcagctcaaactgggcaagcgtaagggatacactactttrtcagtgtgatagtgtactccattctttagagacagcaacaagttttgcaaattggtcctgataaagaactcagatttaaatgtattgggcgggaggtgttccatcaggaacaatttgcaaaacttgccaacataaaatttacatatacatgtgtgtgtatatatatgtatattcattcaccttacaagaagactgccttacactagatacttaagtctctgggtctcaatttctataactataagagtatatattttctcaggctcaggcactatggggaaaagattctaaggttccattcaggttcagcacagagaaaggtgctg

SEQ ID NO: 24556 - DNA, 494 bp, Homo sapiens
gggacggaagtcatatctcacaaaataaactaccacgtagcgagaatgtaccatgtatctgatgcctgacacaatgctcagcctttttctcacattgtttcattgaatcctcataaaaaaacmctttaagttagatgtaataatgatatcatctagtcccactttgcacttgagaaaactgaagcccagagaggttaagtaacttgtccaagatcacacagtcagcaagggcaagtagcaaattgacaacccacgtctgtttatttccagcactggtgctcttcaccgtgctgtctcgaaaggcagtaaaagacgcttttacccttacaactcctaccatttttggactgtcacttccctcaacatttcgaaatgaagcactgctgtactaaatcacccaagtccagatgggtctctgctccttccgctggcaaaacaactctaatactcggttgacttcggacactttccaaatctccggacttgctaacagg

SEQ ID NO: 24557 - DNA, 566 bp, Homo sapiens
aaacccctggtggtgaggtttttatcattttctaataataacacaaaaatagtgacatcccctccaaaaaaaaccttatatagaagcagagctggtagtctgtagctcagtggggcatgggccacaggggtagcttttaggacaaactccttgtctcggtaacccagctgcaacctgaagctctcccaggagggaatcagagttaggggatctcagagtgggaagaatctgacctctaacagaggcaccttgaagctctccttagcaatgactaacattatgttgagttcagcactgccaacactctccttttatttttactttattttattttttatgtttttgagacagtgtctcgctctgtcatccaggctggagggcagtggcccaatctcaacctctacctcccaggctcaacygatcctcccacctcagcctccccagtgcctgggactacagacatatgccaccatgcccagataatttttgcaatttttttgtagaaacagttttgccatgttgcccaggctggtcttgaactcctgcattcaagcaatcctcccacc

SEQ ID NO: 24558 - DNA, 540 bp, Homo sapiens
aactaaggattcttctaccccaaaatccttggagactttgttttattattgccatttgtaaccaatgaaatatgcagttgtaacacaatgtccacagtatggatcctcaatggcagagttgacagcaaagtctaaatggttggttgcaagctgatagctattatttcaagcagcattctaaacattactttttgttacaaaaataatatatgctcattatagaaaataaatctaaggccaggtgcartggctcacacctgtaatcccagcatctggggaggccgaatcgggcggatcacctgaggtcgggagttcaagaccagcctgacgaatgtggtgaaaccctgtctctactaagagtacaaaattagctgggcatggtggcagacgcctgtaatcccagctactcaggaggctgaggcaggagaatcacttgaacctgggaggtagaggttgcagtgggctgagatcacatcattgcactccagcctgggcaacaagagtaaaactccgtctcaaaaaaaaaaaaaaaaaaaaaaa

SEQ ID NO: 24559 - DNA, 540 bp, Homo sapiens
aactaaggattcttctaccccaaaatccttggagactttgttttattattgccatttgtaaccaatgaaatatgcagttgtaacacaatgtccacagtatggatcctcaatggcagagttgacagcaaagtctaaatggttggttgcaagctgatagctattatttcaagcagcattctaaacattactttttgttacaaaaataatatatgctcattatagaaaataaatctaaggccaggtgcaatggctcacacctgtaatcccagcatctggggaggccgaatcgggcggatcacctgaggtcgggagttcaagaccagcctgacgaatgtggtgaaaccctgtctctactaagagtacaaaattagctgggcatggtggcagacgcctgtaatcccagctactcaggaggctgaggcaggagaatcacttgaacctgggaggtagaggttgcagtgggctgagatcacatcattgcactccagcctgggcaacaagagtaaaactccgtctcaaamaaaaaaaaaaaaaaaaaaa

SEQ ID NO: 24560 - DNA, 540 bp, Homo sapiens
aactaaggattcttctaccccaaaatccttggagactttgttttattattgccatttgtaaccaatgaaatatgcagttgtaacacaatgtccacagtatggatcctcaatggcagagttgacagcaaagtctaaatggttggttgcaagctgatagctattatttcaagcagcattctaaacattactttttgttacaaaaataatatatgctcattatagaaaataaatctaaggccaggtgcaatggctcacacctgtaatcccagcatctggggaggccgaatcgggcggatcacctgaggtcgggagttcaagaccagcctgacgaatgtggtgaaaccctgtctctactaagagtacaaaattagctgggcatggtggcagacgcctgtaatcccagctactcaggaggctgaggcaggagaatcacttgaacctgggaggtagaggttgcagtgggctgagatcacatcattgcactccagcctgggcaacaagagtaaaactccgtctcaaaaaaamaaaaaaaaaaaaaaa

SEQ ID NO: 24561 - DNA, 540 bp, Homo sapiens
aactaaggattcttctaccccaaaatccttggagactttgttttattattgccatttgtaaccaatgaaatatgcagttgtaacacaatgtccacagtatggatcctcaatggcagagttgacagcaaagtctaaatggttggttgcaagctgatagctattatttcaagcagcattctaaacattactttttgttacaaaaataatatatgctcattatagaaaataaatctaaggccaggtgcaatggctcacacctgtaatcccagcatctggggaggccgaatcgggcggatcacctgaggtcgggagttcaagaccagcctgacgaatgtggtgaaaccctgtctctactaagagtacaaaattagctgggcatggtggcagacgcctgtaatcccagctactcaggaggctgaggcaggagaatcacttgaacctgggaggtagaggttgcagtgggctgagatcacatcattgcactccagcctgggcaacaagagtaaaactccgtctcaaaaaaaaaaamaaaaaaaaaaa

SEQ ID NO: 24562 - DNA, 598 bp, Homo sapiens
tgcatgatgcagcccaaagcctgaatcacaaggtttttgaatagttatgaacaaatacagagtagcagaaggacgaggctgagaaatgaaagccaggggtctgaatcccagctttgtcactaactcccagttcctttatctgtcaaggggagagaaaaaaataccagcaagattgacctaggagggtcctaccaacaccaaaatgaaatatyaagtgaagttgtttcagaattctatgaaaaactctacccatgtaagaagattttattgttgtttgtttttgagacagagtcttgcttatagcccaggttagagtgcagtggtgcaaatatggctcactgcagcctcaacctcatggggctcaagtgatcctcccagctcagcctcccaagcagctgggactacaggcccacatcatcatgcccagctaagtttttgcattttttttgtggagacggggtcttactttgttgcccagactggtctcgaactcctgggctcaactgatcctcccaccttggcctcccaaagtgctggtattacaggcatgagctactgcacccagccctattgttattactataggtgcttctccaaa

SEQ ID NO: 24563 - DNA, 789 bp, Homo sapiens
tgcaattttgtggcccgggtgggtgaaggcagtggcaggggagtccatgccaagcctggcagtgggaaggaagaggaagaggaagaggacttaactttctcagcagcttcagccttctgagaaactctagaatgccttgctgcactatggcaggcataaccaggtcccggtgacctacataaccttccagacatggggcaagtgggagccctgattcatgtcaggggagcctgacagaggaagggtgggggcagggaggatttacaatcctgagacggtgaaaccacctaaatatttagtgatgactaagtgagtcaccgcatgtccacagggtggaatattatgtaaaagtgattattataataataaagactatttagcaatattgcaagtgtttatgatataatattaagcgaacaaaaggaagatacatacctttacggcacctgaacaagagaagattggaaggggattttaaaaaataacagttgctctgctacagtggtgtgattagggaccttattcttggaaaagaaagcagcagctttacagtcagacagatctggactagtagcttagatctatttyttacttactagaaacgatcttgacaggtggcttaaatgcgattggttttccatctgtaaaatgggtacagtaattcctgctttacaaaattcttgtgaagatgaatctgattgtgcatctcctcccttcttgccttcctttcttcctcctctctctctctacatattttcactaatactgcacaatccagttgcccacaaa

SEQ ID NO: 24564 - DNA, 1115 bp, Homo sapiens
gactctgtctcaaaaacaaacaaacaaacaaaaaacaacaaaaaaattagaaaatctttatgcaaaaagactttggagaaagaaatgcttgcagtcatgattataacaaaatacctcctttgtactgatgtgccaagcacagttctgtgtactcacctgtattatctcacttaatcttctcaagaccatccttgcgaggtaggtatattagtcttgatcttgaaggtgagggaactgaggcccaagaagctataggacattcccaatcagtcccagctgggctttgaatgcagtcagaaccatctgattccaaagatcttatattttctgctagatcaaagtgagcttttattttatttttttatctttttggagacaagagtctcagttctgtcacccaggctggagtgcagtggcacaatctcagctcactgcacccttgacctcctgggttcaagtgatcctcctgcctcggcctcctgagtagctgggactacaggcatgcatcaccacgttcagctaatatttgtatttttagtagagataggctttcaccatgttgcacaggctggtcttgaacttctgggctcaagcaatgtgcccacctcagcctcccaaagtgatgggattacagtcatgagccaccatgcccagcgcaaagtgagcttttaaaaacatccatctgatcatatctttccctagttaaaatgtaatacccaaaattgatttcagtggcctccccactcacacacagaataaaattccagcacattgccctggcctgctaggccccacgtggcctggccccagcctgccttgctgccctcctgtgctccactctcctggctccctctccagctgcacaacctcgctctgtgcttccaaatggcacctctgcttgaaggctgtgcttcctgcacctgcccagctaacgactacgcatccttctaatcatgtcgaaaggtcccagacctttcttgaccctcctatctagattaaatcaaatactcaccttccctctggtcttttctctctcarttacttgtcttaatatctcttttgcccactaatttatgggactagggatggcagcatccttgttttttttgttcact

SEQ ID NO: 24565 - DNA, 550 bp, Homo sapiens
tcatgaagagaactataggccacaagaattcattgattcttttttcagtctggtagtattgtaatctgatttgcaaattataaggaatattctcatggtcttgtagaggttatattggttttgtggtaataatccaggcataagatgagagcttgaacttgagcagcagtaatggggatggagcaacaggaacaaatataagacatatttaggaagaattgttaggagaattgacaggaattagtgagtgtttgtgtgwgagagagaatctagggtgatttccaaggtttctctaagtagatggtatattgatccttgcagaatacaggaggaggaaaagttgtgagggaagattgatgggtttttttttttgagcattctctcctccagaatatatccaaacttgttagatgataggttacaactggacagtcttcttaactttatctgttcattaggtagaagttaatagaattgctcttccttgggttgtgggtcttctgcagtgactacaatgtgaacaatgaaggtgaactgagcatgaacattt

SEQ ID NO: 24566 - DNA, 1001 bp, Homo sapiens; identical to SEQ ID NO: 23567

SEQ ID NO: 24567 - DNA, 949 bp, Homo sapiens
tgcatgtatatgctttcaagggagatgctatataaaaattataccgttcatagctagaataaaccttttgctagaaattaattagaaactgagtatccaaagcagtacctaaaactaaacaatcagaaagggcaatgtgaaatacaattaccttattttctctgaatatatttaatagccattaaaatcaattccttacaatatttattttattcttattaaaaagttgagccctataatacatttcaagaactcacgaatttattttcataaatactattgtcacatcaccaaaaactgaaatatatacatagctttaaaatattttgtgatatgattgccaattggcagcagtaaaaacttcctaagaattccatcagaaagtatggagctggcaggagggtaagtaccaggccttcaaaatatagatatttacaaaagcaaggtgtgatggccagattttaaaatccaccgtaacatctaattgatgcactagaattcttctaccttcataaacttagtgccacaagaagctcctgcatttgggagcaagcaccttctaaaaaaggaacgaacaaactacagcaatcaaactagcggtactgtgctaagccatattatctatttttgtcaacattttacctactctttcagttagggttgctttcagctactgtggcagaaatatgtctaaaattaacctagataaataaggttttatgtctctcatgaaatgaaattcataagtaaagtaagcagtccggagttggtgctagttactcaacagaaacargaagacctaagagccttcttctgtctttcttagaaaaagtctcttgacttaaatttgcttatcagctaccatccctcagtcaacactatttttagatcaataaatgtagaaactaaattttaggtgggtcttccacgtgactgctaacgtcatccc

SEQ ID NO: 24568 - DNA, 601 bp, Homo sapiens
agtatagagaaaatttgcatttttgtttaaaaagattccatagatgtggaaagagacagtagatgtggtttcaagctgaaattcaaataaactagattccatatgggatagctattggaagcactggctaagaaaggagccatatcaaattttgagtacagccaaacccaatcatcacgttagcattgatggagcaagaaaatatctagatttattgaattataattacagctgtatgaatcacaatcactgtatatatagcaagtgtgattttatctgtgatataaaaaggcctttttaatggaattttatgtaattttaatagactggagaaagtaatgagggagtcatagcttgtgtgtattggggtgaaaaagcaggaaggatatctgtagtaatcattgaagtgttaaaaatatattatggctgggrtcaggattaggtaggtgtgcctgaatttaatgacttatatgtaaggcccttgtaactaaggtaccagttcagaatagaagtttataaaaagcaagaaaaattggattgctgaatccaaatatagaatactactttgcagtaaaatagaaatacatatttaaaatgacta

SEQ ID NO: 24569 - DNA, 601 bp, Homo sapiens
agtatagagaaaatttgcatttttgtttaaaaagattccatagatgtggaaagagacagtagatgtggtttcaagctgaaattcaaataaactagattccatatgggatagctattggaagcactggctaagaaaggagccatatcaaattttgagtacagccaaacccaatcatcacgttagcattgatggagcaagaaaatatctagatttattgaattataattacagctgtatgaatcacaatcactgtatatatagcaagtgtgattttatctgtgatataaaaaggcctttttaatggaattttatgtaattttaatagactggagaaagtaatgagggagtcatagcttgtgtgtattggggtgaaaaagcaggaaggatatctgtagtaatcattgaagtgttaaaaatatattatggctggggtcaggattaggtaggtgtgcctgaatttaatgacttatatrtaaggcccttgtaactaaggtaccagttcagaatagaagtttataaaaagcaagaaaaattggattgctgaatccaaatatagaatactactttgcagtaaaatagaaatacatatttaaaatgacta

SEQ ID NO: 24570 - DNA, 1095 bp, Homo sapiens
agaaagtatgtttgcgtagccccttgtggggaagctcttcaaaaaagaggatgaagattcactcctcttccataatactgaggatagtgctatgttacccagtggttggttgggaagatcacactctggtatgatgttgagtcacttaatgcaccgaatccatgagaagctagacttgtgtgtgaaaaattacagggcttatatgaaaaatgcagctctctagctcaaattgggaaatgctacaaagaagcaataaaaccaaacaggacaccccactctaagcctrgagaacagtaataagtgaaaatgactgctaatggcatattgtcagtgatataatattgctgccctttggatgtcagaactggactttttctgaatttattataatattcgcagggggagaatgcatgttcattactagtgcttagagcatctggtaaggtaacctctaattctgcttaaatggaagtcgacaaagcaggtacatgttatcctggttcttgtgaattagtctttagggatggctcttattcagcatgcttgaattatgtgccattcttagaacaaggcttaaacatccaatgacactcagtggtttaatctatgtaaataaatctcagccatatgaatctgacacaaattacctcattcaatgaattgagcgattgcaaggactacaatggtctgaatgctgctttatatattgactttgtagatctaaaccccctgcttatccacggaagtaaaagttagtgctcatcagaggtccaggttacatttgaatagataatactatctggttggatacagaccttggatagaatgtgaaggccaaagcaggaaggaatttcctttaggtgaattattatataagtataaggtcttatgtttagcatcccaggaaagaggggttatttttgtagggaatatttcagatgtacaagaaatagactttgttatgaaaattttttctccatcagtcaagatagcagggagacttcataaaaatagactagattactagaatactaccactttgcatcatatttccttcatttacaatattttctgtatgatattgaagaaataacc

SEQ ID NO: 24571 - DNA, 1095 bp, Homo sapiens
agaaagtatgtttgcgtagccccttgtggggaagctcttcaaaaaagaggatgaagattcactcctcttccataatactgaggatagtgctatgttacccagtggttggttgggaagatcacactctggtatgatgttgagtcacttaatgcaccgaatccatgagaagctagacttgtgtgtgaaaaattacagggcttatatgaaaaatgcagctctctagctcaaattgggaaatgctacaaagaagcaataaaaccaaacaggacaccccactctaagcctagagaacagtaataagtgaaaatgactgctaatggcatattgtcagtgatataatattgctgccctttggatgtcagaactggactttttctgaatttattataatatycgcagggggagaatgcatgttcattactagtgcttagagcatctggtaaggtaacctctaattctgcttaaatggaagtcgacaaagcaggtacatgttatcctggttcttgtgaattagtctttagggatggctcttattcagcatgcttgaattatgtgccattcttagaacaaggcttaaacatccaatgacactcagtggtttaatctatgtaaataaatctcagccatatgaatctgacacaaattacctcattcaatgaattgagcgattgcaaggactacaatggtctgaatgctgctttatatattgactttgtagatctaaaccccctgcttatccacggaagtaaaagttagtgctcatcagaggtccaggttacatttgaatagataatactatctggttggatacagaccttggatagaatgtgaaggccaaagcaggaaggaatttcctttaggtgaattattatataagtataaggtcttatgtttagcatcccaggaaagaggggttatttttgtagggaatatttcagatgtacaagaaatagactttgttatgaaaattttttctccatcagtcaagatagcagggagacttcataaaaatagactagattactagaatactaccactttgcatcatatttccttcatttacaatattttctgtatgatattgaagaaataacc

SEQ ID NO: 24572 - DNA, 629 bp, Homo sapiens
gaccctctcaggccaggaattgagaaagctgttgtagagactttaaaaaaaaaaaaaagtactggatttaagacagaaagtctgagtttaaatccgaacttcaccatttactcagtgttgggcagctaactgtgtctctaggcctcggtttcttccttctatagaatggggatgatagtatgtaacttgcaaggattattaatgagtgaaaaaagtaatgtgtttaatgttcrttgaatctgtcttcctgcgtccctgggcagaggtaggctaagggtcttctctgtgtttcagactgttgtaactcacacttaaaagagtacattgtcggccaggcatggtggctcacgcctgtaatcccagcactttgggaggccgaggcgggcgaatcacaaggtcaggagttcgaggccagcctgaccaacatggtgaaaccccgtctctactaaaaatacaaaaaaattagctgggtatagtggcggggtcttgtaatcccagctactcaggaggctgaggcaggagaatcatttgaacccgggaggtggaggttgcagtgagccaagatcgtaccactacactccagccctggcgacagagtgagactctgtctcaaaaaaaataaaagagta

SEQ ID NO: 24573 - DNA, 577 bp, Homo sapiens
  misc_feature (1)...(577): n = A,T,C or G
atctacttttattacagaatattttttatgttttgataagagagagaaaggcctcaaaccagtatatattgaccaagaataaatggggtgtgttgcagtgctgttcttatccttaaatgtttgttccagcttctttggggtccagagttaggaaggaggaaaattagcactagtagtttgaaaacattgtcctgcaaagaacacagccgaatggtacccagcaatagtcagcgtccttgtcagtcagtaagcatcttactgtgagggcccttcgtctcatctctgccttctgcgagtggtctgtggatgttgttgagggcattttgagatcagtctgagttgtctagctccactagttgtctagctgcaagagtgggagaagaagggaagggattagagagcccaagstttccttttgtttaggggaactctcagcatggaggaagaaaggaaaagagattaggtaaattcacctgnnnnnnnnnnnnnnnnnnnnnnnnnnnnnnnnnnnnnnnnnnnnnnnnnnnnnnnnnnnnnnnnnnnnnnnnnnnnnnnnnnnnnnnnnnnnnnnnnnnna

SEQ ID NO: 24574 - DNA, 1206 bp, Homo sapiens
ccccatcctgctgtgccatgacacttgtgtgtaaccccattaaatgtccccttggcatcagtagctcatgggtattgctgtttatccagctcatacccattctgtatgctctacataaacatgagcaaagcaaggataaaatttggaatatactgtaaaatagcacaagaacattggagatgctgcctgtggtgcccagaaagaagtagatttcattttaatacaggagtgagactgaatattttgtctataattgagccagatttggaaattctccacaggtagaagagtgtcaaacaaagactaatgatagcattaacatgatgtagctgtcccaaagatgggggtcccttactcttttcctgcctgtatgctccctttggatttaattgcagtttatagttgtatactaggtgtatttcactctgttttgttttatcatactatgatcttttaaaatatatcttgccactcagatgttaagaattaatgttaattttttaggtttgatgacattataattgtattttttattgtaatttttactgagataattgtagattcatatgcggttgaaagaaataatacagagatcccttgtacacttgcccagttccctcaagggtaacattttgcagaactatagtgtggatattatactataataatacctcaaccaagttgttgatgttgatacaatctactgagctaagtcagaatcctcagttttatttgcactcgtatgtgtattaagctctatataattttgtcaactgtttaataagtatccactactgctgtttttaataagaatttatcacattggtagcatctgaattttggttggaattaaatttcaacatgaattttggaagggacaaaacattctacagtaatacctagggtttccaattccagggtctagaagagctcttcacctgtgagagttttccgtgatggtctgtggttagcccagcttctaggcaaacttttcagagaattccattggcctacattcatgggacaccaataataggcatcaggaacatcctcttttttcactcttctcctttacctttcctgtccactgtgcttgtaagtcctctctacgaagaccactccattaaatgcaaatatggcaaataactcctaagctgccttaaaagsttttttcttctctatcttgagaaataacaagtttactct

SEQ ID NO: 24575 - DNA, 980 bp, Homo sapiens
ggatcccagaggaaaattagtatacccttaccagagaaagcttaataaattctggatcactaaaacaagtcatttatgacaatttcttatagatctgatattaatactccaagtacaattttatattgactgaaggctgataatttgttttgtggcataaaattaaataagggtaaggaaaggtgctattgattaagtttcctggagaacagactctgaaatggaaatttgcaggcatgaagttcattaggaagtgatttcagtatcaacatttgtaacagagtgaaagaagaataagtgagcagtgggaaaagttgaactctgaaaaagttggccgcagccaatcccttggagatctctgaaactagcctactcttctaatagtctagtcttctacattgccctgaattgaggcaaggggaacaggcccttacattcttgctttgtaattggatgtaggttactcctgaagagcaaatgtaaacttgggtgaggcaaaggcctcctgccgagggcattctgtgggagggtctcagctgtgccctctcagcagttaacgcttccggaagctggtggaatgagtgccttgatacagatgtgagtgttctgggcagcactccaccacattcttgggtctaccccttgttccacccatatccatcagyagtaattaagtccacctcatctgggaatacttcctccaggatttggtcattctcttcctggggacacacacaagtgaaaggttagtgagataaatgacaatccctccaccactgcagctcttctcagtgtctcaactgatattcatcatctctttcctctgttactaattctagatttcccccacactcagcacctctgccagtctaagccccaggatgtaagcccctgcctaccacagcttttttatactacagttactgcacttgtcgattgatgatcacaagtgggtggaggtgtaccaagaaacacctagt

SEQ ID NO: 24576 - DNA, 584 bp, Homo sapiens
atggccttgcatttgtcccttcacttttttctttgcctctttggcaggaatcccatttctcaggtctccctcagcttggtgtgggcaaggtgctgcctaagctactaggagcccctgggagctcagggacacaagggtgcccattgccccctgctggcagcccacgtgacagtctcactmtccgccccgcaatcgtccccctgtgtgcctgacagtgaacaaggcaaggggctgacagtcgcaggtgggggcagggaaaatgaaaggcgagaggccagtagaatggctctggaatcaggcctgggggtccgggaggctcctcatggagggcacacgctgaatcctgacggacctggaggagtgagcccgaggaagttgaataggcaggagacaggcaaagctggtggcaggggcaaaatgggcaaaggccccgaagtgggcaggctggctcctggctgtgctgcaagagggtcagtgcagtagtgtagggaggaaggttgggcaggggacataagcaggggtcctcagatgatgcagtggcctgggttcccatggctaagaatttagaccttgtcctgaaggtc

SEQ ID NO: 24577 - DNA, 1092 bp, Homo sapiens
ctctggatgcttgtgacagacagactagggggcagaggagaggagcagggagaccagcgaggagacccccgcgttggtctaggttggaaaggatgcaggataggaccagggtcggggctgtggatggcatgcagagggagcagattctakatctgttggctgatggacaaggtgtggggtgcaagaggaagaatagggtcctaaccctcctttgcatagttctagtggagagaaacagagacagagtcagtcactcgaaccagacacaaaggctggaagagacagagatagggacttaacaactacggccacagctgggtgcggtggctcatgcctgtaattccagcacttagggaggctgaggagggcagatcatctgaggtcagaagtttaagaccagcctggccaacagggtgaaaccccgtctctactaaaaatacaaaaattagcagggcatggtggtgtgcacctgtagacccagctattcaggagactgaggctggagaatcacttgaacccaggaggcagaggttgcaatgagccaagattgcgccactgcactttagcctgggcgacagagtgagactcggtctcaaaaaaaaaaaaaaaaaccaacaaaggctgggtgcggtggctcacgcctgtaatcccagcactttgggaggccgaggcgggtgggtcacatgaggtcaggagttcgagaccagcctggccaacatagtgaaaccccatctctactaaaaatacaaaaaattagccgggtgtggtggtgggcgcctgcaatcccagctactcaggaggctaaggcaggagaatcgcttgaaccggggaggtggaggttgcagtgtgctgagatcgtgccattgcactccagactgggcaacaagagtgagactctgtctcaaacaaacaaacaaacaaacaaacaaaaaccaacaaagcaactaaagaatcacagacccagagatggccagagtcaaatagcagatgcaggaagatgccaggtgaaagatgccggggtggcccagctcggctgtccctgctgcttgacctgcccactcgccctcttccccacccccgacaggtgattga

SEQ ID NO: 24578 - DNA, 1092 bp, Homo sapiens
ctctggatgcttgtgacagacagactagggggcagaggagaggagcagggagaccagcgaggagacccccgcgttggtctaggttggaaaggatgcaggataggaccagggtcggggctgtggatggcatgcagagggagcagattctagatctgttggctgatggacaaggtgtggggtgcaagaggaagartagggtcctaaccctcctttgcatagttctagtggagagaaacagagacagagtcagtcactcgaaccagacacaaaggctggaagagacagagatagggacttaacaactacggccacagctgggtgcggtggctcatgcctgtaattccagcacttagggaggctgaggagggcagatcatctgaggtcagaagtttaagaccagcctggccaacagggtgaaaccccgtctctactaaaaatacaaaaattagcagggcatggtggtgtgcacctgtagacccagctattcaggagactgaggctggagaatcacttgaacccaggaggcagaggttgcaatgagccaagattgcgccactgcactttagcctgggcgacagagtgagactcggtctcaaaaaaaaaaaaaaaaaccaacaaaggctgggtgcggtggctcacgcctgtaatcccagcactttgggaggccgaggcgggtgggtcacatgaggtcaggagttcgagaccagcctggccaacatagtgaaaccccatctctactaaaaatacaaaaaattagccgggtgtggtggtgggcgcctgcaatcccagctactcaggaggctaaggcaggagaatcgcttgaaccggggaggtggaggttgcagtgtgctgagatcgtgccattgcactccagactgggcaacaagagtgagactctgtctcaaacaaacaaacaaacaaacaaacaaaaaccaacaaagcaactaaagaatcacagacccagagatggccagagtcaaatagcagatgcaggaagatgccaggtgaaagatgccggggtggcccagctcggctgtccctgctgcttgacctgcccactcgccctcttccccacccccgacaggtgattga

SEQ ID NO: 24579 - DNA, 526 bp, Homo sapiens
cactccatagagcccagatcgagttcctaagttctcactaaggcacatgggtctaattccattacatttttggcctgtgtcaattaattttcttttctcagataataaatttacactcctattccacttctgagcagttagacattttcagcatggaacattctattaaaatgaaatggcaaattgccttgtagcacacamattttcaaagaatgttttgtctgataatgtagttcttatgagtttctttccaaagtaatccatttacacaaaatacattactaattttgtgcatttacaaactacacataatttcaaagtgatgtcattgttccacaaatacatctaggtttcaaagtgattgattaaattctgtttaaaattttgcacagaagtgcagtatataatcacattttatatccctctgtgcaggatatagttttctaaatcatactccgttgtcaggagcatgttcatcttccatacagaacacactgactgaaaataagatcaagtctgcacattt

SEQ ID NO: 24580 - DNA, 686 bp, Homo sapiens
tgcaaattgataatccatggttcaaagatgtcaagatgaactcaaagtctacagggatacccttttgattcaaggaaataatgttaccctaaatgagagaagatagggaagaccatgtcaaatgaatcactttttgatgtggtttggctgtgtccccacccagatctcattttgaattttagttctcataatccccatgtgtcatgggaggcacctggtgggaggtaattgaatcatgagggcggttaccctccrtgctgttcttgtgatagtgagtgagtctcacaagatctgatggttttataaggggattccacatttgctcggctctcattcttctccttcctgctgccatgtgaagaaggacttgattgcttccccttccaccatgattgtaagtttcctgaatgttccccagccgtatggaactgttagtccattaaagttcttttccttataaattacccagtctcgggtatttcttcatagcagcatgagaacagactaatacacacttcaatattgatttacatttctatgatcatcagtgatcttgagtattttttaatgtttgttggcaacctgcatgtcttcttttgataaatgtctgtttatgtcatttgcctactttgtaatgacataatgtgtttatttatttatttattgggttccatgtagattctgga

SEQ ID NO: 24581 - DNA, 686 bp, Homo sapiens
tgcaaattgataatccatggttcaaagatgtcaagatgaactcaaagtctacagggatacccttttgattcaaggaaataatgttaccctaaatgagagaagatagggaagaccatgtcaaatgaatcactttttgatgtggtttggctgtgtccccacccagatctcattttgaattttagttctcataatccccatgtgtcatgggaggcacctggtgggaggtaattgaatcatgagggcggttaccctccatgctgttcttgtgatagtgagtgagtctcacaagatctgatggttttataaggggattccacatttgctcggctctcattcttctccttcctgctgccatgtgaagaaggacttgattgcttccccttccaccatgattgtaagtttcctgaatgttccccagccgtayggaactgttagtccattaaagttcttttccttataaattacccagtctcgggtatttcttcatagcagcatgagaacagactaatacacacttcaatattgatttacatttctatgatcatcagtgatcttgagtattttttaatgtttgttggcaacctgcatgtcttcttttgataaatgtctgtttatgtcatttgcctactttgtaatgacataatgtgtttatttatttatttattgggttccatgtagattctgga

SEQ ID NO: 24582 - DNA, 686 bp, Homo sapiens
tgcaaattgataatccatggttcaaagatgtcaagatgaactcaaagtctacagggatacccttttgattcaaggaaataatgttaccctaaatgagagaagatagggaagaccatgtcaaatgaatcactttttgatgtggtttggctgtgtccccacccagatctcattttgaattttagttctcataatccccatgtgtcatgggaggcacctggtgggaggtaattgaatcatgagggcggttaccctccatgctgttcttgtgatagtgagtgagtctcacaagatctgatggttttataaggggattccacatttgctcggctctcattcttctccttcctgctgccatgtgaagaaggacttgattgcttccccttccaccatgattgtaagtttcctgaatgttccccagccgtatggaactgttagtccattaaagttcttttccttataaattacccagtctcgggtatttcttcatagcagcatgagaacagactaatacacacttcaatattgatttacatttctatgatcatcagtgatcttgagtattttttaatgtttgttggcaacctgcatgtcttcttttgataaatgtytgtttatgtcatttgcctactttgtaatgacataatgtgtttatttatttatttattgggttccatgtagattctgga

SEQ ID NO: 24583 - DNA, 686 bp, Homo sapiens
tgcaaattgataatccatggttcaaagatgtcaagatgaactcaaagtctacagggatacccttttgattcaaggaaataatgttaccctaaatgagagaagatagggaagaccatgtcaaatgaatcactttttgatgtggtttggctgtgtccccacccagatctcattttgaattttagttctcataatccccatgtgtcatgggaggcacctggtgggaggtaattgaatcatgagggcggttaccctccatgctgttcttgtgatagtgagtgagtctcacaagatctgatggttttataaggggattccacatttgctcggctctcattcttctccttcctgctgccatgtgaagaaggacttgattgcttccccttccaccatgattgtaagtttcctgaatgttccccagccgtatggaactgttagtccattaaagttcttttccttataaattacccagtctcgggtatttcttcatagcagcatgagaacagactaatacacacttcaatattgatttacatttctatgatcatcagtgatcttgagtattttttaatgtttgttggcaacctgcatgtcttcttttgataaatgtctgtttatgtcatttgcctactttgtaatgacataatgtgtttatttwtttatttattgggttccatgtagattctgga

SEQ ID NO: 24584 - DNA, 686 bp, Homo sapiens
tgcaaattgataatccatggttcaaagatgtcaagatgaactcaaagtctacagggatacccttttgattcaaggaaataatgttaccctaaatgagagaagatagggaagaccatgtcaaatgaatcactttttgatgtggtttggctgtgtccccacccagatctcattttgaattttagttctcataatccccatgtgtcatgggaggcacctggtgggaggtaattgaatcatgagggcggttaccctccatgctgttcttgtgatagtgagtgagtctcacaagatctgatggttttataaggggattccacatttgctcggctctcattcttctccttcctgctgccatgtgaagaaggacttgattgcttccccttccaccatgattgtaagtttcctgaatgttccccagccgtatggaactgttagtccattaaagttcttttccttataaattacccagtctcgggtatttcttcatagcagcatgagaacagactaatacacacttcaatattgatttacatttctatgatcatcagtgatcttgagtattttttaatgtttgttggcaacctgcatgtcttcttttgataaatgtctgtttatgtcatttgcctactttgtaatgacataatgtgtttatttawttatttattgggttccatgtagattctgga

SEQ ID NO: 24585 - DNA, 1451 bp, Homo sapiens
tcaagatgtgtgaagggaaggagaggtcctgagaacataatgtgtgaaagtctctgcaactataatttatcacgtaagaatgggcaacttcatatgaaggttaaaacacctgcattggactctggcttttttctagaatttactggctgtgtgatcttgtactggtttcttaacctctctggtctcaggtattgatgttgaaaatgagaaactaagagtatcgctctcacytagtttgtcgaaggcctgtaagagctgaaggtaggacgtacttagagcatagtgtgtgcgggaaaaaatgtttataaaaaataaggccgagcccatgttcgaatcatttgtacacatggattttttttctctcttcatggattacagctttcttcagggaaagagactttctcacttccttctctgcgtcaccactggagccttaaacgttatacacttagttaccaggagacagtgaagtcaacagctgcccaagtccctgtatccacagagtccctgtatacacagcaggcaccagcccatatttatggaatgaattaatacgtatttgtacaatagccttagttgtatccagttggaagtcaacttatggaaggaattgcaaatttttgaagaaacttattttggtacttttatgtgtacagatattaaaaagagcctcattggaaacaatttatctgaaagtggttcacaaggaaatttccttaataaagaaacaagagtgacttccaatcagtgtgtcaagtgtttacaagtaaacagatgcttctagacacttggaagtgcttgaaaactgtgttcatggaagtagttttagtatttacttaaaatattatttatactatacatttatttaatagatgctcttcaaataaaacacgagattaaatttgagtgttagctctaactcaatcactaacttcagattaataagattcccacagtggagaaataacacagatagaacaaagtctccctggcataccatgcacagagataattttgccacgtggccaagagcatgcccgaagaattgtcaatcatcaatgtgagttgcatctgaaaagaaaaagctctgccccttggactgtctcattcagaatcagaccggatttttcaagtgcctttcatgatagactaggaggggaagggaagagggaaaagaccaggggatccagtgtcatgtctctttcttcagctatgcaagtaacgctgagctaaattttgccaagaaaaggttgattattgaaatagatctggtttccagtgacaacagtttgtaattgcctattaatatgctcacacaatgatggcaactttgctatgaatgtttaattctagaacgagctgacaaaaataaattatggatggaacatgcattaacacaaattgctttcatttaccacaagtttatttcaaaatgaatagacatctaagaa

SEQ ID NO: 24586 - DNA, 815 bp, Homo sapiens
attgaaatttcagagaccttggccccatgtcatctaattcaagtgtcaactacagaggaagtgggttgggcaaggccctaacctcagctttaaacaggattggttgtttcccaggagcaactcttggcctgtcagatgaagcaaggccttcctctcacatgctaaagttgtgaaatacagcagcatctttttttcrggttctttggcccatattacagcagtgatgatgatggtgatggttgtgggatgtgacaaaaggaatgcaacgtgacatggaggcaaagagatggaaaaaattggggtttggaggcagaaagccccagctctgcaacttaaatgcccttttgcaagatatttgttcttgttttgacagtaggggatattgaaacctcctgaggttgtttttattattattttttctctttttagattcaagagcattcctataaagaaactcccatgttgcctcactcatagaatattcaaaactccatagttattttccaggtgtatgtccatcagtacctgtcccatccctctggttgtgctattgatccgggcgtgataacaaaacactgttagagccagtagggcaaggagagatatctgctgtggcttctggaaagaaaaagaagtttggtggtatattagtttcctcctgctgctctgaaaagtgagtgtacacctactggcatgcatgaaacaataaagatttattattttatagtcctggaggccagtgtccccagtcagtctacctaggttaaagttaggatgttggaagaactaggcccttctgcaggctcttggggtgg

SEQ ID NO: 24587 - DNA, 815 bp, Homo sapiens
attgaaatttcagagaccttggccccatgtcatctaattcaagtgtcaactacagaggaagtgggttgggcaaggccctaacctcagctttaaacaggattggttgtttcccaggagcaactcttggcctgtcagatgaagcaaggccttcctctcacatgctaaagttgtgaaatacagcagcatctttttttcaggttctttggcccatattacagcagtgatgatgatggtgatggttgtgggatgtgacaaaaggaatgcaacgtgacatggaggcaaagagatggaaaraattggggtttggaggcagaaagccccagctctgcaacttaaatgcccttttgcaagatatttgttcttgttttgacagtaggggatattgaaacctcctgaggttgtttttattattattttttctctttttagattcaagagcattcctataaagaaactcccatgttgcctcactcatagaatattcaaaactccatagttattttccaggtgtatgtccatcagtacctgtcccatccctctggttgtgctattgatccgggcgtgataacaaaacactgttagagccagtagggcaaggagagatatctgctgtggcttctggaaagaaaaagaagtttggtggtatattagtttcctcctgctgctctgaaaagtgagtgtacacctactggcatgcatgaaacaataaagatttattattttatagtcctggaggccagtgtccccagtcagtctacctaggttaaagttaggatgttggaagaactaggcccttctgcaggctcttggggtgg

SEQ ID NO: 24588 - DNA, 815 bp, Homo sapiens
attgaaatttcagagaccttggccccatgtcatctaattcaagtgtcaactacagaggaagtgggttgggcaaggccctaacctcagctttaaacaggattggttgtttcccaggagcaactcttggcctgtcagatgaagcaaggccttcctctcacatgctaaagttgtgaaatacagcagcatctttttttcaggttctttggcccatattacagcagtgatgatgatggtgatggttgtgggatgtgacaaaaggaatgcaacgtgacatggaggcaaagagatggaaaaaattggggtttggaggcagaaagccccagctctgcaacttaaatgcccttttgcaagatatttgttcttgttttgacagtaggggatattgaaacctcctgaggttgtttttattattattttttctctttttagattcaagagcattcctataaagaaactcccatgttgcctcactcatagaatattcaaaactccatagttattttccaggtgtatgtccatcagtacctgtcccatccctctggttgtgctattgatccgsgcgtgataacaaaacactgttagagccagtagggcaaggagagatatctgctgtggcttctggaaagaaaaagaagtttggtggtatattagtttcctcctgctgctctgaaaagtgagtgtacacctactggcatgcatgaaacaataaagatttattattttatagtcctggaggccagtgtccccagtcagtctacctaggttaaagttaggatgttggaagaactaggcccttctgcaggctcttggggtgg

SEQ ID NO: 24589 - DNA, 815 bp, Homo sapiens
attgaaatttcagagaccttggccccatgtcatctaattcaagtgtcaactacagaggaagtgggttgggcaaggccctaacctcagctttaaacaggattggttgtttcccaggagcaactcttggcctgtcagatgaagcaaggccttcctctcacatgctaaagttgtgaaatacagcagcatctttttttcaggttctttggcccatattacagcagtgatgatgatggtgatggttgtgggatgtgacaaaaggaatgcaacgtgacatggaggcaaagagatggaaaaaattggggtttggaggcagaaagccccagctctgcaacttaaatgcccttttgcaagatatttgttcttgttttgacagtaggggatattgaaacctcctgaggttgtttttattattattttttctctttttagattcaagagcattcctataaagaaactcccatgttgcctcactcatagaatattcaaaactccatagttattttccaggtgtatgtccatcagtacctgtcccatccctctggttgtgctattgatccgggcgtgataacaaaacactgttagagccagtagggcaaggagagatatctgctgtggcttctggaaagaaaaagaagtttggtggtatattagtttcctcctgctgctctgaaaagtgagtgtacacctactggcatgcatgaaacaataaagatktattattttatagtcctggaggccagtgtccccagtcagtctacctaggttaaagttaggatgttggaagaactaggcccttctgcaggctcttggggtgg

SEQ ID NO: 24590 - DNA, 746 bp, Homo sapiens
ggcaaagctaacattggcaaaacaggaatctttctatcttgagcttcagcactgcattagaaatcttgttttattatgatggtgaagactgaagccctggggtttgggcaggcatggtttgaaagttcagtggcagctgcctgcagtacgggacatggctgctcatatccaaggctacgaatccggaggaatttcattttcttgagaaagcccaggagagcaagtagcaaggatatgaaagtgagaggcagaaacacagtgaccaaaaaatgctgcctgagatagtgaggcggctgcctggaacacttccttcctggtttttcaaaaggctaccaagataattaagtaactctatgtcaatamgtctctgtcctttctgcatctccccagcattgtaacagcacagggagaagagacggtggcatttgctatggttgctggcatgacaatgaatatgatcatggacctaaactcaaccatgccatctttggaaaaaagcagccaagtagaaaggcaataaataaacatcaagcagggagggccaggcgcagtggctcatgcctgtaatcccagcattttgggagggcgaggtgggggtatcacttgaggtcaggagttcaagaccagcctggccaacatggtgaaaccctgtttctactaaaaatacaaaaattagcaaggcgtggtggtgtgtgcctgtaatcccagctatccaggaggctgaggcagaagaattgctggaacac

SEQ ID NO: 24591 - DNA, 543 bp, Homo sapiens
tggacaatggtaaggactagctgggatcaagaatggttaggcaatctgtatgaatgagtgggaaggcaaaagtgtgctcaatcaggcagcacatttgttaaccagacatttccttggctctcctaaattggactgaagtagcctactttttatagcatcccagggacagttctcttcagagaagctctagggagttagactgcacttccacagaactccagcttgttgctaccggcttgagattgggatgggtgaggagagggggtgagtagagtatgtaaatgaatgcctagaactgtctctcagcggacctccacccttgcacattcctcttcagcttatcagaaggtcaggccaggctgggttgaaactggaggayggagtaacagagatttggcgcttgcgttttctggaaacttatgaccaatttgggtttctttaccctgaccgcaaatctggagtagggaccacaaggcatcacttacctggatttattattggtcttcactgtattcttttgaacttattttgttttgaagtaca

SEQ ID NO: 24592 - DNA, 978 bp, Homo sapiens
tggtacttaaaccatggcttggttgctccagacttgatctctccatctctgagtgctggttctttttgattgattttattcagctagttaatactaagatggcaaggtgatcactggcagatccaggcaactatgctatcttctaagagcctcagtggaaagagctcaatattttcagtgatttctagaatttgcattcgttgggctgaccaagtcacaaagccaaccctggatagagccagctccatccaaactgcagggacatagagtaaggagtaaaaattctcttttaaaaaaagattaaaaagccattatcagaaggaaggaaaatatttgctggtcaggccacaataacagatgtgatatgcaaagcacagcatgtaatatacaaaacatcacatatgctatatattatcatagtttcaactctaagttttgcctgaggcttatggagtcaatcccattgctctatagtcatgtgtcaggctctgtgtacacttgtgtttgtttatattgtagataaaatttaccagatgggaaaaatccatcagtgctgcctagccaataagctggcctggtgaaagtgatcagaggaggtgggtaaatttatctttgaacaaatgaattaaatatgcacagtaaatggttcawtgcacagcaagagagtgccgcctaatcgttggggaagaaagcagagccagcagagcagcaagcctcacgcggtcattcctacagtggggtctgagaggtggccatagccaggaggctagcagagtgctttgtagcacagcacttgcccgagtgtgcactatgttaactacagctgggtctggcataatcatccctgactaatgggtggagagaggagggggtgcaaagtgctgaataaataaattacttaattacatattatcggagagaagaacagatggtcagcttagcccatctcccaatgcctttggcttctgaatggagagt

SEQ ID NO: 24593 - DNA, 723 bp, Homo sapiens
ctctgctgcctttgtaaagcttgggtgctcccagcgctgggcctggacagaggaggcacccactcaacagcagccctgactcttaccaccccagggatgccgaagctgcagcctattccagccgccgtctggaagaacaatggccctgggggccagcaagccttasagaacaagagcgactcaaggagagaaggccgcggcaggcgctgaggctctcacaaaagtaagggcagcaggggcaacccaaggaggtggggaagggcacgcgggaaacgaggtcggcgcccaggcctgcctaggccggcctccctccctccgcaggtcctggggctcctccgggtggcgctcttgaaatccatcgtcaccttccaagcggccctcgcgcgactgcagccagccccggcggctccttgcctgcctgcgtgcccttgcggcggctgctgtctaccctaaacagctccagatttagggctcctccatctgattgctcttccccagccgcctggtgctttcaagtgggcccgacacgctcccgggacttggccacggtccctgcatctcctgatgagagcccgcgcttctaattcgggtccgccccgcactcttcccgcgccctgcccgcgctgtcattacggcgctgtcgctgctcccacagaaagcaggcggccgcagctctcgctggcccggggccagacccaggcccgctacgccgcctcgcggact

SEQ ID NO: 24594 - DNA, 555 bp, Homo sapiens
cactgagagaatatagctaaagttcacagactacaaatgtttgtgctgattttgcatcacctctcaaaaaaaaaaaaaaaaaaaaacagtgcaaactcaatttcaggtaactatcctgaatatttgaatgaagctttctcactggaactgaaagaagattcagaaataagaccatttggggccctgtagtgggtttgagaagtgttaggtaccattattgcacctagagtttgctgtcacagtgggatttttcagcagagctaatctcttcaatttaataaaaattatgtgactacacccatccgtaatcttacactacattaaccaggattcagtgtttctgaaggaaggtgctttcgctattcctgcttaatcagccacccagctgagtgactctaatcaaatgcaaacacagaagcttttattttttaataccaagtgagaatacacatcacarttgtcagatcttaagtgcttgatgcagtcgctaaaaaataaaatctctaatacctcaattcctgcctctggagagtgaaagaacatgaatacattaga

SEQ ID NO: 24595 - DNA, 531 bp, Homo sapiens
ttgtgatttgtaaattatgttatccactccaaaattattatgaacacatcatttctcttcaaagatctgagtggctagagggtttaaaatgtagcattcctgtgaaatcccacctttcatttttaattaggaaacattgctgctgaacacgcctccttggttggcgcaccagggcaggccctcctcaacttcccgttactgtgtttggtctgtggccctgagccgctctgagacttcccacttaccaggctccccagcctcagggctgctcttagggacgcctgtggtctccacctatggaggaaacccttcgtgccttgaacagaatgtcggaacgtgctcatcagccccatccaagtctggggtgtgggggaggcacaggctatgtggtcagctgcctggatctgaggatgtcacctcattacccactaagtgtgtgacactragaaagccacctctttgggccctgtcatcttacctgtaaaattactaataatattcccacctcctaagacttggcagaaacgtgtg

SEQ ID NO: 24596 - DNA, 574 bp, Homo sapiens
taaaggaaaatgttcagctgaaggagaacgaccttgggctgggaacagggaagggccgagtccttatgcggcaaattcagcactggcaattactgacttgctgaagcgagcttgtcctcctcttgacctgtgggccacatgtggcccaggatggctttgaatgcggcccaagacacatttgtaaactttccttaaaacataatgagattttttttgtgattttttttttcttttagctcatcagctatcgtgttagtgtgttttatgtgtggcccaagacaattcttcttcttccaatgtggccaagggaagccaaaagattggacacccctgggctaaaggaacttcagtgacagtgctgggttgtcatgtgacgtttgtacgatgccaacagcagagatggtagaagggtgaacgggcgtgagccatcctctccggcacggctagtcttccctgacaccgtaacgctagtgaggaatmgctaggatgactaaagacttcaaatctacatgaaggaaactttaaaatgcgactgagagggccagaaataagtgaccaaatctaagggtataga

SEQ ID NO: 24597 - DNA, 1185 bp, Homo sapiens
ataaaacgttttgtgtgtttgaatgagacacttgcagcacaaggggcccggaaggggcttcctctaagagctggtgaattattgcttccagtttactgctgcacatttgttttgttgagtagggaacatgagcttgacatcagagataaaatgagtggggccccactcgtcccgggtgcacttcccctctttggtgggttgctgagaaggtggcactgcagagagtgggtgctgcctgaaagctgaggaaaggggcattcctgagagctggaagggtcccagaagacctcttggaaaaggtgggttggtcttcaactgggcccagaagagggggtaggatttaaataattgaaaaggaagacatgggaggctctatgatrtaaagtcctcctcaaggaaccactggttctgcgagataaactgtgtggcttgcagttgacctgctagagcaaagttagaatggtttaagaatgtctgaaattctacaaatacttttcttcatcagcagtaagtgtcacttgcatctttctttcccttcgtatctcaaatggtgacagccacaaatgacagagctctggggtcagtcaaggcaaacagcttgctggagtgttggaaaggaccctgttgagaggagcccaaatggccgccttagagggcgtgggaagaactgcaaaagttgattcagctagtaatgctgtcaagacagctctgtgtctgatggagtcaggggcatgctatggtaaacagagtcagctgttgagaggatgccttgaagggtgcccagcccctggtttggtgcttacatccgatggtggtgggagcacctgttctcttgttatacagttgagacctgatggtgcaagggtcagggctggctgcagcaataatttactagatgagcaaggatgcaataatctccttggagaaggacatttgcatatgacatgtggacatgcctctcccatctttcatggtgggtggggctacaaactctggatttgtgtcactggtgtttcaaatccctttctcacctccctttctcctccctttctcacctgtcagcattcagaagtgagagctcatggaaatgatgattgtgaggctctctcagagtagtctgccatcttgggagatggtttgaggaagaggccacagtggtggaatgaatagttaactcttgacttg

SEQ ID NO: 24598 - DNA, 1185 bp, Homo sapiens
ataaaacgttttgtgtgtttgaatgagacacttgcagcacaaggggcccggaaggggcttcctctaagagctggtgaattattgcttccagtttactgctgcacatttgttttgttgagtagggaacatgagcttgacatcagagataaaatgagtggggccccactcgtcccgggtgcacttcccctctttggtgggttgctgagaaggtggcactgcagagagtgggtgctgcctgaaagctgaggaaaggggcattcctgagagctggaagggtcccagaagacctcttggaaaaggtgggttggtcttcaactgggcccagaagagggggtaggatttaaataattgaaaaggaagacatgggaggctctatgatataaagtcctcctcaaggaaccactggttctgcgagataaactgtgtggcttgcagttgacctgctagagcaaagttagaatggtttaagaatgtctgaaattctacaaatacttttcttcatcagcagtaagtgtcacttgcatctttctttcccttcgtatctcaaatggtgacagccacaaatgacagagctctggggtcagtcaaggcaaacagcttgctggagtgttggaaaggaccctgttgagaggagcccaaatggccgccttagagggcgtgggaagaactgcaaaagttgattcagctagtaatgctgtcaagacagctctgtgtctgatggagtcaggggcatgctatggtaaacagagtcagctgttgagaggatgccttgaagggtgcccagcccctggtttggtgcttacatccgatggtggtgggagcacctgttctcttgttatacagttgagacctgatggtgcaagggtcagggctggctgcagcaataatttactagatgagcaaggatgcaataatctccttggagaaggacatttgcatatgacatgtggacatgcctctcccatctttcatggtgggtggggctacaaactctggatttgtgtcactggtgtttcaaatccctttctcacctccctttctcctccctttctcacctstcagcattcagaagtgagagctcatggaaatgatgattgtgaggctctctcagagtagtctgccatcttgggagatggtttgaggaagaggccacagtggtggaatgaatagttaactcttgacttg

SEQ ID NO: 24599 - DNA, 669 bp, Homo sapiens
tggtaccttcttttccctccctttaaacagtagcccatcttcccccttcacttccccatgcgtaccctcagaatccattcttactggatttggccaccacccaggtgagcgcagacgtgggccaggtgaacccctcttagggctctgtgagaggtggggcagtcaaggtggcagatgctaggaccaaggctgaaggttaagagcgtgtgaaccttttgtgttgtcagactttggaatgaccagagacatctatgaaacggattactaccggaaagggggcaagggtctgctccctgtacggtggatggcaccggagtccctgaaggatggggtcttcaccacttcttctgacatgtggtgagttgtgtgtggatgggtggatggacgctgggcttgaattccaggtgctagtgagagccaagagcgggggaaggaagcctgccatcctcctggacgccccatcaaggaaaggaaggcagcgtcctgtcttaggatcttcccacggctactcttatgtcctgactaatcctgtaggcattgtgaaccccgaaaatctgagacaggtctcagttaatttaggaagtttattttgccaaggttgaggacgygtgcccgtggcacagcctcaggtggtcctgaggacaggtgcccaaggtggtcagagcacag

SEQ ID NO: 24600 - DNA, 513 bp, Homo sapiens
tagagacggggtttcaccatgttggccaggctggtcttggactcctgacctcaggtgatccacccacctcrgcctcccaaagtgctgggattacaggcgtgagccaccatgcccagcctgtgataccttttggttcccattttacaaaagaggaaacagatcccggagaactccagtggacttgcccagagccccacggctactaacaggttaagcctggttccaaaccatcgtactatgctgtgtggcctggcatgtgctaggtagggggagaaagaaatgaaacatgactgcaacttttcagaaacttctacaagcaagccctgaccccgagtgctgggaaccaccctatcaatgaaagaaaccccacacactgcccactctgctgtcctgctaccctgcacatcctatgccttataccaaggatggccaatccctgcaacactgggtcacccaggaaagctaaacgtcttttgttttttctttttctgtctttttttttttttttttttt

SEQ ID NO: 24601 - DNA, 513 bp, Homo sapiens
tagagacggggtttcaccatgttggccaggctggtcttggactcctgacctcaggtgatccacccacctcagcctcccaaagtgctgggattacaggcgtgagccaccatgcccagcctgtgataccttttggttcccattttacaaaagaggaaacagatcccggagaactccagtggacttgcccagagccccacggctactaacaggttaagcctggttccaaaccatcgtactatgctgtgtggcctggcatgtgctaggtagggggagaaagaaatgaaacatgactgcaacttttcagaaacttctacaagcaagccctgaccccgagtgctgggaaccaccctatcaatgaaagaaaccccacacactgcccactctgctgtcctgctaccctgcacatcctatgccttayaccaaggatggccaatccctgcaacactgggtcacccaggaaagctaaacgtcttttgttttttctttttctgtctttttttttttttttttttt

SEQ ID NO: 24602 - DNA, 551 bp, Homo sapiens
agattcccagtcttaccaggaatcagggagatgcaaaagaataccataggataccaatttccatgcactggaattaacataattttcctgcagccttgcccacatttgacatataccttaatgcatcactggtgaaactgtcacagccaccttggagaccattcggggagtatatrctagatctaaaaatgcacatactccattccctgtgacttcaattctgaacatcaatcctagaaaaccattcacaaatgggtaggaggagatggacaccaagatgttcattgcagcattgtttataaaagaaacaaaccggaaacaatctcaatgcctcccactaggggagctggtgagtagcatgtggcttattcatacaagatactatgtagcacttaaaagaatgaactagcaatactgaatcaagaggcataaacttaaagaacatagtggctgagagaaaaaaaaagcatttggcttaagaactcatgcagcaggtgtagcaattggaatcacaatcacaaaaatatcatatgtgtgcatggtgaggaaga

SEQ ID NO: 24603 - DNA, 438 bp, Homo sapiens
caccccgcgccctcccrcgcccccttgtgcgcccgcatctctgctgtgtttaaccagcaggtggtgacctcactcctccctggcctgagcactccatcccgcatcccaggcggtggctctagggaagtctctgaagctgacacagggtggactctccctcttgagtgagtggagaatagaaagggagaggatttctattctgttctgtggtcgtcagcatgaaataatacgttccgcccaggcagggctttgcatttcacattctggtttgcattccccttccagacagttccagggcttttgaatcatgcctcagctttcctggcaggtctcgtctccaaaacccaaaaacacgccgaggctgagagactcacagatcccgccccgccctctgccggttctataggggaaggtctctccgcctcgcgccccgccccc

SEQ ID NO: 24604 - DNA, 438 bp, Homo sapiens
caccccgcgccctcccacgcccccttgtgcgcccgcatctctgctgtgtttaaccagcaggtggtgacctcactcctccctggcctgagcactccatcccgcatcccaggcggtggctctagggaagtctctgaagctgacacagggtggactctccctcttgagtgagtggagaatagaaagggagaggatttctattctgttctgtggtcgtcagcatgaaataatacgttccgcccaggcagggctttgcatttcacattctggtttgcattccccttccagacagttccagggcttttgaatcatgcctcagctttcctggcaggtctcgtctccaaaacccaaaaacacgccgaggctgagagactcacagatcccgccccgcccyctgccggttctataggggaaggtctctccgcctcgcgccccgccccc

SEQ ID NO: 24605 - DNA, 552 bp, Homo sapiens
gcckcttgggttccagtgattctcctgcctcagcctcccaagtagctgcaaatacaggcatgcgccaccatgcctgggtaattttgtatttttagtagagaaggtgtttctccatgttggtcaggctggtcttgaactcctgacctcaggcgatccgcccgcctcagcctcccaaattgctggaattacaggtgtgaggcactgtaccctgcccaattgtgtgggtttctatgtaggcagaactgaccataaacttggctcaggtaactgaaactgagtcatagaaccgcttcagggatcccagtaaagtccaaagtctgcaggcctgcctacattgttgtaaatgggtgccttcctccaggtctcttgaatgtcaggacctctgccagactctgactgggaggagtttggattggttacagagtaagttcagaattctcagtgggaccaagttgggtgaaccctatctggtctgtagccatgagtaggggtcctgcagtttcccacctgactaagggcaggttctcttctgaatagaacacttctcaatct

SEQ ID NO: 24606 - DNA, 552 bp, Homo sapiens
atgtctggctaattgtttgctagtttatagtgttaggatctcactattttgcccaggctggtctcaaacttttggccccagtggatctcccaaagtgttagaattataggcaggagccatggcacccagtaggtatttttaaatttaataaagcttgggtatgtgtcctaacagaatacaccagatgcaaataagaatattgtgtattatcttggttttgatgggagagtattttatgtatctatgaagcctatttggtctataatatggtttggatgtccttgttgtccaaacctcatgctgcaatataaatcctcaatgttgggtgtgggacctggtgggacatatttgggtcatgagggtgaatttctcatgaatggcttggtacatactcttggcaaccaaaaagattagactctatcaattcaaataagagctggttcattaaaagaacatggcttcttcacctcacacttrctctgtctcttaccatataatatatccagttattccttaccttccaccatgattttaagcttcctgaaatcctca

SEQ ID NO: 24607 - DNA, 1056 bp, Homo sapiens
ccagccccattcctttattatctcagacaaatccctggacttgtagaagtggcttgtctccatgggataagctccatctttccttctcggtcacccttgtggtctggtctcggaggggaagatgaaggcagcctgctcttccctctgcttgtcactgttggctttagaagccacctggggattaggagcagcaggtgacaaggtcatggtttttcatttggagagtgggaagcaaatgaaatggcttttcatttggaggggaggaatcatgagaggagtgggggaatgaacttgtcctagcttttcctggtgtcatcgcagcctggccagtgggacttcacggccccmtttttccagaagagaaaactgaggctcagagaggctcactcatccacccaaggccatgccgcttagagggcagtggagctgggcctgggcctggctgctggactccagccctgctttctgacttgagctgccctctgccagcttcagcttctgtcacctcccctccttggtagttgagaggtctggggatgcctttggcagagaggaggagagggcacacttgtgtgtcaggagagttatcagtcgctcaaaagaaatatgtgacccagtaacagattgactcttttaacacattaataatgagattgagtagcgagtctcactgccataattagtggtgagctgaagtggcatttccagatagcagcacagccatcgttggatgcactaacagcacgtcagaggcacagatagtgctgataccactgtagcttattgcttatgtttcaaatggaaggaaatgctacgttttagtttatgaaaaacagatatgttccttcatcccactcaaattcaaggacacccctaggctgagccatgcaggaatggccgtccttgcacatagggcagtggggagctgtcccgtgcaggagacctctgtaagcagcgtcaccatgacggatgaggaagcttccaggtcaccgaatgtggcctcctcacagaggtaggtaaccccatggtgtggccagaacaggccgggtggagcct

SEQ ID NO: 24608 - DNA, 924 bp, Homo sapiens
cctgagcccagaagttcaagggtatagtgagtcgtgattgtaccactgcattcctgctgagcaacagagtgagaccccatctcaaaaaagaaaaaaaaaggcattctagtaaatcgaatgtaatgtgaatggaatttcaaaacaggatctaagatggtatgtagtagaattcaaagtaatatcattttaaagttaaatgagtatggaaaaggtctgttctctagttttgtccagttcagtttactgaaggaatatatttaattatattcatatatttaacaaataaaaatatgttgaattttcgtattgtttgccactgagggttcagatgatagacctcaaaaaatcgaaaatactggttgaaatttgtagcatccatttagttattctttttgacctaaataacttaatagtttattaaatctaaggttagctaaatatgtagctaaccttatttgttttctttcctaacaactctgaagaatacataggactttgcactttttttttttttttttttttttaaagagacagcgtttcggtcttgttgcccaggctggactgtaatggcacaatctyggctcattgcaacctctacctcccgggttcaagtgattctcctgcctcagcctcctgagtagctgggattacaggcacctgccaccacacccgcctaattttttgttatttttagtggagacagggttttaccattttggccaggctggtctcaaactcctgactgacctcaggtgatccacccgccttggcctcccaaagtgctgggattataggtgtgagccaccgtgccgggcctggactttgtactttttcaaatcatatttaattatttcttgatctttactcaaagaattattctgcgctaaatttgcaacattaaacaataattaagcctggatccga

SEQ ID NO: 24609 - DNA, 793 bp, Homo sapiens
atggctaacattttagctctggaactgtctatacttcttcctggctgtatgtttttttcttatacttctttccacctaatatactatttatccaacttattaactctaaatgtctatctttctccaatctcactaaaatgtaaacttcatggtacccygtgacaattaggcaaatggaaaccatgccagttaggtgtgtttgcatgtttagtctccagtacctagaatgaggccatacatgcattaggttcacaataagtaacttaaataaatgacaataaacatgtaatgaatgctgggtaagcagcaggaagtatgaaggcctgttgcaaactcgaaagggtatgccccttctaaaggacagctactgtctatctcctgtatttttggcagataaatatgtagaccaaatgatgtcagacattttgattttcaagaaatatagatatctcaatttgtatataaatattaccaattttaaatttttctgctttattgaggtacacttaatataaaataaatgcatatatttaacttgatgagatttgatgaacttgtacatccatgaaaccatcaccacaattaaaatacagaacattttcattgtccggaaagtttttttatgcctctctgtcatctctccctccctctaccccatctctgtaagctaccaccttgttttctgtaagtatagactggttttcattttctagaatattatataaatggaatcaaatagtgtatacttttattttctggcctctttcactcaacataatgaccttgatattca

SEQ ID NO: 24610 - DNA, 793 bp, Homo sapiens
atggctaacattttagctctggaactgtctatacttcttcctggctgtatgtttttttcttatacttctttccacctaatatactatttatccaacttattaactctaaatgtctatctttctccaatctcactaaaatgtaaacttcatggtaccccgtgacaattaggcaaatggaaaccatgmcagttaggtgtgtttgcatgtttagtctccagtacctagaatgaggccatacatgcattaggttcacaataagtaacttaaataaatgacaataaacatgtaatgaatgctgggtaagcagcaggaagtatgaaggcctgttgcaaactcgaaagggtatgccccttctaaaggacagctactgtctatctcctgtatttttggcagataaatatgtagaccaaatgatgtcagacattttgattttcaagaaatatagatatctcaatttgtatataaatattaccaattttaaatttttctgctttattgaggtacacttaatataaaataaatgcatatatttaacttgatgagatttgatgaacttgtacatccatgaaaccatcaccacaattaaaatacagaacattttcattgtccggaaagtttttttatgcctctctgtcatctctccctccctctaccccatctctgtaagctaccaccttgttttctgtaagtatagactggttttcattttctagaatattatataaatggaatcaaatagtgtatacttttattttctggcctctttcactcaacataatgaccttgatattca

SEQ ID NO: 24611 - DNA, 793 bp, Homo sapiens
atggctaacattttagctctggaactgtctatacttcttcctggctgtatgtttttttcttatacttctttccacctaatatactatttatccaacttattaactctaaatgtctatctttctccaatctcactaaaatgtaaacttcatggtaccccgtgacaattaggcaaatggaaaccatgccagttaggtgtgtttgcatgtttagtctccagtacctagaatgaggccatacatgcattaggttcacaataagtaacttaaataaatgacaataaacatgtaatgaatgctggrtaagcagcaggaagtatgaaggcctgttgcaaactcgaaagggtatgccccttctaaaggacagctactgtctatctcctgtatttttggcagataaatatgtagaccaaatgatgtcagacattttgattttcaagaaatatagatatctcaatttgtatataaatattaccaattttaaatttttctgctttattgaggtacacttaatataaaataaatgcatatatttaacttgatgagatttgatgaacttgtacatccatgaaaccatcaccacaattaaaatacagaacattttcattgtccggaaagtttttttatgcctctctgtcatctctccctccctctaccccatctctgtaagctaccaccttgttttctgtaagtatagactggttttcattttctagaatattatataaatggaatcaaatagtgtatacttttattttctggcctctttcactcaacataatgaccttgatattca

SEQ ID NO: 24612 - DNA, 793 bp, Homo sapiens
atggctaacattttagctctggaactgtctatacttcttcctggctgtatgtttttttcttatacttctttccacctaatatactatttatccaacttattaactctaaatgtctatctttctccaatctcactaaaatgtaaacttcatggtaccccgtgacaattaggcaaatggaaaccatgccagttaggtgtgtttgcatgtttagtctccagtacctagaatgaggccatacatgcattaggttcacaataagtaacttaaataaatgacaataaacatgtaatgaatgctgggtaagcagcaggaagtatgaaggcctgttgcaaactygaaagggtatgccccttctaaaggacagctactgtctatctcctgtatttttggcagataaatatgtagaccaaatgatgtcagacattttgattttcaagaaatatagatatctcaatttgtatataaatattaccaattttaaatttttctgctttattgaggtacacttaatataaaataaatgcatatatttaacttgatgagatttgatgaacttgtacatccatgaaaccatcaccacaattaaaatacagaacattttcattgtccggaaagtttttttatgcctctctgtcatctctccctccctctaccccatctctgtaagctaccaccttgttttctgtaagtatagactggttttcattttctagaatattatataaatggaatcaaatagtgtatacttttattttctggcctctttcactcaacataatgaccttgatattca

SEQ ID NO: 24613 - DNA, 793 bp, Homo sapiens
atggctaacattttagctctggaactgtctatacttcttcctggctgtatgtttttttcttatacttctttccacctaatatactatttatccaacttattaactctaaatgtctatctttctccaatctcactaaaatgtaaacttcatggtaccccgtgacaattaggcaaatggaaaccatgccagttaggtgtgtttgcatgtttagtctccagtacctagaatgaggccatacatgcattaggttcacaataagtaacttaaataaatgacaataaacatgtaatgaatgctgggtaagcagcaggaagtatgaaggcctgttgcaaactcgaaagggtatgccccttctaaaggacagctactgtctatctcctgtatttttggcagataaatatgtagaccaaatgatgtcagacattttgattttcaagaaatatagatatctcaatttgtatataaatattaccaattttaaatktttctgctttattgaggtacacttaatataaaataaatgcatatatttaacttgatgagatttgatgaacttgtacatccatgaaaccatcaccacaattaaaatacagaacattttcattgtccggaaagtttttttatgcctctctgtcatctctccctccctctaccccatctctgtaagctaccaccttgttttctgtaagtatagactggttttcattttctagaatattatataaatggaatcaaatagtgtatacttttattttctggcctctttcactcaacataatgaccttgatattca

SEQ ID NO: 24614 - DNA, 2000 bp, Homo sapiens
tggcctctcaggctgtcctcccagcctcagctgactttcctggccctcagcaggtggctgcccggaactaagggtcctgcttcgcctccctctggcctgcccgtgtctgtgattgccagcatcctggtggggcaatttcatgggaagatgggatcagtactttagagtaagaaatctaaagagatgctattttctgcctaatctgtttctccccatgggtcaatttggctgcacttttattttgaaataaaagaacctaggaacaaatgagcaaacaccttattattaagaaccatctgcagaaactcccgtggagcagctccaaggtcaaagctatctgttctgcctcatacacaaaacagccgacaggcaggcagaataggaaatcatagaatcataaaaagtttgggcaaaccatagtaccttcttttcaactgaatataaaagtaagagttctctctgcaacgcagagacaatcttcaaactcagaacatttgtgtgtgtttaacagaaacaacaatgatcatgttgagttggctggggcggtcaggaaaaatcaacagcagccctgagactcattcttggcactttccttctctttgatcccagattttcatttttcaaaaagtgccatctgttcttcctgtaactttcatgttggagaaaaataatttcaattcttgaaattgtgtgttttctccttctttccccctgcctgatccctctgtctgcgcagatgagggagggattcaagaggtgagtttctattaataagcctgtgtgactaactcccaccaggagaggatgggcctgtgatgctgggctattaagcaaagttataagtaagatataccatgggatttgctttaggttgccaagagacctctctgtggtgatggaaatgctstctgtctctgtggcccaatactgtagccatgggtgattactgagcaattgaaatgcagctagtgcagctgaagaactatgtttttagatgtatttcattttaattaatttaaatttaaatgtaagctaccaaatatctaaataggtgtcacagtttaggggattaattgtgcatgtgcgtgtgtgtgtgcacgctctcttgcgcacctgcacacacacactaggggaggcttcaggggagatgagcagcaggctcagggatcctacagcagcaggctctgaccctctccctcctctactggtcttcacttggtccatggtccttccacaaaccaccaccaattgcccaaacccctcatgaagcagtttcttccagcatatggccacaaagctttttttttttccttaatgaatgtagcttccatgtactcttgttatgtgggctctcctgatctaactacagtcttcaagcctactagcttaaaaaaattagcttcgtctaagaggctacctccaatccaaaccattaagcattttgttgagaaggaatgggaggtcaagtgtcagcccagagagaaagagtgctataatccattagtaacgtctgctgtggctgcaggcaagggcaagggcaagggtgaataactgccaaccccacagtcaatccttgctgtagctttgcttcacaagctagtgaactaattagcttcatttatccagtctattctgtattgggactgctgggcctacatgtttggatttattttacagcacgtagcctctgattttctttctctttttccctgagtgccttcccacctaggcaatccttcgccataccccacccccagtatctgtgacatttttaagtctcttggcaagataccactaaggtatgtaagtaattcatgtaaggtttaatcttttgctaaagaaagtataaacgaggccagggagatgtaattcgggaaatggaaatcaactctcccacgagtttaccactctgggctgaaagaactcaaagcaatcgactcctggttttccccaactcagcatcatctatgactttacacctttcaaaagtgcttggtcat

SEQ ID NO: 24615 - DNA, 2000 bp, Homo sapiens
tggcctctcaggctgtcctcccagcctcagctgactttcctggccctcagcaggtggctgcccggaactaagggtcctgcttcgcctccctctggcctgcccgtgtctgtgattgccagcatcctggtggggcaatttcatgggaagatgggatcagtactttagagtaagaaatctaaagagatgctattttctgcctaatctgtttctccccatgggtcaatttggctgcacttttattttgaaataaaagaacctaggaacaaatgagcaaacaccttattattaagaaccatctgcagaaactcccgtggagcagctccaaggtcaaagctatctgttctgcctcatacacaaaacagccgacaggcaggcagaataggaaatcatagaatcataaaaagtttgggcaaaccatagtaccttcttttcaactgaatataaaagtaagagttctctctgcaacgcagagacaatcttcaaactcagaacatttgtgtgtgtttaacagaaacaacaatgatcatgttgagttggctggggcggtcaggaaaaatcaacagcagccctgagactcattcttggcactttccttctctttgatcccagattttcatttttcaaaaagtgccatctgttcttcctgtaactttcatgttggagaaaaataatttcaattcttgaaattgtgtgttttctccttctttccccctgcctgatccctctgtctgcgcagatgagggagggattcaagaggtgagtttctattaataagcctgtgtgactaactcccaccaggagaggatgggcctgtgatgctgggctattaagcaaagttataagtaagatataccatgggatttgctttaggttgccaagagacctctctgtggtgatggaaatgctgtctgtctctgtggcccaatactgtagccatgggtgattactgagcaattgaaatgcagctagtgcagctgaagaactatgtttttagatgtatttcattttaattaatttaaatttaaatgtaagctaccaaatatctaaataggtgtcacagtttaggggattaattgtgcatgtgcgtgtgtgtgtgcacgctctcttgcgcacctgcacacacacactaggggaggcttcaggggagatgagcagcaggctcagggatcctacagcagcaggctctgaccctctccctcctctactggtcttcacttggtccatggtccttccacaaaccaccaccaattgcccaaacccctcatgaagcagtttcttccagcatatggccacaaagctttttttttttccttaatgaatgtagcttccatgtactcttgttatgtgggctctcctgatctaactacagtcttcaagcctactagcttaaaaaaattagcttcgtctaagaggctacctccaatccaaaccattaagcattttgttgagaaggaatgrgaggtcaagtgtcagcccagagagaaagagtgctataatccattagtaacgtctgctgtggctgcaggcaagggcaagggcaagggtgaataactgccaaccccacagtcaatccttgctgtagctttgcttcacaagctagtgaactaattagcttcatttatccagtctattctgtattgggactgctgggcctacatgtttggatttattttacagcacgtagcctctgattttctttctctttttccctgagtgccttcccacctaggcaatccttcgccataccccacccccagtatctgtgacatttttaagtctcttggcaagataccactaaggtatgtaagtaattcatgtaaggtttaatcttttgctaaagaaagtataaacgaggccagggagatgtaattcgggaaatggaaatcaactctcccacgagtttaccactctgggctgaaagaactcaaagcaatcgactcctggttttccccaactcagcatcatctatgactttacacctttcaaaagtgcttggtcat

SEQ ID NO: 24616 - DNA, 590 bp, Homo sapiens
tcagctaaaagtgtcaaatggaagaagaaacaggtcaatgaagacgcctgactctagggaaggttgtagagtagaatttgaggaaacgtttataattcatttcaaaaatgacaagcaagaggacagatccaaacaaatcattacacaggtaaaatcacatttcccctctggacactgttcttttctctccattttcctgtatccttcatggcccgttttccacagcgtttaagctgcccaagtaacccaagtcccaccactctgattccagccatccagttgctcccaagcctgccgccttkccttcccctgctctttagaatggaggactctgtagaggcagatcttttattgacagagaactcacttccttattagaaggcaggctgttcattcaggaaagcccttgttattagaatgtttttcctgaaagccacttaaaatctgcttccctgtgccttctcctcctaagtcctgggtcaccctctgaggtcctcagaagcaccctaactcctcttccaagacacagcttttcaggtatctgaggttcggtccctatcctactgcgcaaaccccaacacactcagttt

SEQ ID NO: 24617 - DNA, 802 bp, Homo sapiens
cttaggtggtgagttgatatttatatgctatgttattttataaataattgctaaaaagtgtctcaggaacattgtgtaatcctttaaatttgtaattgtaggcggcccttaattttaaggtaagtgattttgctatacaataaaataattaaaaatgttcaatttaggcccaactcaggacaatgccaattcttatactgttttctaattaagaaaaaaataaagtgaaattagtaggagcacatttttaatatctcataattaaactaatcaataaaaataaacagatgtttggctgaaagggaacaaagagaaaaaacaaagggagaaaggaaatcataggttctcagaatagcctgcccaatgagsgaaggcagaaggagagtgagttaccggcaatagacagaaaattgcttgcttttttgttttgctttcctcaagcatacacagatccagctccccataccatcttctccatatttatgactgccccttgtccttaatggaaccatctttctcttatgtatcgttccttcactcccttctttgttttgctttttcttcattcctccttgactggtggaggacatttcattacacgtgtgcttggaaactttgatgcccttagtctggctcagtaaatatctctgtatgtaccttgtcatcaatgtgacacttgagcactgggcttgactaacagcagcaagtatctggatacagcattcattctaggaataatacggtatttttctggtggaggaagcatggactagacttttggaaacctgggttctaggcctga

SEQ ID NO: 24618 - DNA, 974 bp, Homo sapiens
cacctctattgctggccagctgtgatcttgtacaggatacttaacccctttctagctcagtttctttagctgtaaagccagcgcaatgttaccatggagctggtatgtgaaagcaatgcatgttaagtgtgtagtatgtgcctgatacattgttagtgcccagtaaatgttagttatcaggtgaggggtgggatgyggggttgagtagatttgcctcgtccactcatagaggcaggatgtgcaaggaggggtggagacatgcagcaagggattgggcatgaaggttttctccaggcccggggagaacactcggcctggagatattcaggagtccctggcccagaggagattacaactctgcagggatatgagccacgagtggagtgtagacataggcctaaggaagcaatcagacacttccagaatagaggacatttgctaagacagctggcctggatgcttcaaaaagtatcatgggaaaatatgtcggggttgttgtagactgaaagtgactagagttgaaaccaaaagaatgtatgaaccttgatgggacctggttgttgtcgttgtttttaaagacaaacattctggagacaattgttgaatactgattaagggctctgtattagaggctataaagaagttactgtttatatttttaggcatgatcatcttaatgtaatcatgtagaacggtgtctttgtgctcaggaaatctatgtggtaatactcaggggtcgaaatgtcattctatgtacacatgcatggggtggagagaatagtaaatctggcaaaatgttaacaactattcaatccaagtggagagtatgtatctgagtattcattgtgctagcctttcaactttttctggatgtgtggaatttttcaatataaaaaaataagaaaaaaaagaggcctatggaaaaactgggaaccagtatgcaacaggaaaaggaattctttgaaggaaaaaca

SEQ ID NO: 24619 - DNA, 1179 bp, Homo sapiens
catggacccctaggtcatccacatgagagttcaataggttcatcgcccttgaagttgtggggaaagttttgtgcatttgcctttttctgggggtaaaattcttaatttcaatcggtttctctaacagatcttacgactaaaaaaaaaaaaaaatttacaaatcgctatgtttgaaccatacaccctaacttttgtgaaggcatatgtggtatttacatgaccagtttgggaaaagaaaggctgctcacaaactgagggaaccaagcctggccaccctgagcagatcaatatttgccccctgtgaracgttctgggaagtgccgcataaaatcaatccactgctaggaagtgctcccttctgccgggaccattttcttcccttctgcagcccacgctgggttttggccacctccacaatgcagacataagaagcaggtcatctgcctgtgggaggtctgtggaaagccccttatggttaagggaagtgcctctcagccagagtatgacaaagagggtggagaagcaggccttagatcccaacatgtggtagtcacacatgtgctcacaaatggaactatgaaaaatatgcaggttcacagcttttttttttttttttaagatacagggtctcactctgtgattatggctcactgcagcctcgaactcctgggctcaagcgatcctcagcctcccgagtatctaggaccataggctcacaccaccacgcccaggctaatttttatttttattttttgtagagacaggatctcgctatgttgctcaggctggtctcaaactcctggcctcaagccatccttctgcctcagcctcccaaagtgctgggattacaggagtgagccgctgcacccagcctctggctgacattttttaaaatgtttcttataagttattacatttaacaaaatatttaaatcctaccctcagaagttaggagtctatgtcctcctgtatccacattcatcctggtaccaccactgtcccttcccacccaagcaaaattctccttttcaagagaaaaaatctcactttacctcactatacctataagtaaaggcatagaaaaaaaagtaaaatccttgactcatctacacagtgttgaaaacagaagtgtgagttctgttagctgaacgggcctggaggaagcgtggcgggaaggct

SEQ ID NO: 24620 - DNA, 579 bp, Homo sapiens
agaagactggcatccattcgscagggggactctgtgtgtgggcgagtttgtgaacctgctcctgtgcctgctttgagcagagagtaaaagggaattaagtgtggggtggcggctgcctgaagaaagggaagcaacatagtagtcctgccctcccacccttaggtgcatctccctgggccaagtggacaccacggaaattacccaggtttaagctgggtggccagagggctgcccagtggacaatgagagaactgtcattagatgcctgccatacagagcatgtggccagccaaggaagaaacacaggacttttcttaggtaggcggcatttgtcccttcccccattattcctcccataccctagcacactagaggtaaaaaaagaagatgccaaaaaagaaaagtagcaagacaggctcccaccaatgcagttccctcaccaaggcaggttctgtgggtcctaggccaagcttggtgagaagagttctttctccattggacatgaggctgacctttcaaacttattaaattaagtgagactggaatttcatacccaaaaatgtccacaatgcaatgtga

SEQ ID NO: 24621 - DNA, 560 bp, Homo sapiens
ccccctccctgaagtgtaacctgaaaactttaggaatcacagctctgtgctgactgtagtccacatctgcaaactattgtttcatatgttttggctatgtttacagttaagtcaggatggtaaatccagtttctttattccattttgacccagataagaatattctctctctcgtctactttttaactttccttattttctctttctccatatgtcactaagagaaaatacaaaaaacacatagtagtagttacttcaaatggaaacattaagctatggtatgtaaaagccattgcaatgatgttactcagcctttcccatcctgaaggaattgcctcaatgaaaagtttataaatttgttataaactaatcagaattctcaattattgtttcagtttagtgggaattcaaatacatgtcaagttattwagaaaaacagggcgaaactgcatttctaagtatgtactctgttgaatgctagttttaaggaatgttagaaaataacagtcttgtagaaagagtttgggaagcctcagttaaattaaaatcatgtttcttta

SEQ ID NO: 24622 - DNA, 1863 bp, Homo sapiens
  misc_feature (1)...(1863): n = A,T,C or G
gaagggctgccatggattgtccagctggtgggtgagacaggcctccagccaggcatagcctgtgggtctgtggtcctgcagcagacagtgaactcaaccgaatggggctagttgttgccgtggccgaaagaatgtgtgtttccagaactggcagaaaacaagtrgatcaaatgagatgttctttttctctccctccactgctatttttagccacgattaagtgcctaagttattactcttaccctcagacacagtttacaattgctgcaaaagggtattaggtgtctgccaggctgcgagcactccccggcactcagacaccacgaacaaacggacacgtgggacatgacagcgtgttatctgaggacatcaaatctgagattatgaccactgcacacatggtgccatgaaaactgatttaacttaaacctccccaaatgagcctcactgagctgtggacagaaaactaaccagtaaataatcaggaaacctatttcctagtatgacttttttttccagtcatttcattatcccagcaggggtgaaacaatcattgactttactggctcttagatctccagaaagactgaaaaaccatgcaaaaatatgcatgactgtaaagtgacaattagtagagcagggaaccagggaacaagaagatgctgatatagtccttccaggaagcagagaagaaacggaatgacctgtaagagctttcccgtgcttctcttttttttttttgagacggagtctcgctctgtcgcccaggctggagtgctgtggcgggatctcggctcactgcaagctccgcctcctgggttcacgccattctcctgcctcagcctcccaagtagctgggactacaggcgcccgccactacgcccggccaattttttgtatttttagtagagacggggtttcaccgttttagccgggatggtctcgatctcctgacctcgtgatccgcccgcctcggcctcccaaagtgctgggattacaggcgtgagccaccgcgcccggccgtgcttctcttttaaaggatctctctgtcaacaagacagagacccagtgtcttatttttctgggtaaagtatgtaagacttgattttgattttggttctaaattgtaaactctctattttttctctctcttttttaaaaatcagatccccgagatgtgatttgtcagggctgcaggtgacttctccatcattaatcacagtgagcacagtgtctgggtcctannnnnnnnnnnnnnnnnnnnnnnnnnnnnnnnnnnnnnnnnnnnnnnnnnnnnnnnnnnnnnnnnnnnnnnnnnnnnnnnnnnnnnnnnnnnnnnnnnnnaaaatgttaatttctttcaaaatgagaacagccatcaaagcacaaactcttagggtcaaagattacatacatctttatgacaatgcagttgcaaactataaagaggactttgacctctgaagtcctaatctaggtcatgatcctcagtggctggtggtgtgcctgccctccccagatgggtgacgttagcaggtgggttctgcatagcagaggaggagagtcatcctcagaccacacacccccacctcagagggtgagccagaggctctgacggccaacggcttgagacagtcagctgctgcttgtgaggcctgtgaccctaacctttgcaaaagctgggcccactgaaaaacagagactcttcaaggaagagaacagccaccaatttgttctgtatctgcctttgaatgctaactctgaaggagttttgagaaccttgcatgagggtgtcatgggaagaacagaagagtattcactagaggatgtacgagcttacaggccacagtcttccctggcctc

SEQ ID NO: 24623 - DNA, 807 bp, Homo sapiens
tcctgcctcggcctcccaaaatgctgggattacaggcataagcctctgcacccgacctatgtttttttttaattttaaatttttgtagagatggggccttgctacattgcccaggctcgtttcaaactcctgagttcaagcgatgctcccaccttggctcccgaagtgctgggatacaacatgctttttaatgtctgttctaagaatgcaagggcctgatgggagccaagatctagagcttcccagctatctgtcattttctaataaccttctctgatttttgcagacctactaaaaaaaaaactacaaagggaaacaaacctttttctcttctatgcccacagagaagagcatgtctgtggttccaactacttgggaggctgaggtgggaggattgcttgagcccaggaggtcaaggctgttgtgagctgtgtttgcaccactgtattccagcctgggtgacagagcaagatcatgtctcacttttgacaccaaaagtgtgggttttccacaccaagcaattctccaaatctctgcagacaccaactgggtgtcctataatttagttaaatcctggcagtagctacctggggttcatatagaccccacaggttaagggcccagatccataagactgcccccacttcagcctccaatcacaagtagkgggtctccaggttacccacaacttctgtctgacaaattggaggttcccataatcccccttctcaggttcaataatttgctaagacagctctcaaaactcaaagaaatatttacttgacgcttgcagcaaaaagaaaaaaa

SEQ ID NO: 24624 - DNA, 530 bp, Homo sapiens
tgcatatacctgtgtcacaaaaccagctgctcctcaccactaacacacaggtgctgcttactggcttgacagctggtcctgtggcacccctaccccagggcagccttatagtgccaacccggttcctctgcactcacagagggcagtgaaccacctcacagctaatcctgcagcagcgccacctcctcaggcctctgcagggctactgggcaaaaccaygcctgtccaagttcggacacctattaattgatagagccaccttgcctctctctacccatgagaacccatgcctgtcctctaatagccagcccaacagcagccatagctttcccagagagtttgttgacagtttgtgtcagctctcatgactgtacttgtctggcactggacatccagctctgaacccctgcctccagcaaaaccacaccagtggcatcacaaacacagacagcctaggccactgaggcaatcacagacatcactgacaaggattacagctgaagaaactccacagagacaggactactgag

SEQ ID NO: 24625 - DNA, 640 bp, Homo sapiens
tacatatttttatttgttttgcttattgctgcatccccagtgcctagaatagtgccaggcatgtaatatgcacataataattttttgtggtataaatgaatgaaaaataattttcttatttattgagacagggtctccctgtgtcacccaaggtggagtgcagtgtgtgatcatggcttactgcatctttaacctcctgggctgaagcaatcctyccatttaggcctcctgagtagctgggaccacaggcatacccgatggcacctggctaatttttaaaaaatttctgtagagatgggggtctctgtatgttgcctaggctggtcttgaactcaaataatctgccttccctggcctctcaaagttctgggattacaggcatgagccaccgtacccagccataattctcaaaatgcttcttcatgtacttatttttttttcctattcctgcaactctcctagaatatagacgtcacagctattattaaaataattattgatttatcttcccttttgtttatcggtaactaatttacatgtaaacatatgtaatgttccttataaattctaattccctataaatagaatatataataatggaagttttttttaatggacagtctttttgagcttatgctat

SEQ ID NO: 24626 - DNA, 640 bp, Homo sapiens
tacatatttttatttgttttgcttattgctgcatccccagtgcctagaatagtgccaggcatgtaatatgcacataataattttttgtggtataaatgaatgaaaaataattttcttatttattgagacagggtctccctgtgtcacccaaggtggagtgcagtgtgtgatcatggcttactgcatctttaacctcctgggctgaagcaatcctcccatttaggcctcctgagtagctgggaccacaggcatacccgatggcacctggctaatttttaaaaaatttctgtagagatgggggtctctgtatgttgcctaggctggtcttgaactcaaataatctgccttccctggcctctcaaagttctgggattacaggcatgagccaccgtacccagccataattctcaaaatgcttcttcatgtacttatttttttttcctattcctgcaactctcctagaatatagacgtcacagctattattaaaataattattgatttatcttcccttttgtttatcggtaactaatttacatrtaaacatatgtaatgttccttataaattctaattccctataaatagaatatataataatggaagttttttttaatggacagtctttttgagcttatgctat

SEQ ID NO: 24627 - DNA, 1174 bp, Homo sapiens
tcaactgctgaccagggaagcaggacaaaatgtgtatttataagtgggtgccggattatttgaagccttgaaatggttttctctctctctctttttttatttttattttttttttttgaggcagggtccgctctgtcacccaggctggagtgcagtggcatgatctcagctcactacagcctccacctcctgagttcaagtgattcttgtgcctcagccccccaagtagctggattacaggcatgcaccaccacacttggctttttgtatttttagtaaagatggggctttgccatgttggccaggctggtctcacaatcctggcctcaagtgatctatctgccttgcctcccaatgtgctgggattacaggcttgagccaccgcacccaacctttttttctcttatagtctttccctcagagagttcctctgttcacatctcacatctcatcatgctggatattcccaaatctatattcccaaatacttccaggcccatattttaaactgattttatggacacaacatgscaaacccacactgaaccccttccctttcaaatcaaatctctttcttttatttttccatatgcgcaagtcatctggattacttcacacagcaagttctaaatccttgtcttctctgcctccttcacttcctcagtcaatgtattatcaagatctgttgattcttatttcacaacatctcacaaacttgacttttcctcccatcccaaatctatcatccctccaagaagttcaactaccaatggtctcttcctttactaaatttgacctgtacccattgatgtagccaatgattcatgactttaataagtatttattatatattttattgatgaaatgccttatgggaggtgctgtaaatattataaagagcactaataggaagtccttctgcttaaattctgtataatgtagttaataccacaaatatatagaactttattatatacatatattctctctgcagcttaaagtttcataataatatataactccattgactaatcaggtaattatgttttaattaccctgcttgtaacactaccaatggaggtagggataagcccttaccaaaaataatactgagtgagaaaccagcatgtccccagaataataccactgctgtgcttgagaggctctgggcttt

SEQ ID NO: 24628 - DNA, 553 bp, Homo sapiens
agattaaattgaaagtgacctaaatgctagtgagcaagtgmcgactcattttcagcctctggtttcagttctaactgcactaaccgccggaaatgggctctcagatgcaagatgcccagattcatgcagatatttcatggaatggcttaatgagagtctcagacaggcacagacagcttgctctaataagctctcataataagttggaagtttaaactgctgggtactacttggattacatataatccaagctccagtccgtaagtgaaaactagtagagaactggatcttctcaagacaatagactcacattggaacccttacggttataacttccaataccccagtaaccccaggttacattcacgggctgggtactgaagttcattcaagtgatattttttaagtacctgtcatgtatcagacatggtgctagactggaattcaaggaaaataaagagcacaggcttctagcggctttccatttaatgacagagacaccaagtctgaagcaatacaatactgaataataagtaataaggtccggggatgg

SEQ ID NO: 24629 - DNA, 553 bp, Homo sapiens
agattaaattgaaagtgacctaaatgctagtgagcaagtgccgactcattttcagcctctggtttcagttctaactgcactaaccgccggaaatgggctctcagatgcaagatgcccagattcatgcagatatttcatggaatggcttaatgagagtctcagacaggcacagacagcttgctctaataagctctcataataagttggaagtttaaactgctgggtactactkggattacatataatccaagctccagtccgtaagtgaaaactagtagagaactggatcttctcaagacaatagactcacattggaacccttacggttataacttccaataccccagtaaccccaggttacattcacgggctgggtactgaagttcattcaagtgatattttttaagtacctgtcatgtatcagacatggtgctagactggaattcaaggaaaataaagagcacaggcttctagcggctttccatttaatgacagagacaccaagtctgaagcaatacaatactgaataataagtaataaggtccggggatgg

SEQ ID NO: 24630 - DNA, 1027 bp, Homo sapiens
tggcacagacaatggacatgagggaaaaagtgaggaagtcagaatagagcgtggccttcagtgagtaatgatgcatcagtgtcgcacattagctgtggccaatgtacacacaagtgcaaggcgttagcaataggggaacctgggcacagagtgcataggaactctccaaactgactttacaacttttctgggcatctaagactattctagaacattttttaggctaggcctggtggctcacacctgtaatcccagcactttgggaggctgaggcaggcagatcayttgaggtcaggagttcgagaccagcctggccaacatggcgaaaccccatctctactaaaatttaaaaaattagccgggcgtggtggcgcacgcctgcaaccccagctgctcgggaggctgaggtaggagaatcacttgaacccaggaggtggaggccgcagtgagcggagatcacgccactgcattccagcctgggcaacagagtgagatactgtcttaaaaaaataaaaataataaaaataaaatgaaatgtctttaaaagtttatcttgttaaaaaaagatgcaaatgctctctatctagaaataatgattccagaataaaaactgcaacaaacaaaaaaggtggatgtgaaacaactgtacaggtgaatgagtcaggatttaacaccgctcggtctattcctgctgagcggtttatgaaatctgctggagccctcacagctggccattccatttatttgaaactctgaatgattatgtttttccctattggtcccagctctttcttccagggccacacactacaaggaaaacctcctttcctgtcagcagtgcctcaagtcctcagagagagctttcctaataaagcacgcgctccctgcagccgtgttctgagcctcccttcaccccacaaatcatgcctggtctgactccaaggaggtgacctagacaccttacagggaggaggggcagagaggacagcacctgctcagttcaggctgcctgtcacacctgtcctca

SEQ ID NO: 24631 - DNA, 1027 bp, Homo sapiens
tggcacagacaatggacatgagggaaaaagtgaggaagtcagaatagagcgtggccttcagtgagtaatgatgcatcagtgtcgcacattagctgtggccaatgtacacacaagtgcaaggcgttagcaataggggaacctgggcacagagtgcataggaactctccaaactgactttacaacttttctgggcatctaagactattctagaacattttttaggctaggcctggtggctcacacctgtaatcccagcactttgggaggctgaggcaggcagatcattygaggtcaggagttcgagaccagcctggccaacatggcgaaaccccatctctactaaaatttaaaaaattagccgggcgtggtggcgcacgcctgcaaccccagctgctcgggaggctgaggtaggagaatcacttgaacccaggaggtggaggccgcagtgagcggagatcacgccactgcattccagcctgggcaacagagtgagatactgtcttaaaaaaataaaaataataaaaataaaatgaaatgtctttaaaagtttatcttgttaaaaaaagatgcaaatgctctctatctagaaataatgattccagaataaaaactgcaacaaacaaaaaaggtggatgtgaaacaactgtacaggtgaatgagtcaggatttaacaccgctcggtctattcctgctgagcggtttatgaaatctgctggagccctcacagctggccattccatttatttgaaactctgaatgattatgtttttccctattggtcccagctctttcttccagggccacacactacaaggaaaacctcctttcctgtcagcagtgcctcaagtcctcagagagagctttcctaataaagcacgcgctccctgcagccgtgttctgagcctcccttcaccccacaaatcatgcctggtctgactccaaggaggtgacctagacaccttacagggaggaggggcagagaggacagcacctgctcagttcaggctgcctgtcacacctgtcctca

SEQ ID NO: 24632 - DNA, 1027 bp, Homo sapiens
tggcacagacaatggacatgagggaaaaagtgaggaagtcagaatagagcgtggccttcagtgagtaatgatgcatcagtgtcgcacattagctgtggccaatgtacacacaagtgcaaggcgttagcaataggggaacctgggcacagagtgcataggaactctccaaactgactttacaacttttctgggcatctaagactattctagaacattttttaggctaggcctggtggctcacacctgtaatcccagcactttgggaggctgaggcaggcagatcatttgaggtcaggagttcgagaccagcctggccaacatggcgaaaccccatctctactaaaatttaaaaaattagccgggygtggtggcgcacgcctgcaaccccagctgctcgggaggctgaggtaggagaatcacttgaacccaggaggtggaggccgcagtgagcggagatcacgccactgcattccagcctgggcaacagagtgagatactgtcttaaaaaaataaaaataataaaaataaaatgaaatgtctttaaaagtttatcttgttaaaaaaagatgcaaatgctctctatctagaaataatgattccagaataaaaactgcaacaaacaaaaaaggtggatgtgaaacaactgtacaggtgaatgagtcaggatttaacaccgctcggtctattcctgctgagcggtttatgaaatctgctggagccctcacagctggccattccatttatttgaaactctgaatgattatgtttttccctattggtcccagctctttcttccagggccacacactacaaggaaaacctcctttcctgtcagcagtgcctcaagtcctcagagagagctttcctaataaagcacgcgctccctgcagccgtgttctgagcctcccttcaccccacaaatcatgcctggtctgactccaaggaggtgacctagacaccttacagggaggaggggcagagaggacagcacctgctcagttcaggctgcctgtcacacctgtcctca

SEQ ID NO: 24633 - DNA, 1027 bp, Homo sapiens
tggcacagacaatggacatgagggaaaaagtgaggaagtcagaatagagcgtggccttcagtgagtaatgatgcatcagtgtcgcacattagctgtggccaatgtacacacaagtgcaaggcgttagcaataggggaacctgggcacagagtgcataggaactctccaaactgactttacaacttttctgggcatctaagactattctagaacattttttaggctaggcctggtggctcacacctgtaatcccagcactttgggaggctgaggcaggcagatcatttgaggtcaggagttcgagaccagcctggccaacatggcgaaaccccatctctactaaaatttaaaaaattagccgggcgtggtggcgcacgcctgcaaccccagctgctcrggaggctgaggtaggagaatcacttgaacccaggaggtggaggccgcagtgagcggagatcacgccactgcattccagcctgggcaacagagtgagatactgtcttaaaaaaataaaaataataaaaataaaatgaaatgtctttaaaagtttatcttgttaaaaaaagatgcaaatgctctctatctagaaataatgattccagaataaaaactgcaacaaacaaaaaaggtggatgtgaaacaactgtacaggtgaatgagtcaggatttaacaccgctcggtctattcctgctgagcggtttatgaaatctgctggagccctcacagctggccattccatttatttgaaactctgaatgattatgtttttccctattggtcccagctctttcttccagggccacacactacaaggaaaacctcctttcctgtcagcagtgcctcaagtcctcagagagagctttcctaataaagcacgcgctccctgcagccgtgttctgagcctcccttcaccccacaaatcatgcctggtctgactccaaggaggtgacctagacaccttacagggaggaggggcagagaggacagcacctgctcagttcaggctgcctgtcacacctgtcctca

SEQ ID NO: 24634 - DNA, 1027 bp, Homo sapiens
tggcacagacaatggacatgagggaaaaagtgaggaagtcagaatagagcgtggccttcagtgagtaatgatgcatcagtgtcgcacattagctgtggccaatgtacacacaagtgcaaggcgttagcaataggggaacctgggcacagagtgcataggaactctccaaactgactttacaacttttctgggcatctaagactattctagaacattttttaggctaggcctggtggctcacacctgtaatcccagcactttgggaggctgaggcaggcagatcatttgaggtcaggagttcgagaccagcctggccaacatggcgaaaccccatctctactaaaatttaaaaaattagccgggcgtggtggcgcacgcctgcaaccccagctgctcgggaggctgaggyaggagaatcacttgaacccaggaggtggaggccgcagtgagcggagatcacgccactgcattccagcctgggcaacagagtgagatactgtcttaaaaaaataaaaataataaaaataaaatgaaatgtctttaaaagtttatcttgttaaaaaaagatgcaaatgctctctatctagaaataatgattccagaataaaaactgcaacaaacaaaaaaggtggatgtgaaacaactgtacaggtgaatgagtcaggatttaacaccgctcggtctattcctgctgagcggtttatgaaatctgctggagccctcacagctggccattccatttatttgaaactctgaatgattatgtttttccctattggtcccagctctttcttccagggccacacactacaaggaaaacctcctttcctgtcagcagtgcctcaagtcctcagagagagctttcctaataaagcacgcgctccctgcagccgtgttctgagcctcccttcaccccacaaatcatgcctggtctgactccaaggaggtgacctagacaccttacagggaggaggggcagagaggacagcacctgctcagttcaggctgcctgtcacacctgtcctca

SEQ ID NO: 24635 - DNA, 531 bp, Homo sapiens
tttccagtactccatggaaaattccatctcttcatttgatggtctcgattctagaattcaaatgttgccccatcacttttccccagcttgccccccactctggatgtgggatgtggctgaatctcaattattacacaaaatggaaatggaggcacatcagagatttattgtttcaaccttggagactgaaatatattaaaataaatggcaaaaatcatgaatctttgcttgaaaatgcttgtgagttttcaccttgggaattcaaggttacataactagataattacgctttgcataatatgtcaatctttgggcttccgtatcagtcacaacattagcaaaagaagaaaatcttcagcagtctatacccagcygctaccgtggaaacatcccaaagtctaattaagagtttgaaaaaatagttgtaacactccccgaagaactcatctgcattccaacagtattgagaagagtgataatagaattccaccatgtagttaatattagtaagtccaggaaaggattaaagaa

SEQ ID NO: 24636 - DNA, 810 bp, Homo sapiens
tttacctccacaattctaagatgttctattatttttgtttttaacagcattcagtggttttagtcgagagaattatttaaaaaataaatttcaaatgtcttacaaatcaccattcatataactgctgttgacataaagaaatggctatacatgattcgaaattcaaacagtacagaaaggtacataaaacaaagtaaaaaccttcatttatacaatagttcagtgtcttttcacaacagaatctggtcaccttggataggaatttgatattgcagaaacaaacagataatcgtgtacacatacagagtaaaatgcaattgaatttctgttgcttgaaacagaaataccaatattgaggagaaatgaattatctttttcatactccctcaagtgcttaaatcctagtatattactrtttgtttcattttttgtctgagacatccatgactacctctgtgaggtcaacagcagcctacttggcagctggtgcaggcatagagcggagggatttataaataggttagatcatttccttatcactcagtctgcatagggaacaccatgagaaggtaaaagtatgagtttgtggcaggacttggtatggttgtaagtcgaagatatcagataattttctgtaggttgttcatttttgagttgcttcagggtatgtcgatattgataaaaggtctgaagttacagactccatcagtatcctccaagccaaaacagcaatcatttccttaaaagaggacaactatgtcctgaaattttgagtttctattgtgattcttctatttgagtgtggcgaca

SEQ ID NO: 24637 - DNA, 499 bp, Homo sapiens
tcctgataagatgttatcaatgacaatggtgcctgaaacttcattagcaattttaattttgccccggtcctgtagttctgtgatctcgccctgcctccacttgccttgtgatattctattaccttgtaaagtacttgatgtctgtgacccacacctattcgcacactccctcacctttggaaaatccctaataaaaacttgctggtttytgtggcttgtggggcatcacggaacctactgacatgtgatgtctcccccggatgcccagctttaaaatttctctcttttgtactctgtccctttatttctcaagctggccaatgcttaaggaaaatagaaaagaacctatgtgaatacaggggcagattccctgatagtatacccttaattaatctaatttctctccagttcacatgtcctataaaagagatgtctgattgtgcaggaataacaccttcataactgcataaacttcatatctcatcgttaaaaataattt

SEQ ID NO: 24638 - DNA, 499 bp, Homo sapiens
tcctgataagatgttatcaatgacaatggtgcctgaaacttcattagcaattttaattttgccccggtcctgtagttctgtgatctcgccctgcctccacttgccttgtgatattctattaccttgtaaagtacttgatgtctgtgacccacacctattcgcacactccctcacctttggaaaatccctaataaaaacttgctggtttttgtggcttgtggggcatcacggaacctactgacatgtgatgtctcccccggatgcccagctttaaaatttctctcttttgtactctgtccctttatttctcaagctggccaatgcttaaggaaaatagaaaagaacctatgtgaatacaggggcagattccctgatagtatacccttaattaatctaatttytctccagttcacatgtcctataaaagagatgtctgattgtgcaggaataacaccttcataactgcataaacttcatatctcatcgttaaaaataattt

SEQ ID NO: 24639 - DNA, 511 bp, Homo sapiens
ccctcagagtctayagaaggagcttgtctttttggagtgattttagacttctgatctccagaactgtaagataatgtatttgtgttagttcgactaaccaagtttgggattaatttattttaacaataataagaaactgatacattatcctacagtaatactggtgctctcttttcattagcttttgtttgccttagctattgagtagttttaagtattggtttattttatatatgtcaagtaaacagctaaagttgaatttaaaattaccgattggaggtgaatacagtccttttcaatgtattgcaattactgatattgcttattgatttctattagcatagtttgagtatgtttctgtttaaaagttctggtgtgcatgtttgtttgccctacaccttcatttgcattgtagtgataagattttcatcattcctatctgttgtcctctgcttgtttgaaaactgtatattgaacatgttgtttttgtaaatactcatacatttttaac

SEQ ID NO: 24640 - DNA, 511 bp, Homo sapiens
ccctcagagtctatagaaggagcttgtctttttggagtgattttagacttctgatctccagaactgtaagataatgtatttgtgttagttcgactaaccaagtttgggattaatttattttaacaataataagaaactgatacattatcctacagtaatactggtgctctcttttcattagcttttgtttgccttagctattgagtagttttaagtattggtttattttatatatgtcaagtaaacagctaaagttgaatttaaaattaccgattkgaggtgaatacagtccttttcaatgtattgcaattactgatattgcttattgatttctattagcatagtttgagtatgtttctgtttaaaagttctggtgtgcatgtttgtttgccctacaccttcatttgcattgtagtgataagattttcatcattcctatctgttgtcctctgcttgtttgaaaactgtatattgaacatgttgtttttgtaaatactcatacatttttaac

SEQ ID NO: 24641 - DNA, 593 bp, Homo sapiens
gctccattactggcttactgcagggaaggccaaggggccccttgctgtctgtctgttgttgttagcattgaaactgtgtaggtgtgaatagatcacaaactatagtacagccattccattaatgttgagtgagagaagacagtctcaaaatgctgcatgctgtatgagttcctttatatgacactggcaaaaagacagaaccgtagtgacagaaaacagatgggcattgattgccaggagttagggggtgggggagtatggctacaagggggcaggaggcaggtgaaggatggggaactgatttgtattctggttgtggcagttacatgtgttaaaattcacagacctttacacacatgcacacaacacacacacacmgtttaactgtatatgttattttaaaatgtgacattaaaaaaaggccaataataaactgggagaaaaactattacaaatcaaaggattatatatatgtaattagtaaagggctccctcaaatcaattaagacaagacatatctagaaagaaaataggcaaacaattaaaagaagtatgaatggccaaaaaatacatattcagcctcactcataatc

SEQ ID NO: 24642 - DNA, 1185 bp, Homo sapiens
cacctattttttgaagctttgctttaaaacataacattttagaaataaaatcgtggatagaaggagacaagtgtttagtatgaaaaaaattgcagcatttatcaattagaatatactcattaatttggcaaagccaaatgtgattacaaattaaactgtgtcttaaaccagtaattttcatttgtagcatttaaagcacaaagaaaaaaaaaagcatatctgttctgctgtcctggaaattgggagtacaacataatcattgacaacatgaagagaatatagatcagggtgtagagtagttaagaaagatttttctgagaataaaatattgaagacaaaaaagagcctgttttaatctattcctgtgacctcaatttctgagatgacatgcaaggaactaaaatacacacacctcatgtttgctgaaaatctgatattatttatatgtatatatgtttatgtagatgtagatatggatgcatgcatgtatgtatgtgcattcatatacacacaggcccagatcaagtccaacaccaacagggcaaaatatatcaaattgtaagggctgcagctctccagtgctgaaatctgggttcatggaggcagccttgcccccatggctctgctggcattaccttagttggtgctctctgtgatagcctgtccccatggcagttctctgaggtgggcccatccctgtgggttctctgcctggaccttctagctctctcagggcatcctttgaaatctagtcacatcccctctgctttcctgggtgaaatacacacttcgctaaggctgctgatttcactggtggggtgactgaggaggagaactgcagagtgcggggagtggagactgcaatgtgaggaggctgttataatcagtggtggtctctcttttgataaacttctgccccccagaccctggaattctgggctcgtgatgggaatggcagcatagacaatctctaaaatgccttcagggtcattcttccattgccttttacaataagccctggcttctgtttagatggcagcataaccctttcattatttttgatgaatagcacctaccttccattgaggtggcctatccatactaatctacttatccaacagttggttggcccacacttgttctctcccaaacaggtttcctcatgytttccaatgtagataggct

SEQ ID NO: 24643 - DNA, 643 bp, Homo sapiens
ccccccaccgaggtggaggttttaataagtaaatacacattgagaatcttctatccccttttgttatacatgagaggccaggaggcttgtggaaatccaacttttaagaaggtctagctgcctatatcgtcctgaagtatttgaggccatcagaagcactcagattctgctgactgaatggaaatactcttttagagacgtattaatttcaacttgtttccgatatatatatatccctatgtgttggcattacaggcatgagcgaccacgcccggctgtrtgtgtaatatctatcatagacccagtttttccttttactttctgtcccatttcgtgagactaggaagttactgggaagacagctcaggcacaaggaaggggccctcacaacttagactttcacaaaatcgttatacccatgagcctcagaactgcttccaaccaatttttagcacaaatacatatacacattgagataaaatgtcagaagagcactttctggaagatccataatcatgtcatctgggctttgctgaccttgaagaatagattgacagtatcaattttcaggggacttcactgatgtccacaatggtctgatggtgaatttgcccatgattataaaattaacaggtaatttcat

SEQ ID NO: 24644 - DNA, 984 bp, Homo sapiens
atgtgcatgtttgtgtctgcatgtatatacgtatatgaatggcttagaacggtacctagcatatcatacacattctttaagtgttagatactgttgttactgttatttattattaatattattacaaagctaccatacaacttagcctacggaacagactggggcactgattaattcaaaatctgtgtctatggaaaacttatgagaaaagcccaattaagaacatttcatttttttgcactgaggattgttttgaggaagtttaatgtactgaatggactgtttggtgttgagtgcacacatgggaaatatgaccatgactcaccttgaagctgttctatcaaagtcagttccagccacaaatcaaacgacatcaaaaattttcacaatttcacattctatttgtgccagtcagggggatttggttgggttaaytactttaatgacacattttaatttgtgctcatctagtatttaagcataagagaggattctttgctgcattttttggtgaagcttcttcagaggctgaggctaacaggtgtggtttttcaaaaactagaaggattgtgtttttagccatttttctagaaaccaaagagccattttttttatcatgagtaatctaatttcatttttgtttttactaatgaaaataggcataggaagtaagcacagcaacaggagtgctattcattctttcctcaaaaaaaaaaaaaaccctcaactctaacacgccctcctctgaataggtctaactctgtcctttctcatttgttaaacattgattttttttcagcatttaatggaatgaaaattaagagggtcatgtagtatttttttaaaaaatctccactttcagctccttattttgataaaatatgttttcagacttcaacattagcaattatgtcagctctagcctgggaagaaatattgtttttcattacctccatgtaagtccacaggggaaggactaagtat

SEQ ID NO: 24645 - DNA, 531 bp, Homo sapiens
tcctcctagggagaccagcttcttcttggtgtgtgtgtgtttggggttgccacagggccataacccactgcatccccctgataagatcttccacccagggcagcccccacccagggcagcccccacccagttgatcccccacccagatgatcctccacccagatgatcccccacccagatgatcccccacccagatgatctgccacctggatgatccccyaccggggacatcccccacccagggcagcccccactcagatgatcccccacccggggcagcccccacccagatgatctctcacacagggcttccctcctagggcatctgcaacaggctttccccctaaggtgacatccccctcccaggacatccacatcccagagccaccccctcccagagccaccccctaggccattccttcaccaaggctccaccacccaggacaacccccacaaagattccccacccagagcatcctccccacatggcatctccacccagggtattcccccacccagggcatgttcccc

SEQ ID NO: 24646 - DNA, 531 bp, Homo sapiens
tcctcctagggagaccagcttcttcttggtgtgtgtgtgtttggggttgccacagggccataacccactgcatccccctgataagatcttccacccagggcagcccccacccagggcagcccccacccagttgatcccccacccagatgatcctccacccagatgatcccccacccagatgatcccccacccagatgatctgccacctggatgatcccccacckgggacatcccccacccagggcagcccccactcagatgatcccccacccggggcagcccccacccagatgatctctcacacagggcttccctcctagggcatctgcaacaggctttccccctaaggtgacatccccctcccaggacatccacatcccagagccaccccctcccagagccaccccctaggccattccttcaccaaggctccaccacccaggacaacccccacaaagattccccacccagagcatcctccccacatggcatctccacccagggtattcccccacccagggcatgttcccc

SEQ ID NO: 24647 - DNA, 526 bp, Homo sapiens
tcaccattatattttgactcatgctaaatggaatgattgacatatttcctatattccttcattaaaggccaatttttattgagtgttgtgaaaatctaataattatgattgtgtatggccaatcttacaaacttcaaaaaaaaaattttggattctgtttgtaattctacagactgttttcttttctttctttttttttttttttttktttgtttgtttggtttttttaagcctggctggaagtgcagtggctgcaatcttcacacaatgcaacctccgccacccaggttcaagtgattctcccgcctcagcctcctgagtagctggttacaggcacgcgccaccacactaggctagtttccgtattttcagtagagatggagtttcaccatgttggctaggctggtctcaaactcctgacctccagcgatccacccacctaggcctcccaaagtgccgggattacaggcttgagccactgtgcccaacctacagattatttctaatcataaagatctctagcaat

SEQ ID NO: 24648 - DNA, 603 bp, Homo sapiens
ttggattcaaaactgaaactcacatcaaatgtctgatcctcactcatcatttacccaatactgcaaagctacagaatagagtatcttgttttaaagtaacacatctgaaaagtaaaacagaagtatttattaactttcaaagtgattatttcaaaaacatcatataataaatacttgaattcacaaatgttctcctgtagctaaatgttctttatcgggaaaactatacactcgctagtcttaacttgctaatatcatcaacataataccaacgatatcaattacctagtaaactcattggagtcctctactactgctaaaagaacttcaagcctaaacatgcccacgaagttcataattggatccagtcctacctacacacctgcccaccatttcattaacattctagagagttgtggctgctgattcttccctgcacagtctctcctgatatattttgtttggttttgttactacttctcctttaaaatctgctcttgccccacagtggtaggggatcgcagggttaaaggaattaatatccacaatggaacagygcctggtttgcagaaaaccttcatatgttagcctcgacgggcgcaa

SEQ ID NO: 24649 - DNA, 964 bp, Homo sapiens
cacttttcttaagcaattaaaagttctttttgcaaaagaaagaatcattgtttcggccaatcccaccatttggcaagttttctagttatataaaaattatataaatttcataaattaaaatttcctacaagttgatagttttagggtaactggattcaaggcaacaagcctgtgttatctactcgtcagactctctagcaagcaactttttcctctctgacaggacaatactgtttttatttttggttcagtattatcatgataagtaactctgtccaggatattcattcatttattcatatgtcaagtacttggtatttgcaagatactctctcaggacttactattacttactccttatgactctgtgcttcaagaagcacagggaagtgaaataccacttcccttatttcctcaaacacaggatcacacgagccagcatttgcttaacaaattgtatttgtttraatttgtaaaaacaaaaataaattgttttatttcacaaatttgtactatttgtatttgcttaacaaatcccattcattaacttattaaaacttcacaaaaatcctatgtggggattttacagctataaaaactaaaactgagagaggttagccagccattgatcataaagctaagtgaacaggattcatactcaggaatcctgattctgcacttacttaccactacactacagctacctccaaagagtccacacagacccaatgtataagcatggagtataccagacccacagctttcttctaagtccaggtcaaacactgttttcagctgaaggccattccatatttagagaattaagaagagatacgcaatctataaagatcaggacttccgattctggtaatggtgaactagacaatttggactagtccttttactgaagacagctagaaaagtgggaccaaaaaaacctgatggaaggcactaagagctaatg

SEQ ID NO: 24650 - DNA, 964 bp, Homo sapiens
cacttttcttaagcaattaaaagttctttttgcaaaagaaagaatcattgtttcggccaatcccaccatttggcaagttttctagttatataaaaattatataaatttcataaattaaaatttcctacaagttgatagttttagggtaactggattcaaggcaacaagcctgtgttatctactcgtcagactctctagcaagcaactttttcctctctgacaggacaatactgtttttatttttggttcagtattatcatgataagtaactctgtccaggatattcattcatttattcatatgtcaagtacttggtatttgcaagatactctctcaggacttactattacttactccttatgactctgtgcttcaagaagcacagggaagtgaaataccacttcccttatttcctcaaacacaggatcacacgagccagcatttgcttaacaaattgtatttgtttaaatttgtaaaaacaaaaataaattgttttatttcacaaatttgtactatttgtatttgcttaacaaatcccattcattaacttattaaaacttcacaaaaatcctatgtggggattttacagctataaaaactaaaactgagagaggttagccagccattgatcataaagctaagtgaacaggattcatactcaggaatcctgattctgcacttacttaccrctacactacagctacctccaaagagtccacacagacccaatgtataagcatggagtataccagacccacagctttcttctaagtccaggtcaaacactgttttcagctgaaggccattccatatttagagaattaagaagagatacgcaatctataaagatcaggacttccgattctggtaatggtgaactagacaatttggactagtccttttactgaagacagctagaaaagtgggaccaaaaaaacctgatggaaggcactaagagctaatg

SEQ ID NO: 24651 - DNA, 964 bp, Homo sapiens
cacttttcttaagcaattaaaagttctttttgcaaaagaaagaatcattgtttcggccaatcccaccatttggcaagttttctagttatataaaaattatataaatttcataaattaaaatttcctacaagttgatagttttagggtaactggattcaaggcaacaagcctgtgttatctactcgtcagactctctagcaagcaactttttcctctctgacaggacaatactgtttttatttttggttcagtattatcatgataagtaactctgtccaggatattcattcatttattcatatgtcaagtacttggtatttgcaagatactctctcaggacttactattacttactccttatgactctgtgcttcaagaagcacagggaagtgaaataccacttcccttatttcctcaaacacaggatcacacgagccagcatttgcttaacaaattgtatttgtttaaatttgtaaaaacaaaaataaattgttttatttcacaaatttgtactatttgtatttgcttaacaaatcccattcattaacttattaaaacttcacaaaaatcctatgtggggattttacagctataaaaactaaaactgagagaggttagccagccattgatcataaagctaagtgaacaggattcatactcaggaatcctgattctgcacttacttaccactacactacagctacctccaaagagtccacacagacccartgtataagcatggagtataccagacccacagctttcttctaagtccaggtcaaacactgttttcagctgaaggccattccatatttagagaattaagaagagatacgcaatctataaagatcaggacttccgattctggtaatggtgaactagacaatttggactagtccttttactgaagacagctagaaaagtgggaccaaaaaaacctgatggaaggcactaagagctaatg

SEQ ID NO: 24652 - DNA, 812 bp, Homo sapiens
atccacatctgcagactatacaaataacacagattaaaagcacaatcttcattgaaatcacagagcttccaagtgtttttatccattttaatggattaccagctgctaatctgtctgcagctccttcaagcactccagttcctggcattaaggtcaggtgtgctgggatgcttcaaatatctgttctttcaattttgcaatatccaaagacaagtttgtacggtgtccttctagatgcttttttattctttcccaaattttgatcttattaagagctattaacagtttccacaaatccttatgtttagctcctacaaagggccataccatttgaggktgaggtgccactacaccgccatggttccagataataggaacccttgccgtatttcttatcatttctaccatctgacaattttgttcagaccagctgaacatagtgtggccgtggcacgcagacagagaggtgcaattcaagctaaacatccccttaggagatcaatcaataatgattccataggaatcgttgccagcacccctgcctgttctgcaatgcaatcttcccaaacatgtacgttcattttctctgactgggtccaatcctgtttacagataggtttttgagggcggtatgcctcaattatagaagcagatttatcatggtaaatactgagatcagaaagcatgtgtaactgcatcatagagtgattacatccaggcattcttgccagccaagattgataaatatgcccaataagtataattgttctctgtgtcagcccttgttgaaggaatactcatggcaatggtga

SEQ ID NO: 24653 - DNA, 812 bp, Homo sapiens
atccacatctgcagactatacaaataacacagattaaaagcacaatcttcattgaaatcacagagcttccaagtgtttttatccattttaatggattaccagctgctaatctgtctgcagctccttcaagcactccagttcctggcattaaggtcaggtgtgctgggatgcttcaaatatctgttctttcaattttgcaatatccaaagacaagtttgtacggtgtccttctagatgcttttttattctttcccaaattttgatcttattaagagctattaacagtttccacaaatccttatgtttagctcctacaaagggccataccatttgaggttgaggtgccactacaccrccatggttccagataataggaacccttgccgtatttcttatcatttctaccatctgacaattttgttcagaccagctgaacatagtgtggccgtggcacgcagacagagaggtgcaattcaagctaaacatccccttaggagatcaatcaataatgattccataggaatcgttgccagcacccctgcctgttctgcaatgcaatcttcccaaacatgtacgttcattttctctgactgggtccaatcctgtttacagataggtttttgagggcggtatgcctcaattatagaagcagatttatcatggtaaatactgagatcagaaagcatgtgtaactgcatcatagagtgattacatccaggcattcttgccagccaagattgataaatatgcccaataagtataattgttctctgtgtcagcccttgttgaaggaatactcatggcaatggtga

SEQ ID NO: 24654 - DNA, 848 bp, Homo sapiens
agctaaaggaaaagaggggactattatgagaagtccagataaaatctgaaacttctaaattggtggtctgattctctcttttgaaaccttcattctggtgtttcaaacaggaacagtgtctgcttttgaaaagtaagcagktaaaatactgctgtgctctgggtttgtaattctggaaagcaagagaggggatgcacatttcatatcccactgcagaactgaactgtttcttcccctgtggtcttcccagatgctagaaccatgtagggtagaagggatgggaggggacagagggacagagggagcagctaaggatcaacaggaaatttcacttcaaagtcttaagctccatccccaggcccacacattcaacttctgcaaaaatgacttttatcatctagagaactgagaatccaattttatcagctcaactgtaaactccggttgcaggcactctgcattcggtatattgactgtactaaaatgtccttggatctgaagaggatgattaaatataaatgagagcttgtcaatgggatgttccatagggagatattactatccccctgcaaaacaaaagcctcctaattttcagcagtgtgaatgccttgctctgacagatttattagcattttcaaatagaacttggtttcttccacacataacaatctcttaggattcacctttgcatgttccttgctgcccctcagattaaaccttccctttggggcacctctgaccttgtgcagtcatagatgtctcctgctgggccctggttcggatgctgtttggtttacaggactccttggttcctgattaactctataattccaatttggccccaaagg

SEQ ID NO: 24655 - DNA, 586 bp, Homo sapiens
cccttaaaagccatgatatttaaatgcacaaaatctaaatgttcaataaaaacaaattttagttacataaatacatgcgtgacacatccaactgctctgtcaacattctctttctctgtaaatggtaccaacattcatcctgttaatcaaggtgacctccaacagtgctgaatcatagctcttcctcctataaccctctttcctccagcaaaaatctttcctcctttccattccttttcatagctcatccccaaataagcaaagtatgtagctgatatggaagacaggtggctaaaagctgtgtttctggatagtgtagatggggacttcaatcttgatctgctactcacctgccatacgaccttgaaaatgactaattcacccttctgagtctttttttttwtttcttgaaatgcggtttcactctgtcaccaaggctggagtgcagtggcacaatctcagctcactgcaaccttgtctcccaggttcaagtgatcctcccacctcagcctcccaagtatctgggattacaggcatgcaccaccacacctggctaattttgtatttttagtagaaaccaggtttc

SEQ ID NO: 24656 - DNA, 586 bp, Homo sapiens
cccttaaaagccatgatatttaaatgcacaaaatctaaatgttcaataaaaacaaattttagttacataaatacatgcgtgacacatccaactgctctgtcaacattctctttctctgtaaatggtaccaacattcatcctgttaatcaaggtgacctccaacagtgctgaatcatagctcttcctcctataaccctctttcctccagcaaaaatctttcctcctttccattccttttcatagctcatccccaaataagcaaagtatgtagctgatatggaagacaggtggctaaaagctgtgtttctggatagtgtagatggggacttcaatcttgatctgctactcacctgccatacgaccttgaaaatgactaattcacccttctgagtctttttttttatttcttgaaatgcggtttcactctgtcaccmaggctggagtgcagtggcacaatctcagctcactgcaaccttgtctcccaggttcaagtgatcctcccacctcagcctcccaagtatctgggattacaggcatgcaccaccacacctggctaattttgtatttttagtagaaaccaggtttc

SEQ ID NO: 24657 - DNA, 812 bp, Homo sapiens
ctatactcttaaatgcaacagatagccaaagggaactttccaagatcaggagtgactctgattgcaaattccttcatgtccttcaaaccctgcttcatttcttctgtggcgtcttccctgatgtttgtgtatgcctgttccacatacacaaataaaatgaaagcacagatctaaaatgtagactccccacaacggtatgttttactcatctccacgtgcccagaacctgacacaaggctgacatattgtagaataccaataaatatttgttaaatctttatgtctctgtagtccttagcagattccaatttagccagcatttattaagcccccactacattccaagcactgtatcacgccattttcatatcaacttgctcatttagtattcctgacaaccctggttatattttactcatttttacaaataaggaaactgaggctcagagagatgaaagtggcasacgtgaatttgaaatagagttctgcttccctggtataatgctctttcctttcctgctcaggagctgtcccttgattggccactgaacagttactttatccatatgcatgaactggctgcatgaatgagcccagcagagcctctgcatgtgtgtgtatgctttgtgaatctctgaacctatcaattgatggtgctggcctgctcacagggatcatcccactttgatggttgctgccaagcactcatggatattctccccttcaagtctacgttaaacccattgttcaatatgagatggggtcagatggatgctgtgctgaactcacgtctaaattggatgcaggggtct

SEQ ID NO: 24658 - DNA, 525 bp, Homo sapiens
aaatgatcttcccatctcagcttcctgagtagctagggctacaggtgcacgcccccatgcctggctaattgaaatatatatatatatatatatactgtagagatgaggtctccaacatctttctgtggcagagctgggattcaaagcctcatctaggcaccattttccttgccctctgagtcccgcagcccccagccccaaaggttactctctaacctcgcgaatgttgtctctaggtgggctggggagtgcgggtgatggcagaggcttactctttcccttacagaagatgttgtccctgtccaagctgacccttgctctgttgtgtgtctgggctgttagctgaggtcccrttgggtctccaggccccaggggtcttctggaggggtcttctggagaggtcttgcaaccatttcttattgcctccttctcagaccatccgggctaccactgactactgccgccgccacaagatcccctttccccaagtagaagaggctgagctggatttgtggtccaaggccc

SEQ ID NO: 24659 - DNA, 886 bp, Homo sapiens
agtctcaggtgagcagctgcttggaaggcctagcatccaggatgggtggtcctccggggcctgattgtgccacttcccacagtgggctccttttagcttgtcaatcgtgtctcctgcgatgagactcccattagggataaattgtgtctgttttcttccttcatttaacgaacatttattggttacctatgctgcatcagccatggttccaggagaggcaggctagagtagtaaagaagacaggaagcagggggccaggcgcggtggctcacgcctgtaatcccagcactttgggacgccaagccggggcagatcacctgagatcaggagtttaaggccagcttggccaacagggtgaaaccccgtctctattaaaaaatacaaaaaattagccargcgtggtgatgcacgcctgtaatcctagctacttgggaggctgaggcaggagaatcgcttgaatctaggaggtggaggttacagtcacccaagattgtgccattggactccagcctgggagacaagagcgagcctctgtctcaaaaaaaaaaaaaaaaaaaaaagaaaaaaggaccggaaggggcatggatcataaaaatatagataaatccataacctcatgtgtcaataaaactttatttataaagccaaagtagtgggccgactggatttggtccacaactgtagtttgccaagccctgatgtaaatagacaaaaatctgcagaattaattgtccaaactcatgatgccttttctttgttggtttggttatgcttcaggtgatattgaggcatggagtgacacatacgacacattcaagcttgctgacacctacactctagatgtggtggtgctactcttggcattagccaagaagaatgtcaggga

SEQ ID NO: 24660 - DNA, 571 bp, Homo sapiens
tttgcaaatgttcacctattgacatactcactatactcaccgtcactggtcacagacttgactgggtcattgaatgaaattgtcaccaattcaccacagctaattggaaatgtgaaaaatccatcccttctttgctacagaactagttttattttaattgcatgtggtaatatcagtagcctcagcttaataccatgaacacaattgtgaaaaatgatttaaatccaatttctgtggtagcggttctttctcctcattggatttcatacaaattacattttatctttcattgtgaaaaaaattaggtccctaaatgaaataaagtcatgtacaaacaaaatatactttgaaatatcaaatgagaatgacatttttaaaaagctatccatttccataatgacaatggacaaaacattactaacaaawccatactgcaataagtcatgaactatatgcatcataagccatgcttgcagtgtggttatcaaaagatacaggcagtctggcatgctgtctcgcctaatctgctttggaggcagcaggaattcaagctgaacagtatttctgttct

SEQ ID NO: 24661 - DNA, 1077 bp, Homo sapiens
tccgcccgcctcagcctcctgagtagctggaaccacaggcgcgagccaccatgccagtctaacttttcggtgtttctttttgtttgttgtttttgtttgtttgttttgttttygtttttttggtggagacggggatctcactacgttgcccaagcttttttttttttttttttttttttttgagacggggtctcgctctgtcgcccaggctggagttcagtggcgcgatctagactcactgcaacctccgcctcccaggttcaagcgattctcctgcctcagactcccaagtagctgggactacaggcgtgcgccaccatgcctggctaattttttgtatttttaatagagacagggtttggccatgttggtcaggctggtctcgaactccttgcctcaggtgatctacccgccttggcctcccaaaatgctgggattacaggcgtgagccactgcgcccggccgaggctttaatattttaagttgtaaaataggaacaaatgatgacatatttatatttcatctgccattctctagttgttacatctgtaacaagctagttattacatctgtaacaagctagttgttacatctgtaacaagcgtacagcaagcgcctactgtgtgctcgcattgagaaccagacctggcccctcgttcctaccctcgctgggctttcagtctaacagactgagctactcagaatagtcaggggttggccaaatgccaggtaaaacccaggtcgcccagctaaatgtgaatttcaaataaacaatgaataattttttagtactagtatgtcccatgtagacataggacatagaaacatttatgtatgtatgtatatatatgtatttgagacagggtctcgttctgtcgcccaggatgcagtgcagtgggtgtgatctcagctcactgcagccttgacctcctgagcacaagcgattctcctgcctcagcctcccaagtagctgggattacaggtgcgccccgcccagctaacatttattcttttatctgaaatttacatttaactagacggactgtatttttatttgctaaacttgacaactctatg

SEQ ID NO: 24662 - DNA, 1077 bp, Homo sapiens
tccgcccgcctcagcctcctgagtagctggaaccacaggcgcgagccaccatgccagtctaacttttcggtgtttctttttgtttgttgtttttgtttgtttgttttgttttcgtttttttggtggagacggggatctcactacgttgcccaagcttttttttttttttttttttttttttgagacggggtctcgctctgtcgcccaggctggagttcagtggcgcgatctagactcactgcaacctccgcctcccaggttcaagcgattctcctgcctcagactcccaagtagctgggactacaggcgtgcgccaccatgcctggctaattttttgtatttttaatagagacagggtttggccatgttggtcaggctggtctcgaactccttgcctcaggtgatctacccgccttggcctcccaaaatgctgggattacaggcgtgagccactgcgcccggccgaggctttaatattttaagttgtaaaataggaacaaatgatgacatatttatatttcatctgccattctctagttgttacatctgtaacaagctagttattacatctgtaacaagctagttgttacatctgtaacaagcrtacagcaagcgcctactgtgtgctcgcattgagaaccagacctggcccctcgttcctaccctcgctgggctttcagtctaacagactgagctactcagaatagtcaggggttggccaaatgccaggtaaaacccaggtcgcccagctaaatgtgaatttcaaataaacaatgaataattttttagtactagtatgtcccatgtagacataggacatagaaacatttatgtatgtatgtatatatatgtatttgagacagggtctcgttctgtcgcccaggatgcagtgcagtgggtgtgatctcagctcactgcagccttgacctcctgagcacaagcgattctcctgcctcagcctcccaagtagctgggattacaggtgcgccccgcccagctaacatttattcttttatctgaaatttacatttaactagacggactgtatttttatttgctaaacttgacaactctatg

SEQ ID NO: 24663 - DNA, 976 bp, Homo sapiens
agaggcgccctcctttctggactggcacaaacaatgactcaactcttctctgccactcacagacaagccgggatgtttcctgcgtggtctttgccctcttcaacgtgatctggtcgacgctgttcctagaggaatggaagcggagaggggctgagctggcatataagtgggggacgctggactcacctggggaagccgtggaggagccacgcccccagttcagggtcagttgggggctgagtccagggtcatggagacaggacaaaggtaaatggtggggggcactgcaggagcaaaggcagagaggtgtgaaacaggattgtttcatcaaagagggtatgccaaaccgaggcgggctctgtgtgctccccarggggagaggtggaagttggatttgagggactgggaacagtgccctaggtgggtgacctgagagggtcacctccgcatgatggagggaaattgagttctgaggatagggaggggtgcagaaggcagaggtggcccctctgagctcatgctgggcccggtctttgcccaccatcagggcgtgcgacgtatcagccccatcacgcgggccgaggagttctactacccgccctggaagcggctgctcttccagctgcttgtgagcctccccctgtgcctggcgtgcctcgtctgtgtcttcttgctcatgcttggctgcttccagctgcaggtgaccccccataccctcacccgccctgtccttggtacctagctccaccttgggctgagccctgcagctgggatgagccctgaacccccttctcccgcaggagctggtgctgagcgtgaaggggttgccccgtctcgcccgattcctgcctaaggtcatgctggccctgcttgtcagtgtgagtgccgagggctacaagaagctagccatctggctcaatgacatgggtacgacctgccagggggtctctgggaggaaggtctccactgccccttg

SEQ ID NO: 24664 - DNA, 760 bp, Homo sapiens
tctcctggcttcagaggaaatcgcagaagaacctccacagaggcgagaacaacccatttctctgtcatcaagtcaatctaatgcagagaaaggagaatggagacgcaacctgagttctgcaggcaggaggaagccttggcagaggagaggaggaactcccatcttcctgagattttaaagggaatgctgrgcaggctcacattttggtgttttggttttttttttcttttcttttttttaaagaagtcattatgtgaaaaagatacttgtacacgcgtgtttacagcagcacaattcgcaattgcaaaaatatggaaccagcccaaatgcccatcaatcaaccggtggataaaggaactgttatatatatacacacacacgatggaatactactcagccataaaaaggaagaaattaatggccttcacagcaacctggatgggattggagactattattctctgtgaataagtcacgaatgcaaaaccaaacaccttatgttctcactcatgtgtgggagctaagctatgaggatgcaaaggcaatctcacagttctttactccagagctggtgaggagttggctgatgaccttcaaatggcgccaagagtgaaagcccagggtattgggaagtgctgctgttcccaggtgggaactaaggggcagtggtggtgtcattttcccatgtccctttgaggaattacatatcgattttaatgggtcagtgcccgtgtatggagggtgtgaaactctgaatatg

SEQ ID NO: 24665 - DNA, 1246 bp, Homo sapiens
  misc_feature (1)...(1246): n = A,T,C or G
caggacaggcagagractcggcctccccgggaccggagctgcgacgctgcgctctaggggccgacgagggcgaggctgggaggcgcccagggcgggaattcacctctcgggtgaggactttaaaaagcgcggggcgggaggagtcagaaaaaggtttagagcaggaaaactacgcgatagaaagtgtatatattgccctatagcagaaagatccggaacgggaccagcctcagggagactttaaacccaaaaggaagtgacccccgggctctcacggggacgtctcaatttgctctgggcgaaggaagacgggtgagaatttccaggtctgtagggaccccacgtcccagggacagaagcgccggggacctgggaagagcagacttcatacaagatggagcgaaactcacgcgccgctgagggaccttcactccacgcgatctgcttccgggtttgcgcgcgtctgagcggggaaggacagaagccaggcctgggcggggcctgcgaggaggtgggcggggcctgggccaggtaggggtagaggcggagagacnnnnnnnnnnnnnnnnnnnnnnnnnnnnnnnnnnnnnnnnnnnnnnnnnnnnnnnnnnnnnnnnnnnnnnnnnnnnnnnnnnnnnnnnnnnnnnnnnnnncggcagagggcggggcggggctgggctggggcgggatctgtgcgtctctcagcctccctcccaccgcctctgtttttgggttttggaggcgagatggccaggaaggccgatccatgattcaaaagccctggaattgtctgaaacgcggatgcaaagtagaatgtgaaatgcaaagccctgcttgggcagaacttacaatgtcatgctgacggcccagagaatagaatagaaatcctctccctttctattctccattcactccggagggagagtccaccctgtgctcagctgcagagacttccctaaagccaccgcctgggatgctggacggagtgctcaggccagcgaggagtgaggtcaccacctgccggataaacacagcaaggatgcggacgcgggcgcgggagcctgaggtcccatctactcaggaagcagggcgggaggatcgctgaacctgggggtccaggccagcctgggcgacaaagtaacaccccctcccgcagggctcccttcctcgtttctctctttctctctttatttttcgttgttttttttttacgttttaaaataagaggttgattgtatgagatagg

SEQ ID NO: 24666 - DNA, 1246 bp, Homo sapiens
  misc_feature (1)...(1246): n = A,T,C or G
caggacaggcagagaacwcggcctccccgggaccggagctgcgacgctgcgctctaggggccgacgagggcgaggctgggaggcgcccagggcgggaattcacctctcgggtgaggactttaaaaagcgcggggcgggaggagtcagaaaaaggtttagagcaggaaaactacgcgatagaaagtgtatatattgccctatagcagaaagatccggaacgggaccagcctcagggagactttaaacccaaaaggaagtgacccccgggctctcacggggacgtctcaatttgctctgggcgaaggaagacgggtgagaatttccaggtctgtagggaccccacgtcccagggacagaagcgccggggacctgggaagagcagacttcatacaagatggagcgaaactcacgcgccgctgagggaccttcactccacgcgatctgcttccgggtttgcgcgcgtctgagcggggaaggacagaagccaggcctgggcggggcctgcgaggaggtgggcggggcctgggccaggtaggggtagaggcggagagacnnnnnnnnnnnnnnnnnnnnnnnnnnnnnnnnnnnnnnnnnnnnnnnnnnnnnnnnnnnnnnnnnnnnnnnnnnnnnnnnnnnnnnnnnnnnnnnnnnnncggcagagggcggggcggggctgggctggggcgggatctgtgcgtctctcagcctccctcccaccgcctctgtttttgggttttggaggcgagatggccaggaaggccgatccatgattcaaaagccctggaattgtctgaaacgcggatgcaaagtagaatgtgaaatgcaaagccctgcttgggcagaacttacaatgtcatgctgacggcccagagaatagaatagaaatcctctccctttctattctccattcactccggagggagagtccaccctgtgctcagctgcagagacttccctaaagccaccgcctgggatgctggacggagtgctcaggccagcgaggagtgaggtcaccacctgccggataaacacagcaaggatgcggacgcgggcgcgggagcctgaggtcccatctactcaggaagcagggcgggaggatcgctgaacctgggggtccaggccagcctgggcgacaaagtaacaccccctcccgcagggctcccttcctcgtttctctctttctctctttatttttcgttgttttttttttacgttttaaaataagaggttgattgtatgagatagg

SEQ ID NO: 24667 - DNA, 1246 bp, Homo sapiens
  misc_feature (1)...(1246): n = A,T,C or G
caggacaggcagagaactcggcctccccgggaccggrgctgcgacgctgcgctctaggggccgacgagggcgaggctgggaggcgcccagggcgggaattcacctctcgggtgaggactttaaaaagcgcggggcgggaggagtcagaaaaaggtttagagcaggaaaactacgcgatagaaagtgtatatattgccctatagcagaaagatccggaacgggaccagcctcagggagactttaaacccaaaaggaagtgacccccgggctctcacggggacgtctcaatttgctctgggcgaaggaagacgggtgagaatttccaggtctgtagggaccccacgtcccagggacagaagcgccggggacctgggaagagcagacttcatacaagatggagcgaaactcacgcgccgctgagggaccttcactccacgcgatctgcttccgggtttgcgcgcgtctgagcggggaaggacagaagccaggcctgggcggggcctgcgaggaggtgggcggggcctgggccaggtaggggtagaggcggagagacnnnnnnnnnnnnnnnnnnnnnnnnnnnnnnnnnnnnnnnnnnnnnnnnnnnnnnnnnnnnnnnnnnnnnnnnnnnnnnnnnnnnnnnnnnnnnnnnnnnncggcagagggcggggcggggctgggctggggcgggatctgtgcgtctctcagcctccctcccaccgcctctgtttttgggttttggaggcgagatggccaggaaggccgatccatgattcaaaagccctggaattgtctgaaacgcggatgcaaagtagaatgtgaaatgcaaagccctgcttgggcagaacttacaatgtcatgctgacggcccagagaatagaatagaaatcctctccctttctattctccattcactccggagggagagtccaccctgtgctcagctgcagagacttccctaaagccaccgcctgggatgctggacggagtgctcaggccagcgaggagtgaggtcaccacctgccggataaacacagcaaggatgcggacgcgggcgcgggagcctgaggtcccatctactcaggaagcagggcgggaggatcgctgaacctgggggtccaggccagcctgggcgacaaagtaacaccccctcccgcagggctcccttcctcgtttctctctttctctctttatttttcgttgttttttttttacgttttaaaataagaggttgattgtatgagatagg

SEQ ID NO: 24668 - DNA, 905 bp, Homo sapiens
gagatgtgagtacgggagctgcggggtcacctgggaggcaggtggaatgggtggagtccaagcctgggggaaggctgaagcagrctccccgtccatgaccggctcatattcagagtttcacaccctccatacacgggcactgacccattaaaatcgatacgtaattcctcaaagggacatgggaaaatgccactgccatggccccttagttcccacctgggaacagcagcacttcccaataccctgggctgtcactcttggtgccatttgaaggtcatcagccaactcctcaccagctctggagtaaagaactgtgagattgcctttgcatcctcatagcttagctcccgcacatgagtgagaacataaggtgtttggttttgcattcgtgacttattcacagagaataatagtccccaatcccatccaggttgctgcgaaggccattaatttcttccttttatggctgagtagtattccatcagatagatagatagatagatagatagatagatagatagatagatagatagatagatagatacacacacaccatagtccctttatccactcattgattaatgggcatttgggctggttccatatttttgcaattgcgaattgtgctgctgtaaacatatgtgtgcaagtatctttttcacataacgacttctttaaaaaaaaagaaaaaaaaaacaatgaaatgtgagcctgcccagcattccctttaaaatctcaggaagatgggagttcctcctctcctctgccaaggcttcctcctgcctgcagaactcaggttgcctctccattctcctttctctgcattagattgacttgatgacagagaaatgggttgttctcgcctctgtggaggttcttctgcgatttcctctgaagccaggaga

SEQ ID NO: 24669 - DNA, 905 bp, Homo sapiens
gagatgtgagtacgggagctgcggggtcacctgggaggcaggtggaatgggtggagtccaagcctgggggaaggctgaagcagactccccrtccatgaccggctcatattcagagtttcacaccctccatacacgggcactgacccattaaaatcgatacgtaattcctcaaagggacatgggaaaatgccactgccatggccccttagttcccacctgggaacagcagcacttcccaataccctgggctgtcactcttggtgccatttgaaggtcatcagccaactcctcaccagctctggagtaaagaactgtgagattgcctttgcatcctcatagcttagctcccgcacatgagtgagaacataaggtgtttggttttgcattcgtgacttattcacagagaataatagtccccaatcccatccaggttgctgcgaaggccattaatttcttccttttatggctgagtagtattccatcagatagatagatagatagatagatagatagatagatagatagatagatagatagatagatacacacacaccatagtccctttatccactcattgattaatgggcatttgggctggttccatatttttgcaattgcgaattgtgctgctgtaaacatatgtgtgcaagtatctttttcacataacgacttctttaaaaaaaaagaaaaaaaaaacaatgaaatgtgagcctgcccagcattccctttaaaatctcaggaagatgggagttcctcctctcctctgccaaggcttcctcctgcctgcagaactcaggttgcctctccattctcctttctctgcattagattgacttgatgacagagaaatgggttgttctcgcctctgtggaggttcttctgcgatttcctctgaagccaggaga

SEQ ID NO: 24670 - DNA, 1210 bp, Homo sapiens
  misc_feature (1)...(1210): n = A,T,C or G
gtcacaaaaaatggcagtgcttttaacatatgggcctatcctgtttgtgacactgtccataaatcatgatgcatgaacaaagctttatggagggctaaatnnnnnnnnnnnnnnnnnnnnnnnnnnnnnnnnnnnnnnnnnnnnnnnnnnnnnnnnnnnnnnnnnnnnnnnnnnnnnnnnnnnnnnnnnnnnnnnnnnnnycttaacttagaatgtgaaaaaaatagacattgattatgatataatatgcacattcactaaatgtattaccaatacagagaaggtagtttggtagacattttatatatatatatatatatatatatatatatatatatatatatatatatatatatatatatatataaaatcatataataattaccttaaggtagatattattatttccgtataatagattaggaaccaggggccagttgagttgcataatacatgcaatgaagctattttattcagacattctgacttcaggctcaatgctttgtgaattaccccagaaattcttacatttcaggtttatttccaggtacctcacagtatgactgtatttagtgagaaggcctttcacggggcgattaagttaaaatgaggccatttagggatgctcatccatctgactggtgccctttataagaggaaatttgggcatacaaagagtcatctaggatgcacacacacagagggaagaccatgtgtgaacatatcaaaaagacagacatctggaagcccagaagagaggcatcagaataaaactgccttgatcttggacttctagcctccagtcattaagtatatatacataatatatacttaatatatacttaaatatatattgcttaagccaatcatactgttgtattttgtcacggcagccttagagaaccaatacaccttctgatctaggaagtagaaaagatattgttaaacagtaaagtaggtaattatactcaaataattaccattatataaatatatacacacacaatggaatatataaatataatgaaatatatgtgaaatataactatgtgtgtgtgtatatgtgtgtgtgtgtgtgtatacacagtttaagcttccagaatttaaaaatattttgtcatttcctacttatttgtctcattatatggagtgatactggttcagatgagctggttatgtggcccctggaccaacaacctcaggttagtga

SEQ ID NO: 24671 - DNA, 1210 bp, Homo sapiens
  misc_feature (1)...(1210): n = A,T,C or G
gtcacaaaaaatggcagtgcttttaacatatgggcctatcctgtttgtgacactgtccataaatcatgatgcatgaacaaagctttatggagggctaaatnnnnnnnnnnnnnnnnnnnnnnnnnnnnnnnnnnnnnnnnnnnnnnnnnnnnnnnnnnnnnnnnnnnnnnnnnnnnnnnnnnnnnnnnnnnnnnnnnnnncyttaacttagaatgtgaaaaaaatagacattgattatgatataatatgcacattcactaaatgtattaccaatacagagaaggtagtttggtagacattttatatatatatatatatatatatatatatatatatatatatatatatatatatatatatatatataaaatcatataataattaccttaaggtagatattattatttccgtataatagattaggaaccaggggccagttgagttgcataatacatgcaatgaagctattttattcagacattctgacttcaggctcaatgctttgtgaattaccccagaaattcttacatttcaggtttatttccaggtacctcacagtatgactgtatttagtgagaaggcctttcacggggcgattaagttaaaatgaggccatttagggatgctcatccatctgactggtgccctttataagaggaaatttgggcatacaaagagtcatctaggatgcacacacacagagggaagaccatgtgtgaacatatcaaaaagacagacatctggaagcccagaagagaggcatcagaataaaactgccttgatcttggacttctagcctccagtcattaagtatatatacataatatatacttaatatatacttaaatatatattgcttaagccaatcatactgttgtattttgtcacggcagccttagagaaccaatacaccttctgatctaggaagtagaaaagatattgttaaacagtaaagtaggtaattatactcaaataattaccattatataaatatatacacacacaatggaatatataaatataatgaaatatatgtgaaatataactatgtgtgtgtgtatatgtgtgtgtgtgtgtgtatacacagtttaagcttccagaatttaaaaatattttgtcatttcctacttatttgtctcattatatggagtgatactggttcagatgagctggttatgtggcccctggaccaacaacctcaggttagtga

SEQ ID NO: 24672 - DNA, 1210 bp, Homo sapiens
  misc_feature (1)...(1210): n = A,T,C or G
gtcacaaaaaatggcagtgcttttaacatatgggcctatcctgtttgtgacactgtccataaatcatgatgcatgaacaaagctttatggagggctaaatnnnnnnnnnnnnnnnnnnnnnnnnnnnnnnnnnnnnnnnnnnnnnnnnnnnnnnnnnnnnnnnnnnnnnnnnnnnnnnnnnnnnnnnnnnnnnnnnnnnncctyaacttagaatgtgaaaaaaatagacattgattatgatataatatgcacattcactaaatgtattaccaatacagagaaggtagtttggtagacattttatatatatatatatatatatatatatatatatatatatatatatatatatatatatatatatataaaatcatataataattaccttaaggtagatattattatttccgtataatagattaggaaccaggggccagttgagttgcataatacatgcaatgaagctattttattcagacattctgacttcaggctcaatgctttgtgaattaccccagaaattcttacatttcaggtttatttccaggtacctcacagtatgactgtatttagtgagaaggcctttcacggggcgattaagttaaaatgaggccatttagggatgctcatccatctgactggtgccctttataagaggaaatttgggcatacaaagagtcatctaggatgcacacacacagagggaagaccatgtgtgaacatatcaaaaagacagacatctggaagcccagaagagaggcatcagaataaaactgccttgatcttggacttctagcctccagtcattaagtatatatacataatatatacttaatatatacttaaatatatattgcttaagccaatcatactgttgtattttgtcacggcagccttagagaaccaatacaccttctgatctaggaagtagaaaagatattgttaaacagtaaagtaggtaattatactcaaataattaccattatataaatatatacacacacaatggaatatataaatataatgaaatatatgtgaaatataactatgtgtgtgtgtatatgtgtgtgtgtgtgtgtatacacagtttaagcttccagaatttaaaaatattttgtcatttcctacttatttgtctcattatatggagtgatactggttcagatgagctggttatgtggcccctggaccaacaacctcaggttagtga

SEQ ID NO: 24673 - DNA, 567 bp, Homo sapiens
tgagggggttcaagaaggagttcctccatcccaggaaatgctcacgtcagcatcccagggcttctaggtgcagccaagactgtgcccatgtatctgaagctggggtgtctgcaggcccttaagacaaggcaggcactggccccatctccccaacggctgccgcccctgcatgctcaccctggagaggaggacatgactttccactagcrtgtccttgactttctttcccacaccatgctgcctcccctggagagagggctgtatgtctgctttaagccaaaaattcactctggtctcagcagcctagcacctgacagaaactccttgaagtttgcaaaatgtagctgacgctttcactgagtttcagtaggacttctccgatttttgttttcttttttttatcccattcttctcacttcagacaatggccatcttcatttatacatctcacacctggtaagttacaggctatgtcagttaccactggccccgcaaatgcattttacatacacatctatgactaaggaacgtagtgagtaatttttcctagtgaaattttcataaggg

SEQ ID NO: 24674 - DNA, 567 bp, Homo sapiens
tgagggggttcaagaaggagttcctccatcccaggaaatgctcacgtcagcatcccagggcttctaggtgcagccaagactgtgcccatgtatctgaagctggggtgtctgcaggcccttaagacaaggcaggcactggccccatctccccaacggctgccgcccctgcatgctcaccctggagaggaggacatgactttccactagcgtgtccttgactttctttcccacaccatgctgcctcccctggagagagggctgtatgtctgctttaagccaaaaattcactctggtctcagcagcctagcacctgacagaaactccttgaagtttgcaaaatgtagctgacgctttcactgagtttcagtaggacttctccgatttttgttttcttttttttatcccattcttctcacttcagacaatggccatcttcatttatacatctcacacctggtaagttacaggctatgtcagttaccactggccccgcaaatgcattttayatacacatctatgactaaggaacgtagtgagtaatttttcctagtgaaattttcataaggg

SEQ ID NO: 24675 - DNA, 941 bp, Homo sapiens
gcttttggtcttcagtgcccggtgttggtgyggtgctggtggatgtgcaggccagacacagctcagctccaaaggtagggccccagggggatttgcctgggaacactgaggcatccaacagctcagcaaagagctggggcgatcgctaagaggaaggagccaagttgggcaccagagcaccccgcgatcgaggctctcccgcccatagtcagatcctactgtgctggagctatggccgctgctcttccccctccctagcccctcctcacttccctagctccttccttccagcctgagctatttggggaggaacaatgcagaactggtttgggcacagtacgggaccctggctgagcaggaggggccctgatggaagaaggcaaggaggcattgctgagccagcaggaaccgtgcttctgccacctataagcatgtgggggcagggcctccttctgggctgggacattgcctggtaacctctccctgtctcctctgcccacaccttataccagcgacagcatccagtgctccacaatgctcctgacgacggccatggctgctgtttattgagtggttaactctgtccaagtcctgtgcttggtgctatacaccaagatatctctactatacacagataatgacgaggcataacagaccacgggagtgattactctctccctttagaggtggggaaacaagcctgcgggactcatagaaatagaactcttggtcacagtcctacagctacagcaggtttaagccaaaatgggatgtattggctcatatatccaaaaactctgggagcagccccagctccaggttcagaatctcaaatgatgccacaaggaccctgtcccatccacatctctcttctagggtcttctctacactagccccattctccagtgcccacatggggcaagatggcagcctgcggctcg

SEQ ID NO: 24676 - DNA, 611 bp, Homo sapiens
tcttattgtatctagagattaatgcagtaagagatgaaagaggagatctgaatttctgtagctatagcaggaataaaaaaaaagaaagaagctacattctgaggaagttccaccaacactgattttattaccaggaggaagaactgccactctgcccctcccagcagaccctgtgctatacaaaagtgcctcagcgctccctgaggaagatgccctttttgtatggttctagtctgtagcttctgatcaaatatcactgaccaataacatcaattaaaagtcatctcgaagtgaaaagatttattcaagtcattcaccataaacacaattaagggtcttgcttcaagtttagtagatctacgtgttttagggcagtaataaaagtaacgataacgctrtaagtttacttggtatccattactgcactgaaaataggaaatcatttatcacatccaatttttggtgcaggttatctcccaccaaaggcaaagaaataaagaaaattggtagattttcaaaattaatatctaaatatatttagatagatataaacacgtatgtataatacactcacatgcataattagcccagaaaaagtgagggaagtattt

SEQ ID NO: 24677 - DNA, 722 bp, Homo sapiens
gcatttaatacacctaagctactaaacatcatagcttagcctagtctaccttaaacacactcaaaacactcactagcctacacttcggcaaaatcatctaacacacagcctattttataataaggtattgaatatctcatgtaatttattaaatactgtactgaaaatggaaagcaaaatggtatatggacactcaaagtatagtttctactgaatgtgtattgttttcacaccattgcaaagatgaaaagtcataagttggaccactgtaagtctggactgtctgtatacttccctcaaagcattacattagctacaccttacaaatattgatgttatgttttcattttccttcagtttgaaatattttctaatcaactgttmtactgcttctttaattcatgggttattcaaagttgtatgtttcaattttcaaatattttaacattgtctagttatccacttgttattgatttctaatttaatttaataatggacagaaaacatacttagtatgactacaatccttttaaatttgatgaaatttgttttatgattctgaatatggtctaattttgtgaatgctttctgtgtacattaaaataatggatattctttttttgttttatcactgtcaactaggttaagtaaaagtcatatatatgctcactgatttccccacttattctattaattattgagaggaatgttgaagtttgcaa

SEQ ID NO: 24678 - DNA, 1240 bp, Homo sapiens
tttgaaaatccaactgaaaatgatgagtttatatttcagtaatgttgcctttgaatacagttggaaagagaatatactactaataatagaacaaatttaaaagcttgtaaaattctcttactcccaagcaacaatagaaccagatgattttacatggcagcagcattgcagtatgggttacaaatcggtactaagggaccatgcatagcttagataagtctctgttttatttgttaggaacataaagctttatataagtgaattggtgttcagttacttattgttatataacaagccatcccaagatgtaatgggtttaaataaccattttattttatctatgtttttgtaagtcaggaagttggaaaggatttgtatgggagcttctttcctgatccacatggtacctgctcgataacttggggatggaggatccacttccaagttggcttctccccttgttttccaagattagacaaaattaggtagaaaaataaaaagcttatgtcagctttactttatgaacattgatgaaaagtcataaataataaatagttgcatgtgtaatacacattttgaaatcataaatagtgaattaatgtatttatttcaagaaagtaataattatctaaacaatctttacatctctattaatgtaattttcaataagagtagaraggagaaatttaatatcatcatgatagatgcccaagaaggattagatgtaatttctaaataaaagtagacaatataagaataaaggagtatttctttacttactaaagggtatctaactgaaagccatgttaaagaatacagaataaaacaatataaagccaaagttttcatatataaactttagagttattaacaaagatgcccagcagcactactgtgattcatagctactggaggctttaacaatcttctctaacttcccccatctattatctggattagtcatgtaagctaccagggtttaactattcaagccttgctctttcaaaccttcatgtgcttatctgggattaccttttctgtttttttcttaatggtgaccttcaaatcctctttcaccctctcagcacaagtttaacccttctgtaaaattttccttgactccgttagagttagtaaactcattctctctgctccttttctacattgcttttgaaattgaattgtatttttaatgttaactttttcccaccagaataagtgttatttgagtgcaagaaca

SEQ ID NO: 24679 - DNA, 536 bp, Homo sapiens
atcgcggggtgctctggtgcccaacttggctccttcctcttagcgatcgccccagctctttgctgagctgttggatgcctcagtgttcccaggcaaatccccctggggccctacctttggagctgagctgtgtctggcctgcacatccaccagcaccrcaccaacaccgggcactgaagaccaaaagcggatccaaactcccacccgctctgagcaggttttctctcctacggcagccttcacccggaagccacagctgttaaagctgctagcgggtggtgagggccttgtggttctgcacccaagaaagccttctcttcactggcttcaaaccatcttagtcttagatagcagcacgggcctcagggatagcccccaggtctaccttgtgggaatgacaccttccactcctggaggcttgtcccatgagtccactaatagggaaagggctgaaaagagcgctggggctgaaacattcagctggctgttgggtccccaggccctcctgactgcacagtttagtggagacgtgcaaa

SEQ ID NO: 24680 - DNA, 1183 bp, Homo sapiens
tgtccaaaaggcaatgaaaatgagtttgggaycatttacctctttggacacttcacgcctttttgtctttacattagaaaatggaaacttaagccacgcacagtcccttatgcctggcctataaacccaatattttgggaggctgaggcaggaggatcagttgagtccagaagtttgaaactagcctcggcaacacagtgagaccgcatttgtaccaaaacaaacaaaaaagtaaaactaaattagctgggcatggtggtacatggtggattgtggtcccagctactagagctgaggaggatcacttaagcacaggaggtccaggctgcagtgagccacgaccatgccactgtgctccagcccgggagacaaagtgagatcgtcaccattaggcaaaacaaaggcatgattttaaaaaaatgtttcacatttattatcatttttgagacagagtttcgctctcgttgcccaggctggagtgcaatggcgtgatctcggctcactgcaaactccgcctcctgggattctcctgcctcagcctgggattacaggcatgcgccaccacgccccgctaattttgtattttttcagtagagactaaggggtttctccactttggtcaggctagtctcaaactcccgacctcgggtgatccgcctgcctctgcctcccaaagtgctgggattacaggcatgagccactgcactcaggcccacatttattgaaccatctatctcctgaaaaagaacaggagagtcagccacaggcaaaacctttaagtatgaagacaatagttttcaacagcacaataaaccttacaccttcaacaaaagcatgtcctactgctgaggctccactgggccaatgcaccaagagaatttaaaatgctttaaaaatgcaaaccagggaggacctcagtgggaaacaggtccttgtcatcatacaaggcagttaggtattacaatgccttcatttctgatctgaaaaatggacatgactcctacatttcttcacagttgtgctggggggtggggggggagttcgtgttgttttgtgtctcgctgtcacccagtgcagtgccgcggatctcggctcactgcagtctctgtctcccaggttcaatcaattctcctgcctcagcctcccgagtagctgggattataggcacaccaccatgctcggc

SEQ ID NO: 24681 - DNA, 601 bp, Homo sapiens
acacacattgcatgcctaagtgtgcccttctgtggccaatgctggtgagaggggccacatactatcgggagccaaacccactggcccttctttgaactaaaaaactcaacagagaggagaaacgaagctttgctgcaccagatttctgcaatcacaggacaggcagagaaaggcaggaacagagatggacaaaagcccaagcattcctcacctctccactgacccacatttctatatttgctggggatttccccscaattgcaaggcctctcaagggcagtttattctgctcatctttgcattctgaaaagaaatgggggtggggtctataattattctctattactatgaattaaaatgatattcaattagcacattgtgcatttaaatgacctatttatgatgcataattgataaagttttgtgtacacagctttgctgaatcactttaaaagtttcaaggcctcagatgacaactaagctttctcttggcacttggcctccttgccacctgctcttttgggcctattccatcaaaaaggtgatagttcttgcatctcccaggtttctgactttcaaagcaaaaatggctgcatctcag

SEQ ID NO: 24682 - DNA, 660 bp, Homo sapiens
aaaagatactacaaataatgcaaaatgaaacgatgcaaacaatgataaagtaatttcaaatctgggttaaaaatcaatacagtggacaaccattcacaagcttcattaagcacattactggaatcataagcatgcgcctatcgggggaaattaacccatcatatgaaatgcatgagcaagaatgttggggctgctaattttgtgtcatcttgcagcagttcttccactctcaatataacctaggaatctacctggatgcttttcagatgatctgactataagcatgatttaatcacaccacaagctatctccttcaaaagcagtttggggcaaattgtatatcgtggagcaagtgatttcctcctgtatacttttggctgtgaaaaactgagtcccaacctctgctcctcctatacctcctctccactcttcacacatccacaggtgccctccttccctttcttggccatcatttcatggccaaatcaggctgaatggacgtagatggaatacatttgtttgaatccactccaatattctgagccttggtttgagtactgcttgaaagaatcagatgtgatatttccatgacattatcatacagggaagttctcagtatggtacctcagaaattggtggcmtgctttcatttaacacaga

SEQ ID NO: 24683 - DNA, 1048 bp, Homo sapiens
catgcctcyagtaacctccatcctctcccacatggagccacaagaacctgagacctcttctacaccttctaatggactcagaaacctggaatggggtgagggtgacctgcatctttctcccaggcatataatactgtggtctcagcttgcctcctgccttcagaaatctctggacccaaaatagacaacagcctctatggccgagcacatcctccaactgcagggaacctgtgtgaagctctcctaaagactcccccagattccactttgacagcagcaccaagacgggccccgggacttctggagctcagcaagtgtccagagggagaaagctgccaggctcctcatgctgcagacacttccatgggccctaataattcccctggagacctgcccttgacttcaaggaaagacaccacctctactgtgggactcccccaccgccagactccatgtacccaagaacgccagccacccgacttcctggggatggcagtggcaggatggtggctgctgtttatagggcctatggaaggtgtccaatattaatttctaacactctctttagaatatgagaacacttaacacattttgttttcaattatgggtcttagttgcacgagaaaagcttcatgcatcatcttactacaaatgaaaccagaacatacccgtagatggacttgttaacaatgctggtaaaagtgtggttaggagaggttgctgcaccttctcagagaaatgagctttggctttgggttttattgcaactctcacctttactgcaactgtaactgagtctcgttacaaatcctgcacatttactcttcccaagggccttgtgtgtgacggatactcaaatattttttgatgtttgtaaagcaaccccatgttctttgacacatggattttaagcatgtgattagaggtcatagctgcaaaaccagctggcgccagaggtccttcctcctccatctgaagcagcaattcctcagagagtccatggagtttgggagaaatggacaagaaagagttgaaggaaaggggatcc

SEQ ID NO: 24684 - DNA, 1048 bp, Homo sapiens
catgcctctagtaacctccatcctctcccacatggagccacaagaacctgagacctcttctacaccttctaatggactcagaaacctggaatggggtgagggtgacctgcatctttctcccaggcatataatactgtggtctcagcttgcctcctgccttcagaaatctctggacccaaaatagacaacagcctctatggccgagcacatcctccaactgcagggaacctgtgtgaagctctcctaaagactcccccagattccactttgacagcagcaccaagacgggccccgggacttctggagctcagcaagtgtccagagggagaaagctgccaggctcctcatgctgcagacacttccatgggccctaataattcccctggagacctgcccttgacttcaaggaaagacaccacctctactgtgggactcccccaccgccagactccatgtacccaagaacgccagccacccgacttcctggggatggcagtggcaggatggtggctgctgtttatagggcctatggaaggtgtccaatattaatttctaacactctctttagaatatgagaacacttaacacattttgttttcaattatgggtcttagttgcacgagaaaagcttcatgcatcatcttactacaaatgaaaccagaacatacccgtagatggacttgttaacaatgctggtaaaagtgtggttaggagaggttgctgcaccttctcagagaaatgagctttggctttgggttttattgcaactctcacctttactgcaactgtaactgagtctcgttacaaatcctgcacatttactcttcccaagggccttgtgtgtgacggatactcaaatattttttgatgtttgtaaagcaaccccatgttctttgacacatggattttaagcatgtgattagaggtcatagctgcaaaaccagctggcgccagakgtccttcctcctccatctgaagcagcaattcctcagagagtccatggagtttgggagaaatggacaagaaagagttgaaggaaaggggatcc

SEQ ID NO: 24685 - DNA, 768 bp, Homo sapiens
ggttcttgtagagtttccattaaaagacaatttagtaaaacttttcttcccccaaattataaaatctgtaagatggtttaacaacatgtgtaaaagtcattgtgggccaggcacggtggctcataccaggtgtggtgactcatagcactctgtcacccaggctggagtgcagtggcacaatctctgctcactgcaacctctgcctcctgggtacaagcgattctcctgcctcagctttctgagtagcaaggactacaggtgcacaccatcacgcctggctaatttttgtactattagtacagacggagtttcaccatgttggccaggctggtctcgaactcctgacctcaaatgatccatctacctcggcctcccaaagtgctggaattacagatgtgagccacaatgcccggccttattttctacaactttggtaactttagcatataccccaaatctgtaagacataatattataattcaaatgcaactcatggcttctcattgtactctttctctagcttttgaattatttattctaataccagttttaattctgacacaaaagcatgggagttctaatcaaaatccaaccttttatcataaaaactatgaagaaattatgagtagaatttaaaaaggaaaataggcctattaattagatttgtctttgtagcatttaactctataataaataatattttatgcctatgagtccccarcaaagcctccagcttctatttagatataaactgtaaaagtcactact

SEQ ID NO: 24686 - DNA, 573 bp, Homo sapiens
aacatgaaaaactgaagtttaactgggcgcggtggatcacgcctgtaatcccagcactttgggaggctgaggcgggcggatcacctgaggtcaaaagttctagatcagcctggccaacatggtgaaaccccgtctctactaaaaatacaaaaattagttgggcatggtggtggacacctgtaatcccagctacttgggaggctgaggcaggaaaatcgcttgaaccyggaaggcggaggttgcagttacttctagaagaatttccattagccctttgaaatccttcaacattcatgaaggccaaagagttttcacctaatttaatctgatgggtatgtgaccagagtctttctagggaatagagactcccaaacagttcgactgggaagtgaggagagaatttattactcaaaaccaaagggaaatgaaaagaggccaacatagaatgtcattattctttcttggtggggaatggattccagagtcattctgtgacctttacatgacctccttattagcatctaaaagcttccagtgtaggatgcagccagctaggttctcttctaatgtaat

SEQ ID NO: 24687 - DNA, 905 bp, Homo sapiens
aggtgcagcccacattgtcttgaatctttgatccatgttggttcgagtcagatttttcttgttgcttgctaactaaagaatcccagctagcaaagcctgggccgactggccccattttagtgatgcagaaaactgaggcccacatggaggaagtcacttgtcaagcagaccaagccccaaggccctatcctctccctrctggggccacctccccaggctgccctcaccttggtaaacagccgccaccactgccagtgtctcagcttgaggtaggccgcgcagttccgctgcatcaccctcagggcgctctgctgctgctggcgcttctggaaggccctgggtggggaaatgggtgaggggcagagtgggagcctccaggcgccatccccttagcaagagagccaagctcctttcttatttattttctttgtttgtttgtttgtttttctgagacagagtcttgctctgttgcctaggctggagtgcaatggcatgatctgggctcactgcaacctccacctcccaggttcaagcaattctcctgcctcacctcccaagtagctaggattacaggtgcgtgccacaacactcggctaatttttgtatttttagtagagatggggttttgccatgttggccgggctgctctccaactccccacctcaagtgatctactcacctcggcctcccaaagtgctgagattacaggggtgggccaccatgcctgaccaagccaagctcctttcacttagtcagccatcataaaatgcctactgtgtgcaggcactcttattactttgagatctcactgtgttctggccgttcgtccccctgctcccgactctctctgcccagtcccaaagccccagccgcagttcaggccccaccctcccttgcctggatcc

SEQ ID NO: 24688 - DNA, 905 bp, Homo sapiens
aggtgcagcccacattgtcttgaatctttgatccatgttggttcgagtcagatttttcttgttgcttgctaactaaagaatcccagctagcaaagcctgggccgactggccccattttagtgatgcagaaaactgaggcccacatggaggaagtcacttgtcaagcagaccaagccccaaggccctatcctctccctactggggccacctccccaggctgccctcaccttggtaaacagccgccaccactgccagtgtctcagcttgaggtaggccgcgcagttccgctgcatcaccctcagggcgctctgctgctgctggcgcttctggaaggccctgggtggggaaatgggtgaggggcagagtgggagcctccaggcgccatccccttagcaagagagccaagctcctttcttatttattttctttgtttgtttgtttgtttttctgagacagagtcttgctctgttgcctaggctggagtgcaatggcatgatctggrctcactgcaacctccacctcccaggttcaagcaattctcctgcctcacctcccaagtagctaggattacaggtgcgtgccacaacactcggctaatttttgtatttttagtagagatggggttttgccatgttggccgggctgctctccaactccccacctcaagtgatctactcacctcggcctcccaaagtgctgagattacaggggtgggccaccatgcctgaccaagccaagctcctttcacttagtcagccatcataaaatgcctactgtgtgcaggcactcttattactttgagatctcactgtgttctggccgttcgtccccctgctcccgactctctctgcccagtcccaaagccccagccgcagttcaggccccaccctcccttgcctggatcc

SEQ ID NO: 24689 - DNA, 905 bp, Homo sapiens
aggtgcagcccacattgtcttgaatctttgatccatgttggttcgagtcagatttttcttgttgcttgctaactaaagaatcccagctagcaaagcctgggccgactggccccattttagtgatgcagaaaactgaggcccacatggaggaagtcacttgtcaagcagaccaagccccaaggccctatcctctccctactggggccacctccccaggctgccctcaccttggtaaacagccgccaccactgccagtgtctcagcttgaggtaggccgcgcagttccgctgcatcaccctcagggcgctctgctgctgctggcgcttctggaaggccctgggtggggaaatgggtgaggggcagagtgggagcctccaggcgccatccccttagcaagagagccaagctcctttcttatttattttctttgtttgtttgtttgtttttctgagacagagtcttgctctgttgcctaggctggagtgcaatggcatgatctgggctcactgcaacctccacctcccaggttcaagcaattctcctgcctcacctcccaagtagctaggattacaggtgcgtgccacaacactcggctaatttttgtatttttagtagagatggggttttgccatgttggccgggctgctctccaactccccacctcaagtgatctactcacctcggcctcccaaagtgctgagattacaggggtgggccaccatgcctgaccaagccaagctcctttcacttagtcagccatcataaaatgcctactgtgtgcaggcactcttattactttgagatctcactgtgttctggccgttcgtccccctgctccygactctctctgcccagtcccaaagccccagccgcagttcaggccccaccctcccttgcctggatcc

SEQ ID NO: 24690 - DNA, 537 bp, Homo sapiens
tccccccaacctgggcaccaaaccagggcccaagagggagagtacggccatcggggtcccggctagctgctgggagaggacgccgggctgcggcaggagggggtagcgagagaggggccacgctcacagctgcagcagtggtgcccaggccagcctgaggcccaaggagaggagacgcccaaacctgcaaggaggtaagmccgggctgcaaggcagcacctaggggcccctacagacaagaaatgcccaaggctagggccacctgggcaggatgagtcctcagtgggacggccgtccgtctcccatttcctgccccaaatccccagctcgtcggccatctcctcctagagagaggactgaaaggctctggggggagcaggagacctctccatactattcttgcaattccctgtgtctctataatttttttttttttttgagacagagtctcactctgtcgcccaggttggagtgcagcagtgcgatcttgactcactgcaacctccgccccccaggttcaaacgattctcctgcctc

SEQ ID NO: 24691 - DNA, 873 bp, Homo sapiens
catgcgtctgacagcagcgctgctgtctcttgtttttcgtggtccatgtttgggggttacatctgggcctgtcccttctctgtgtagcctgaaggcagttcccaggcttgtgtccctcacctctccgcagacgccctttccagatcctgttcaaatcctggccctactcacgggaacttgggtgagtcagttcccttcactgagccttcatgcctccctgttaaggagaagcttcactcggcatggcgtggcccgtcacactcatcctgcatctgttacaccaaatgcagtttcctcttctataaatgggagaaaatcacctgtccttgccaagggtccggtgggaattaaatgagctgagccagggcacgggtggagcttgctgagtgttaggtcgtgtgcctgctcttcttggcggagtctggccagatacctcatctggttccattgctgtcagtctctaaatggggcctttcctgcccagctcccagccctggtgctcacaccatcacaggccaaagaactggattccagacactgcctcctccactgtccccacagtgaaaatggggagggatgtccctgtggagccctaactgggacccagacagccctacccccagctcccaccccctccggctgtcccggaggccgtgctccgtggatctcctctccctcgcctccacgtgggctccaggtagctgcacacgcattacaaacatctcgttaatcttctcggaggtcctgcgaggcgaggcctgtggtagccctgcccttggagcactgagaattagtaaggaaatcgccgctgcrtctcccggtggcacaggggcgtggaggcgtggcgggccttccctcttgcaccactttgga

SEQ ID NO: 24692 - DNA, 773 bp, Homo sapiens
ggtcccccttcccacctgagcctccctcatcaaagtgcagtcagcagggacacgggtgaaagatgggagggacctgcaaaaattctcatttaggaggaaaaagaaaaatgggggatcggggaggcttccttagtcatttccagaaggtttagaaatgcaagcgagaattgctgcctgctgggaagggtctacaggcctggcccgcggaagaggccaacactcggcaaatgccacgactacctgggaatacatgtggggcagctggaatcgggcagacctgagtgtaaactcaagttggccactgcyggctgtgctgcttcaggcgattctgttgacctttctgtgctacataatgaaaattcttattttactgagtgcaggggctgggcggggcgtggtggtgagagcgaggatgagtatgatcatgggtagaatgcacttagctcagccctggctctcggggctgcctggggctggctggggtcagtgaaatctgctatcccaacatgtgagctctggcagtcccgacctgggaaaacattgtgtctgtgcccccaccttcagggaaatggaagaccagaggggtcatgtctggcccaagttcattttttgggaggctgagccagggatctgacacttagagctgtgttcccaccacagcctctcgtgggagaggctgggctgctgatgccagagtgggaacagaggtcagggctgtaagtagaggacaggcagcacagccgtgggctctggggagctgggcttgggggcaa

SEQ ID NO: 24693 - DNA, 606 bp, Homo sapiens
tattacacaattagtgttttcatttgataccatgtaatagtcatagtcaacatttattaagccctcggcatgtgccagtcactgttctgagtatgttacatttattattattattattatttttgagacaggatctcactctgtcacccaggctgsagtgcagtggcacgatcttggttcactgcaacctctacctcctgggttcaagagattctcatgcctcagcctcctgagtagctgggattacaggtgcctgcaaccatgcccagctaatttttgtatttttagtagacaaggggcttccccatgttgccaggctgctctggatctcctgaccacaagtgatccacccacctcagcctcccaaagtgctgggattataggtgtgagccactgcccttggcctgagtatgttacacttatcaattcattttatcctcacaattagcccatgaggtaggtactattaatatccccattttacagacaagcaaactgaggcacagagacattaactgatctgctcatgacttgacttcagagcaggcacatcttcttgctagctcaattagactgcttctttctttttaatgcccccataatatt

SEQ ID NO: 24694 - DNA, 731 bp, Homo sapiens
cttgagtccaggaggtcgaggctgcagtgagctgtgatcatgccactggcacgccagcctgggcaacagagcaagaccatgtctcaaaaaaaaagaaaaaatatatatatattagtgttaaggatcaactattagaaacaccataggtgtatactccttacgtaagaaaaaagatgaacagcacaaaagtacaagttgtataacattttaaaaattaaagttcccttttttggctacgactcactctcctttccattgcctagaaaaccaccttattgtttacttgtttgtttgktttttttttatttttttaaaaaagtgcatatttgtatatatgtcagtgtattattctctgatttgctttctatttattcttattttattatcatcatcattattattttgagacagagttttgctgtgtcgcccaggctagattgcggtgacgcgatcatggctcaccgcaggctcaacattgcaggcccaagcaatcctcccacctcaacctcccaagtagatgggaccacaggcatgtgccaccacgccctgctaatttttttatttttttgaagagatgaggtcttcctatgttgcctaggctggtctcatacttctgaactcaagcaatcctcccacctcggccccctgcaaagtgctgggattataggcatcagccactgtgccagctgctttctggggaaaaataaaaaaaaaaaaatatatatatatat

SEQ ID NO: 24695 - DNA, 535 bp, Homo sapiens
tttaattctgccatttgctcatataaagcttagtaaaacatttatttttatgtactttagatttcttatctagaaaatgttaataatagcacatcccccaaagatatggaagtattaatatgtatcgtgtgcttaaagtactatytgatacataataagcactgaataaatattagttattattataggatggaaagagtatcttaccctcaattttctaagagttcattcacatatagatatcactacaattttgactctaaaaccagggccttttgttttcctgtatactagcactttctgactaatcttgctcagattatttaacttcaatttcctttctgctggattcaggggggacaataaataatgttcctgtctcttccaccactagataaataagacactggagtccaagaaatggaaatctagataataaccttattactgataatcatgaattggggaatgtggctgagatctgtggccaaataggtcttccaacactatctccactgcattagaccaactatcc

SEQ ID NO: 24696 - DNA, 923 bp, Homo sapiens
ctgagtacctggcagagagtgtgtaggaggaatccccaaagtttgcctgcaatggaccagagttcttgatccctaaatgcccttggtgcttttggctcacaaagcaccccctcctcccaggcacttctgggccaaagccagaggagcccaggggagaggtcacaggtcctatattccaggctgtctctgtgaacacgctttgctgtgtgattctgggcaagttacatcccctctccgagtccctggttcccagtcggtaaatacataaattgcaggcgtggcctctgttggtggctacgatctctgaaatgagtgctggggcctaaggaccccctgctcacaccctgtttttgtgcaatgctgggaaggaagggagttgccttggttcctgttcagggcctgcacctgggaaggaaggaaggtctaaccattgcaggcaaattacatgaagactggaggttttagtatgtcctcatgtgaccttcttattagtgtggactcgtgacctggtgctgtgagggtccacactcgccctaccagtgtccccgtgggaggggagtgyagcattaaatagtaaatagaaaacaataacaagttgacaggagaccctgaaagaaaggagacactttgttcctgctttctgcacaagagaccctgcattttcattttgtcctgggtaccacccctcccttatcaggtggagaaaaggaggcccagctccagccagaaagcactcctcagatccatcacagaccgagggacccactgggtgcccatctcagctctgtcaccaacatgtctcataaccttgggctagaccttgattctctctaggactctgtttccccatctccaccatgaggacttgcaaggggtgctctctgaccatcttgggttcagtgggttccgtcatctggaaccag

SEQ ID NO: 24697 - DNA, 564 bp, Homo sapiens
tcgtccaggaggcggtgttgatgcggcaaagggcaacaggaagggcattaggacttgaaatcggagacgcacgcaggggagggagtcagtgtcggaacctggtaggccctgggagaactccggcttttcgtctgcgtgagctggagaagagccgaaggtttctgcgcacagcacggacctgcgtgcctcagctttaaggaaatcaccgtggccgccgctgtgaacgcagagaagggcgcgagcgtgggagcaggaacccaaggcggtgggaaacggtggggctttctgagtgtattggaaagtagagcccacagatctgctgcagaccagaaaggggcgcgagaaagagcggacagaggcagacgccggggctggcggcgatggagcagcagtcggaggacgcggaaggcctgcgagagtcgcccgcggcccagygccggccttcgggtcccaccttgcgggtgatgttgtgcacgtaggggcacgtgttgcaggcgaagcggtggcagcgttgtccctcctccacgatcagcccgttcccgcagccggggcagaacagcagca

SEQ ID NO: 24698 - DNA, 617 bp, Homo sapiens
tcttttcctagtccatgatttgactttttactttttgtaaatttcagtgtaattaaattcgtcaattttgtgtggtgtgtgttttccattcttaatttgacagatacttactgagcatctactgtttcagggactattttgggtacttgggataggtcataaacaaaatacacagtatttctagagttcatattctagaagctcaagaaatattcataaaaatattcacatgtatttttccctgaaagtgtttaagttttgctttttcagttttagatcatgaatttacctcgaattaatctttgtatatgatgcgaagtaagaaatgtttttttttcctatatgagtaaccagttatccaggcaccgtttattgattaacacattgtttcttcactgttttgtagtgacacctctgttagataycaagtttctgcatttgtgtgggtttgtttctgtgtctgttttgtttattggtacacttctctgtccttgcatctgtattacactcttaattactatggttctataataagccttgatatcataggtcttcctactttgtttttcttcaaaatggtttgacctgtttttagttcctgcctttttttttttttt

SEQ ID NO: 24699 - DNA, 657 bp, Homo sapiens
taccaaagaatacctgaaacacaagttaaaaggcataataatgagtcatctatgaactgtgagcccactggtcaatttaagaaatggaacattatcaataccgctgaagcactggtatgtttccatttccctgctccataggtaaccattaggttgaatttgataattttgctcattctctarcataattttagtttttcatatatatttgtactcccaaacctttttttagcttgtagagaatatttttaaaagtattttaatatttataaaagtgatacatcttgtatacaggttattttatatgcagttttaagtagctgtgcaaatacttttttggtaaaataaagacctgttttaatccttttctaccaacagttcttgccgctgacttatgtgggcatttacctttatattttaaataatgatcatatactgccattccttgattttgtttaagtagctttattaggatatattgtatatactataaaattcacccactcttatgggaaaattcaatgatttattttattttattttactttaagttttgggatacatgcgcagaatgtgcaggtctattacataggtgtacgtgtgccatggtggtttgctgcacctatctaacccatcatccaggttttaagccccgcg

SEQ ID NO: 24700 - DNA, 657 bp, Homo sapiens
taccaaagaatacctgaaacacaagttaaaaggcataataatgagtcatctatgaactgtgagcccactggtcaatttaagaaatggaacattatcaataccgctgaagcactggtatgtttccatttccctgctccataggtaaccattaggttgaatttgataattttgctcattctctagcataattttagtttttcatatatatttgtactcccaaacctttttttagcttgtagagaatatttttaaaagtattttaatatttataaaagtgatacatcttgtatacaggttattttatatgcagttttaagtagctgtgcmaatacttttttggtaaaataaagacctgttttaatccttttctaccaacagttcttgccgctgacttatgtgggcatttacctttatattttaaataatgatcatatactgccattccttgattttgtttaagtagctttattaggatatattgtatatactataaaattcacccactcttatgggaaaattcaatgatttattttattttattttactttaagttttgggatacatgcgcagaatgtgcaggtctattacataggtgtacgtgtgccatggtggtttgctgcacctatctaacccatcatccaggttttaagccccgcg

SEQ ID NO: 24701 - DNA, 657 bp, Homo sapiens
taccaaagaatacctgaaacacaagttaaaaggcataataatgagtcatctatgaactgtgagcccactggtcaatttaagaaatggaacattatcaataccgctgaagcactggtatgtttccatttccctgctccataggtaaccattaggttgaatttgataattttgctcattctctagcataattttagtttttcatatatatttgtactcccaaacctttttttagcttgtagagaatatttttaaaagtattttaatatttataaaagtgatacatcttgtatacaggttattttatatgcagttttaagtagctgtgcaaatacttttttggtaaaataaagaccygttttaatccttttctaccaacagttcttgccgctgacttatgtgggcatttacctttatattttaaataatgatcatatactgccattccttgattttgtttaagtagctttattaggatatattgtatatactataaaattcacccactcttatgggaaaattcaatgatttattttattttattttactttaagttttgggatacatgcgcagaatgtgcaggtctattacataggtgtacgtgtgccatggtggtttgctgcacctatctaacccatcatccaggttttaagccccgcg

SEQ ID NO: 24702 - DNA, 657 bp, Homo sapiens
taccaaagaatacctgaaacacaagttaaaaggcataataatgagtcatctatgaactgtgagcccactggtcaatttaagaaatggaacattatcaataccgctgaagcactggtatgtttccatttccctgctccataggtaaccattaggttgaatttgataattttgctcattctctagcataattttagtttttcatatatatttgtactcccaaacctttttttagcttgtagagaatatttttaaaagtattttaatatttataaaagtgatacatcttgtatacaggttattttatatgcagttttaagtagctgtgcaaatacttttttggtaaaataaagacctgttttaatccttttctaccaacagttcttgccgctgacttatgtgggcatttacctttatattttaaataatgatcatatactgccattccttgattttgtttaagtagctttattaggatatattgtatatactataaaattcacccactcttatgggaaaattcaatgatttattttattttattttactttaagttttgggatacatgygcagaatgtgcaggtctattacataggtgtacgtgtgccatggtggtttgctgcacctatctaacccatcatccaggttttaagccccgcg

SEQ ID NO: 24703 - DNA, 1147 bp, Homo sapiens
aatgtccacagtagtctatggccttctggcaaccccagccagcagggtagagtatcaaaccgaggataaggaatagacctgcagaacaaaagagaaaacagattagaaaatccccatggtgctacaactgtccagatctgttgtaattgttacttgatttgcttgctttgggcaagggcatctattctgcaatagaaagtgttgggactgtttcatgcaaactaatctgacctgatcaagaagtatcacattattagaaatattttcagccacttttttacatgttggaatgtgaatccactaaaaatttctcttctagaaaagcaaattggtacttttcttcttcttaagacagagtctcaatctgttgcccaggcaggagtgcagtggtgcagttgtagctcactgcacttgaactcctgggctcaagctatcctcctgtctcagcctcccaagtagctcggattacaggcacacaccaccacacctggctaagtttttaagtagagatgaggtcttgctatgttgcccaggctggtctcaaactcctaagctcaagtgatcctcccacctcggcctccaccacgagtggccaacttgttactatgtattcccacagggcttttggtgcactgagcatttctcttttrgtctaaggcagatgttggtaaactaaggccctcaagccaaatgttaactttataagtaaagttttattggaacacagctgtggccattcatttttggatgcctacgactgctttgctatggtctgcaaaatctaaaatgtttactctaaaatgtttactgtctggctttctgcagaaagagtttgccaactcctggtctaaggaaattcacacagaaccatctgatgtcaacctgattaaatgcaagagcaagggccacgagggagaccaggtctttacctgattgttagtgctttaagtaagccagatgtttctgtatttatatacacatttacaaacaaattgcaaactttgtaaggactttctgtctgcgtacttttaagagagtggacactaataagctttacttccattttgctgaccctactaccttgtcattttaaacacctattttcctgttcttcacagcattactgctcactatataaccagaatgc

SEQ ID NO: 24704 - DNA, 600 bp, Homo sapiens
ccattgtttcatatattttatcaagttttatagttgtctaaggcaggagggtaaatctagtctctatatggagttcctgcacattcaagcttgagaaacaatcttagaagacttcattagcctcattgtgtccaccaagttctatccaaacttgytcagagatggagtcatcccctaagattttatgagacccaatacaatttttttttcgtaatttcttctcagatgccaccctttttctgaaaagaggtttctgatgccttctacgctagagttgatgtactcttggtaaaccaagatttatgagatcactgataagttcagtatccgtctctggagaacccaaataccttaataatatatatcactgacattgttttctattgaaaagatctgggagataataaaagtgatattctaaagcaattagttgaggcaacagaaaaaacaaaaacataaaaaaagccattaggcaaatgttgaccatttgaagccattctgctttgaaattaggtcagataataggaaaagggtggaactctggaaattttctgcccatcaccaatttgaatattagaccaattcattattcatagaaat

SEQ ID NO: 24705 - DNA, 562 bp, Homo sapiens
gcatttctaacacccagaaagatcttacataaacagatatttgattgatgacaaaaggggtactacagagcagcggggaaaataatggttttcaatacattatcctgagtcaattaaaagcccttaacaaaatggatctagactcttatatcataccatacatacaaataaattccagtaaagcttctatcagattgtagargggaatttcttcatgaccttcaagtagaacaaattttagataggacacaaaaagatttcttaccacaaaggaaagaaagataatttgaaccaccttcaaattaggacttctttttttttcatcagaagatcttgtgaaagcgcgaaaagacaaatctacaatggcaaagatgattttaataaatataactgaaaggctggagttttgtatgtgtgtgtgtatttatatatctctatctctctatatatcccctacaaatcagtaagaaaaatgcacaagaaagctaagaaaattgcacaagatacttaacatataatttacaaaataaaacattcaaaaggcttatgaaaaggtgcttaa

SEQ ID NO: 24706 - DNA, 637 bp, Homo sapiens
  misc_feature (1)...(637): n = A,T,C or G
gggatccccatgttagcttttagtttcattcctttgaacccctaagaaactcttctctattcctatcactatccaaagcctgtaaaagttggtcttacagtacactgttggtttgggaaaaaatcttttagaattcttggacctttgaagggagtatgtgtagtataggttttctttttccctcttggttttgagagaaagctaaaaagatagggaatgggtagaaattaaacaatggcttcaataaacggggaaaacaaaagtgaaaacaaaaacactaaaaaatagaaaaaacaaaagtctgcaaacagcttccatgtctgcttctctgtttcttagtgtttgtaacatttgagtcaaaacaaacctgtgggttcagtgtttctctgagcaggtaggaggttgtcagcctaaaagagtcagattgaagctttcattcatgaaccttcacatctgatcaactttcccaatctcaattcatcagctaaactgttcactatgcagaaaatccttygctctgaagccttagggannnnnnnnnnnnnnnnnnnnnnnnnnnnnnnnnnnnnnnnnnnnnnnnnnnnnnnnnnnnnnnnnnnnnnnnnnnnnnnnnnnnnnnnnnnnnnnnnnnntatag

SEQ ID NO: 24707 - DNA, 561 bp, Homo sapiens
tggaggctccagggcagccaatattgtatcgtcaaatacattctttttttttttttctttttggagacggagtttcgctcttgttgcccaggctggagtgcaatggcgagatctcagcttactgcaaccttcgcctcccaggttcaagcgattctcctacctcagcctcctgagtagctgggattacaggtgcctgccagcacgcccggctaatttttgtgtttttagtagagacagggcttcaccatcttggccaggctggtcttgaactcctgacctcaggtgacctgcccacctgagcctcccaaagtgytgggattacaggcgtgagccaccgcacccggccatcagatacattctttaggcctttctgtgtgagtgtagaacactccacatacctgatggccttcaggtcatgggtcagctttttagcagtctctggagtgataggcttctgtttgttcttggcaagtttctcaatagtagaggggtcatctctgagatcagtttgggtcccaacaagcaagaaaggagtctttgggacagttaggcacccacttt

SEQ ID NO: 24708 - DNA, 801 bp, Homo sapiens
atagctttctcatttgatggtgagtggggggagtttcttattcatcttaagcagtctcctcacggtctctgttctcctgagactggcaaatgatcatcagaaaccgtcctggccttggcaatgatgccggcctcactaaacaagctatatcgcagcagtgtaattgccagttaaagagcacttcgtcctaattaacctcttcagggaatgagtaaaagcatcaagaattccagagttcacagaacctgtgcacaagcccttgtcatgcaaatgaagaaattgagtcttggggtgagcaggacccgaggtccctcagctgaccagtgcagsactcggaccagaatctggacttctagactgactcctgaagccctggtttactccatcagccagtgggaactgtcaatattctcctagctctttatgccttcaaatatgtctgtcaaagacatattagttgagcatgtattacatgctcagcactgtgctgggtgctagggtcatgggggagacggagcagcttgttattctctcaactgtctactgagcacctctcacgggacacacacactgagggccctgaggaaagcacgactttaacagatgaacagctttgatacctagcactgtgattttctaactacaatgagacattgatacttatcacacacagttattggacatactaaatgccatgatatttatgaggcctacggtaaatgatcaatacactgtggctatttttattctcttcactatacagctggggagatgaagcaattcatgaaaccaagggggtag

SEQ ID NO: 24709 - DNA, 1144 bp, Homo sapiens
gtttaaaaaaaaaaaaaaatcctaagatcttaagtatgtgcacacacacaaactccttcatgcatgtatgcacacatgggctcttaccataatgtgagacttcacttttcccttctgaattatgaaagtacctcccattcctataggcttatttccataatgtttttccagggtctctctcatacaagtcacaaagttaagtggtccagttcttcttttggctttcacctcaattacctatagaggacataaagatgcataccattgactatgctgcaaaataactactgaaataaaacattatataatttaattctatcaagcaaatattctgttctttgcttagagcccccagatctgagttgagatgttgcaatcccgtgaattttgatcagtcatatatatatgtatrcacacacacacacacatacttatcagttacatgtaatttactagtaagtcttaagcatgctttcttgaactgagaaactgagaaagacaagtttctcagtgcagagagtctagagactcttaacatacgtgtcgaggcagtcaaagattgagaattacctttggtaattctttggttaaaggaattaacctttggtaagtggggatgaggagaaaatgattacattttctcacttcccttaaaattctgtattatctccacaacttggacgttaagtattttcacttctcaatctcttatctcaaagtagctgaagaggctatctctacttccaaaactggagagtcttcacaaaagctaacactgaaatcatatttttgtgtactaataggaagtaaatatcaagtaaggcattagttttccttactttgttcttgctgtaagtttttgctaccaccatttctatctagagcaatgtgtgattcatcagaaagaagcaaataacctatttactacctgtaagtaggcattatttattttagctgtatggttcatgtagatgacaaactcactccccaaattaatattctattaccttttagttctcagaaaaaggtcttgcttactaagtagtcttttttttttttttttaagacaggtcttgctgtcacctaggtaggagtgcagtggtgtgatcatagctcgttgcggcctcaaacacctgggcacaag

SEQ ID NO: 24710 - DNA, 1144 bp, Homo sapiens
gtttaaaaaaaaaaaaaaatcctaagatcttaagtatgtgcacacacacaaactccttcatgcatgtatgcacacatgggctcttaccataatgtgagacttcacttttcccttctgaattatgaaagtacctcccattcctataggcttatttccataatgtttttccagggtctctctcatacaagtcacaaagttaagtggtccagttcttcttttggctttcacctcaattacctatagaggacataaagatgcataccattgactatgctgcaaaataactactgaaataaaacattatataatttaattctatcaagcaaatattctgttctttgcttagagcccccagatctgagttgagatgttgcaatcccgtgaattttgatcagtcatatatatatgtatgcacacacacacacacatacttatcagttacatgtaatttactagtaagtcttaagcatgctttcttgaactgagaaactgagaaagasaagtttctcagtgcagagagtctagagactcttaacatacgtgtcgaggcagtcaaagattgagaattacctttggtaattctttggttaaaggaattaacctttggtaagtggggatgaggagaaaatgattacattttctcacttcccttaaaattctgtattatctccacaacttggacgttaagtattttcacttctcaatctcttatctcaaagtagctgaagaggctatctctacttccaaaactggagagtcttcacaaaagctaacactgaaatcatatttttgtgtactaataggaagtaaatatcaagtaaggcattagttttccttactttgttcttgctgtaagtttttgctaccaccatttctatctagagcaatgtgtgattcatcagaaagaagcaaataacctatttactacctgtaagtaggcattatttattttagctgtatggttcatgtagatgacaaactcactccccaaattaatattctattaccttttagttctcagaaaaaggtcttgcttactaagtagtcttttttttttttttttaagacaggtcttgctgtcacctaggtaggagtgcagtggtgtgatcatagctcgttgcggcctcaaacacctgggcacaag

SEQ ID NO: 24711 - DNA, 547 bp, Homo sapiens
tgagatgatgaaaagacgtccaaatatatattaaatcacaacaaggctgggcacagtggctcatgcctataatcccaacactttgggaggctgaggcgggtggatcacctgaggtcgggagttygagaccagcctgatcaacatggacaaaccccgtctctactaaaaatacaaaattagccaggtgtggtggcgcatgcctgtaatcccagctgctcaggaggctgaggcaggagaatcacttgaatccaggaggcggaggttgtggtgagctgagatcgtgccattgcactctagcctgggcaatgagagcaaaactctgtctcaaaaaaaaaaaaatcacaattaatgtatgtgacttcttaaagaatcataagtggcactcataataagagaaatgcaaatgcaaactcatctaagatactatttctcactgcaaactgaaaaagatccaaaaacttgaaactctgctggtgaggctatgggcaaacaggcagtctcctagattcccatgagactcccagatgatacaggacccacagcacct

SEQ ID NO: 24712 - DNA, 547 bp, Homo sapiens
tgagatgatgaaaagacgtccaaatatatattaaatcacaacaaggctgggcacagtggctcatgcctataatcccaacactttgggaggctgaggcgggtggatcacctgaggtcgggagttcgagaccagcctgatcaacatggacaaaccccgtctctactaaaaatacaaaattagccaggtgtggtggygcatgcctgtaatcccagctgctcaggaggctgaggcaggagaatcacttgaatccaggaggcggaggttgtggtgagctgagatcgtgccattgcactctagcctgggcaatgagagcaaaactctgtctcaaaaaaaaaaaaatcacaattaatgtatgtgacttcttaaagaatcataagtggcactcataataagagaaatgcaaatgcaaactcatctaagatactatttctcactgcaaactgaaaaagatccaaaaacttgaaactctgctggtgaggctatgggcaaacaggcagtctcctagattcccatgagactcccagatgatacaggacccacagcacct

SEQ ID NO: 24713 - DNA, 1070 bp, Homo sapiens
caatgcagaggagccctggtggacgcatttatagtgcagcgatgaatagaagacagtgatagtcttatactggagttgaaatgtgataaacatttatacactgtgtttataagtcgtgtaactctggccaatttatctggtctttctaagctcactttcctcgtctgtaaaatgggaagaataatcatacttattgcgctggttgttatggggattaagcaagataattctctaaagctttggcacttggcgctgaaagtagccattccatgtcttctttcccgccccgcctcttgtgctccccaccgctttcgtgatgtccgcagttgcccacctgcctctacaataaaaaacgcatccctcctcctgcagggtccaccgcaccgggaagccctgtctgtatcagttaccaaccacaattgcagtgagtacgaatcgtggctttcccacagtcaggaaaggcaagggagaccgacgacccgcttctctaggagtaagtaaagattaaaggtagttcgcggtatagcctaggcagggattaacccgtggtcccagcgctcctgctatttgcattccaaagcagacacctcatgcgctcaaccccgcccgcaggcggctcccgcagtctaagggacctggcgcgagtccgggaagcggagggcgcagctgcgcagggaagggggccgggggcgggaccagggcgcgcgttccggtcccggggcgtggcctcccgcaggtgagtacgctgctccttcggtttccctgaaacctaacccgccctggggaggcgcgcagcagaggctccgattcggggcaggtgagaggctgactttctctcggtgcgtccagtggagctctgagtttcgaatcggyggcggcggattccccgcgcgcccggcgtcggggcttccaggaggatgcggagccccagcgcggcgtggctgctgggggccgccatcctgctagcagcctctctctcctgcagtggcaccatccaaggtgagaaacctggccaaggagggctcttatctctgaggagctggggtcctgggcacgctgggcagacggtg

SEQ ID NO: 24714 - DNA, 655 bp, Homo sapiens
aataacacaaaacttacaaagaaaaactaaatagtttttggtgactaagatgtactttgcatctatatctgggtacttactatctgatttttgtgccatatgtattctcttccctttagaaaacgttaaaatttgtyggtttcccaacactgcccttccactcttctgtattaatacaagtgtgtcttaaaacaccatgtgctagtacacatacttgaaaaactagaggaggtgcaccagtatttgaccacagtcctacagaacatttcagttataaacctcttcaatcttagagaagttgatgctacagtaaataatgctaaaataagacttcagtaatcaaaaacatttttcaataacaaaagtaaaatgcacacacacacactgaagcaaatatcgagtgtttcattgtcagaaagtacattgtacttacaagtcatttcccctgcaagagtaaaagacaatgaacagtgaaaaagactacctcctgctttgataattgtgccattttgacactcttctatttcaataagaaaaactatgtaaaaaaggtgattggtgtgaactgtccagagcaaaacaattcttaatgtagatgactaaagtaaggcactgaaaaatcagacatcaagaggaatgaagaattccttatgca

SEQ ID NO: 24715 - DNA, 1009 bp, Homo sapiens
tactggttttctgttcattcttttgtttctgatacctgttgattactactgccttttttgaggtcgactatgtacttatcattttaaagtttttgttgttgttgtttgtttgtttgttttttaaaaaggcagagtcttactcggtcacccaggctggagtgcagtggtacaatctcggctcgctgtcacctctgcctccgggattcaagcaattctccacctcagcctcccaagtagctgagattacaggcgcccgccaccacgcccggttaatttttgtatttctagtagagatggggtttcaccatcttggccaggctgatctttaactcctgacctcatgatccacccgcctcggcctcccaaagtgctgggattacaggcgtgagccaccgcgcctggcttaaagttttttttatatagaatttctaagtgcttgtaacaggaggttttcaactttgacttagtttgcaatctttctagaattggaccccattcacttaccgctcattaccgttgaacttcagctctcacaatatacaaaatgagctcccaatttcccactctgatagctctttttcaaatgttatcagacacggccatactgcaggatttaacacggtaattattctttttttttgaaattttctcctctcatgaagtcagagaaaccactcttacataattcttgtatctcacttttctttttcttccttttytttgggggggtgttggggggctatctccctctcttacctacgtaatgttgacactcttttcattttacctacacttatctgtctttaattttgacatttatactgagatcttccaatcagtatcttcaatccagacccctgccctaagtatgtctaactgcctcctggtcatctccccttgaatgtctcataagatgttcaaactcaaaatgtccaaaggtgatccttaattattcatgatccctatatcaaacctcctgctcttttgcccttgccagcctcttcagtta

SEQ ID NO: 24716 - DNA, 541 bp, Homo sapiens
gcttgccattctctcatttggagtacaaaagtaatataaatttttgttagcttctcaagtttattctttcacagaattctatttaaccagaccgggtgcggtggctcatgcctgtaatcccagcactttgggaggccgaggcgggctgaacacctgagatcaggagttcaagaccagcctggccaacatggcgaaaccccaaaaatacaaaaattagccaggcatagtggtgcgcacctcccagctactcaggaggctggggcaggagaatcatttgaacccaggaggtggaggttgcagtgagccgagattgcaccactgcactccagcctgggtgacaaagcgaaccctatctcaaaaaaaaaaaaaaaaaaagaaagaattatatttaactagaatttatttactccyagattttgttcagtattagattttaatactctatagcttagcaattgttttaacacaatagataacccctgccagtagacttgtactcaactgaatggagcttggacacaaaataaatgttataagagag

SEQ ID NO: 24717 - DNA, 615 bp, Homo sapiens
tcccaacatgctgggactacaggcgtgtgtcaccccagccagtcaacaatttacttttaaaggcacaatgttatactggagagcaaaaccagctgtgttgtgtataagtaacagacttttctatttcttctatttggccgtttgcattktgctcacctggggcccttcacaacttattataagttttttacaaatgtattttgatcagtatgtttttgttaaattcatatgtccaggaagaaattacagcttgtggtattttcctgtgtcatcttgcttatgtagtttgtataaaactatacaaactgcatatatatatttatatttatctgagtctaccaattgaagtaatgtgtttttattgtttctttcagtaatgtgttctcattttgcccaagacctttggccagagcagagcatgaaagattctttccaaaaagtggtactgagaagatatgaaaaatgtgaacatgacaatttacagttaaaaaaaggatgtataagtgtggatgagtgtaaggtgcacaaagaaggttataatgaacttaaccaatgtttgacaactaccccaagaaaaatatgtcaatgtgataaatatgtgaaagtccttcatca

SEQ ID NO: 24718 - DNA, 615 bp, Homo sapiens
tcccaacatgctgggactacaggcgtgtgtcaccccagccagtcaacaatttacttttaaaggcacaatgttatactggagagcaaaaccagctgtgttgtgtataagtaacagacttttctatttcttctatttggccgtttgcattgtgctcacctggggcccttcacaacttattataagttttttacaaatgtattttgatcagtatgtttttgttaaattcatatgtccaggaagaaattacagcttgtggtattttcctgtgtcatcttgcttatgtagtttgtataaaactatacaaactgcatatatwtatttatatttatctgagtctaccaattgaagtaatgtgtttttattgtttctttcagtaatgtgttctcattttgcccaagacctttggccagagcagagcatgaaagattctttccaaaaagtggtactgagaagatatgaaaaatgtgaacatgacaatttacagttaaaaaaaggatgtataagtgtggatgagtgtaaggtgcacaaagaaggttataatgaacttaaccaatgtttgacaactaccccaagaaaaatatgtcaatgtgataaatatgtgaaagtccttcatca

SEQ ID NO: 24719 - DNA, 1954 bp, Homo sapiens
aaataattctttaaaagtttaagtatataaacaatagaaaaataatgtaatgactattatgactaatagtaagagatactaactctgtagtatctcttccattttaaataactctgaagtaaggagaaactgggagaggctgacttgaaaataagtgtctaaagactgtcccctgacagtgwaacttttagataagcccatcatggagctgataatagctaagcagccacctcaagagcagagggctcccaggccagcaggacgtgacgttaacctggttgcaactattaacacctctaaaaaaaaagaatgtgttactcagaagggggattattcaaatacaaaagtgcaaaatagagaggactgcagcattaaatattatataagtgcctttaacctctttccaagagagcaggtgctcagatactgaccatggacttattttttttatttagtcggaatgttaaagctatacctaatgtaaagataaatgctttatgtgacagaattggttgcctgcttacccaatgtgccctggttgatgtctgtgatgtgaattggtgggaccccatcccctgccattttattggggcgtgctgctaatgcatgagctgctataacatgaattttgtttttatttggtttgaccaaggcccagtcgttcccctgttcatttgcctccaccggatacccagcagtgataatccacttgtgttagtaaattttcccactgctgtaaagacactgagactgggtcatttgaaaacaaaggaggtttaattgattcacagttccacatgtcttgggaggcctcaggaaacttacaatcatggcggaaggggaagcaggcacctccttcacaaggcaggaggagagaaggagaacaggagaaactgccacttataaaaccatcagatcttgtgggaactcactcactatcatgagaatagcatgggagaaaccgcctccatgatcgaatcacctcccagcaggtttctcccctgacacttggggattacaattttgattacgatttgagataagatttgggtggggacacagacgcaccatatcaccacctatctccaaactgggtcagttatcctatagatttcagctatagaactgtaggcactcccctctgtttgtcccaccttgtaaaccttcttgtgggcttgccttccaccaccagctatcgccacatttccccaaaatgcaggacaagttctagattctttatatcgcccatgtgctgagaatggctgggaagtgctaacttcctccctttctgccttcccaaattgttgctgaacaccctgtgagatcatcatctccttctgccccaaatagaaacggaaacaaatggcccttttccatctgcgttcatctattattttttcacactctaacaacacttggttttctggccttccctacatttgcatatcattttcttccaaaacttcctcagccttggagaagttggtattccactatatttagaacataaaaaaataaaaacacataaactaatgaaaaacactgtgatctaagccaccaagcttgacttttgatatacaaactaggagctaatggggtctaaaaaattattacatctctgaaaaaatcctcaattctaaatcctagaaactacaagacatggaattctacctttttatttctcagaaaacagtcctcacctactatcttccaatcactaaggagataattatgtacataaaagtgaagaggggggactgctggatcatatggtcattctatttgcaattttttgagaaattcatatttttttcatagtggtttcacccattcgcattcctaccaacagtgtcccagggttctctttttccacatcttcctaatatttattatctttgtttttttattaatagccattctagctggagtgagttgacagcagattaaatgttta

SEQ ID NO: 24720 - DNA, 556 bp, Homo sapiens
ccgtggctccacagtacaggctgggtcctcacaggaaaggcatatgcatttggtaaacaggggaatattggggaagccatgggaaagtgatkttcacttctctgtgatacttcccagcacagaaatgatttgaagcaatcagagacgagctgtctcactagcaaagaggacgtcttcgcaatacgtgaagaccttcagaacaaaaccgaaagtcttacaaaagggccttccgtggtgcaaatagtggctggttagggacttcaagatctgccacactctccacttccagaccccaggatctggccgctgccttcccctccacctgcccttgtatttttctccaccactctggcctcctcttagagaatcccacgtgggattcagatccacctggagccaaagcatatgttccccctctccctgaatccctattgctcagctctttctgtggctcactccttcctgctcttcaggtctcacccatcacctccttaaacccacctacattagtgtcctgtaagctgctgttcaaatgaccacaaatgtagtggcttaa

SEQ ID NO: 24721 - DNA, 599 bp, Homo sapiens
cgggggcaagacaattttcttgatcttaagaagtttacagacccacagggtggaaagagacaggcaagaggcagttccacagattctcaccagagctcggctaggtgatggtggtctgcagaaggaacgccttgccctgaagaaggaacgccttaccctggcttacttctctgggcaaagaaatgctcaagtgaactccaggaaaggaggagatggagtaaatgaaaarggacaggagaagagaaaaggggggaggaaagcagaagaggagtagggtaaagagagaggggaaaggggaggtggaggggagaatagacaggaggagggaactggatgcagaaggaaggagaaccagccaacaaacggagagactcctcaggaggagggcacagatgtttccttagcgaagacttgatagactctagtttctgcctgcttcctcagcttcgaattggggtatgaaccagaatagaacaaactggacaaaactagacagaaccccccaaaatttccatcagctctgcaacaatgccacagggtcagcctctagacatggaaccccagtttggcttatgaccccctcatcacaatacaaagat

SEQ ID NO: 24722 - DNA, 1164 bp, Homo sapiens
ccctgaagtcaggagttcgagaccagcctggccaacagggtgaaaccccatctctactaaaaatacaaaaactagtcaggtgtggtggcaggcacctataatcccagctactctggctggggcaggagaatcccttgaacctaggaggtagaggttgcagtgagccaagatcatatcactgcacttcagcctgggtgacacagcaagactcaatctcaaaaaaaaaaaaaaaaaaaactaataggcaatggaatagaaagcaaagtttgcaaaatgttttaatatatataagatcaaatatatattttgaacaatccggcagcttcatgctgcacttccacatccccagaggtatgcattcactctcttctttcagtatgagaagcactgataaaagagtacttaaatcagaagaacagctttgaagtcagttctgcatttgaatactggcccaattacaagttgcatgattccaggcaaattacttcaactcttgaagttcacctatacaataaaatcatgctaagcttgtgatgatgcttaaatgaaataatacatgtaaaatagttagcaaatattaaataaatggtagttatcattagttcaactacattgaaatgtaacaacaaaatataaatcgtagcatccgcttaattaaatccaaacaatcacatgtttttaaagtcatttccaatttcttcttccaagctcttttgattcacacagggaaaaaaatgacataggcctctatctgaatttatgtagcttcatatgctataaatacagttgcaacttatttcaaaccaaagaatacaatctttcaaccaatttccagcaagcaacattagaaaacttagtcaacattcaattagatgtgtttcagtaagagtgtgtgtgtgtgtgtgtgtgtgtgtgtgtgtgtgtgtaaaatacattataaaacaaggttgctttaacactggaaaaagatgtggagtgttttgtgaaataaattactctgcacagatgacatataacatgcaaaatcagaacttccctacaatgagaaagtagtcaagaatttataatgcgatggacaagctataaccaagagtagtaataatgtgggaatcttttataaacctgaaggttytatttgagcaaaattttccatcaatatatata

SEQ ID NO: 24723 - DNA, 1191 bp, Homo sapiens
ttacataattgtaactgttgattgaaatatcagatgcactctatctcactcatgctaaaccagaagccagcaatcactcaagataggtgttatgcttgatctcgaggaatatttttattgaaatattaattgatggtctttacaatcccaacatttcctattattttctgttatctctctccttttcttcaatctgagaactggctaaactatatggcatccatatctcagggcatggttgtttcagcagaaaagtctttaaggwctcaaatccttggatgtttgagttgcaaatgtccaagggactcagaatttagaagaaaaaatcttaaagtgccagaaaaatatttcccaacctcttggagagcataacatatccccagactgcagggagggagaaaggagcgtgaagggaagcaggagggggtggacgccgtaaacccctaaggaaagatgagccaatatcctgcccctaccatttattcaaaaggaagggcagcaaatgccactctggcatagcagagtaaagtatattgaaccaactgtcctacagatgaactcgggacaaaatctaaaacccaactctgaaggcagtggtggacaactacaaataggcaggtactaggagggaggcaacacttggaaacatcaaggggtggattttgcattttttttttttacagctgctttcatctaagggcagacctcagagagtgccccatagggaagtcaacacttgggcagaaacccacagtcttcccaacagaggaatcaagagacagaggtcctagtgaccacagcaactgaacagatgggcctgagggagtctccggttccctggcccctgacacactgtggaagagatagaatcaatcctgggcacagggtgggcgggggtggggggtggggtggggagcacagaagtgacaaagggctgcaaacagtcccacaaagatttctgtagtcagtgaaggcgctaaagcagcacaatgctctcatgtcctgcgaggagcaagggagtcagctgagagacagagccttgtgacagaccccagggatagcgcagcagagagcagtatcagacaacaggcagcctgaggatgcaaagatgtcctgtggatgctgtcctgaatgttgatgacacagaccaggcacactcaatcctgctcacgccttggcatgatgtgagcc

SEQ ID NO: 24724 - DNA, 1191 bp, Homo sapiens
ttacataattgtaactgttgattgaaatatcagatgcactctatctcactcatgctaaaccagaagccagcaatcactcaagataggtgttatgcttgatctcgaggaatatttttattgaaatattaattgatggtctttacaatcccaacatttcctattattttctgttatctctctccttttcttcaatctgagaactggctaaactatatggcatccatatctcagggcatggttgtttcagcagaaaagtctttaaggactcaaatscttggatgtttgagttgcaaatgtccaagggactcagaatttagaagaaaaaatcttaaagtgccagaaaaatatttcccaacctcttggagagcataacatatccccagactgcagggagggagaaaggagcgtgaagggaagcaggagggggtggacgccgtaaacccctaaggaaagatgagccaatatcctgcccctaccatttattcaaaaggaagggcagcaaatgccactctggcatagcagagtaaagtatattgaaccaactgtcctacagatgaactcgggacaaaatctaaaacccaactctgaaggcagtggtggacaactacaaataggcaggtactaggagggaggcaacacttggaaacatcaaggggtggattttgcattttttttttttacagctgctttcatctaagggcagacctcagagagtgccccatagggaagtcaacacttgggcagaaacccacagtcttcccaacagaggaatcaagagacagaggtcctagtgaccacagcaactgaacagatgggcctgagggagtctccggttccctggcccctgacacactgtggaagagatagaatcaatcctgggcacagggtgggcgggggtggggggtggggtggggagcacagaagtgacaaagggctgcaaacagtcccacaaagatttctgtagtcagtgaaggcgctaaagcagcacaatgctctcatgtcctgcgaggagcaagggagtcagctgagagacagagccttgtgacagaccccagggatagcgcagcagagagcagtatcagacaacaggcagcctgaggatgcaaagatgtcctgtggatgctgtcctgaatgttgatgacacagaccaggcacactcaatcctgctcacgccttggcatgatgtgagcc

SEQ ID NO: 24725 - DNA, 571 bp, Homo sapiens
tcccccatccaccccaactacccaccaaatataactttctataaagggacttccttctaagaggtggtgttaactgagatgtaactgcagtgccttatatggtagccatttattcctctatttccccaaccacatgagggttctgatttagtcacttccccatttcccagaatgagaaatatcaatatgaaacaacatgatgagtgaacaaatgaacaaagaactgaatgaatggatgaagaagttaataccattcataccaggagctgatgygtatatattgaaataacaatgtttctagtaaagcctgctctttccctcctccagactcattctgttctccccacccctttctgagttgcatttagagggtttaaatgtcagtggctgcaagcccactttcctccctcccattgtcagtggtctttctctcagctgaaatgggagttttggaatagagctctctgtcaatcaccactgagcccttttccctcagccctggagtttccaggctcaagtaccaagagtcgggctggcagccttggcagtcaggggaaagagcacgagagac

SEQ ID NO: 24726 - DNA, 560 bp, Homo sapiens
tcattttgaccattttttccagtggtcttgttttagttttttatggaggaacagatttttgaaggacttaactccacagtttcttctggaatcactttctcgatataaatattagagtaagattgtttgtgtgtttttttttaaagcacacacacaaaaacaagcaaaaaaaacttgctggaatttttattggaaattmtttaaacttataaatcatttaggataaaattgacatctttatcatgctgatcttccattttatagacatggtatgtcttgccatttatttaattctttgtttatgtcattagcattttgtaattgtcagcatgaaaaacctttatgttttgttaagcctccacctaagtatttaatatttttggatagattataaatgatacttcagttttaaagatgattttcatgtagtcactattggtatatagaaatgcagttgattattgtgtggtaattgtgtatgctgcagtgttgctacactcaattattacttttagtaatttttaaacttctctttagtagacttgttgaatgttcctgca

SEQ ID NO: 24727 - DNA, 560 bp, Homo sapiens
tcattttgaccattttttccagtggtcttgttttagttttttatggaggaacagatttttgaaggacttaactccacagtttcttctggaatcactttctcgatataaatattagagtaagattgtttgtgtgtttttttttaaagcacacacacaaaaacaagcaaaaaaaacttgctggaatttttattggaaattckttaaacttataaatcatttaggataaaattgacatctttatcatgctgatcttccattttatagacatggtatgtcttgccatttatttaattctttgtttatgtcattagcattttgtaattgtcagcatgaaaaacctttatgttttgttaagcctccacctaagtatttaatatttttggatagattataaatgatacttcagttttaaagatgattttcatgtagtcactattggtatatagaaatgcagttgattattgtgtggtaattgtgtatgctgcagtgttgctacactcaattattacttttagtaatttttaaacttctctttagtagacttgttgaatgttcctgca

SEQ ID NO: 24728 - DNA, 560 bp, Homo sapiens
tcattttgaccattttttccagtggtcttgttttagttttttatggaggaacagatttttgaaggacttaactccacagtttcttctggaatcactttctcgatataaatattagagtaagattgtttgtgtgtttttttttaaagcacacacacaaaaacaagcaaaaaaaacttgctggaatttttattggaaattctttaaacttataaatcatttaggataaaattgacatctttakcatgctgatcttccattttatagacatggtatgtcttgccatttatttaattctttgtttatgtcattagcattttgtaattgtcagcatgaaaaacctttatgttttgttaagcctccacctaagtatttaatatttttggatagattataaatgatacttcagttttaaagatgattttcatgtagtcactattggtatatagaaatgcagttgattattgtgtggtaattgtgtatgctgcagtgttgctacactcaattattacttttagtaatttttaaacttctctttagtagacttgttgaatgttcctgca

SEQ ID NO: 24729 - DNA, 560 bp, Homo sapiens
tcattttgaccattttttccagtggtcttgttttagttttttatggaggaacagatttttgaaggacttaactccacagtttcttctggaatcactttctcgatataaatattagagtaagattgtttgtgtgtttttttttaaagcacacacacaaaaacaagcaaaaaaaacttgctggaatttttattggaaattctttaaacttataaatcatttaggataaaattgacatctttatcatgctgatcttccattttatagacatggtatgtcttgccatttatttaattctttgtttatgtcattagcattttgtaattgtcagcatgaaaaacctttatgttttgttaagcctccacctaagtatttaatatttttggatagattataaatgatacttcagttttaaagatgattttcatgtagtcactattggtatatagaaatgcagttgattattgtgtggtaattgtgtatgctgcagtgttgctacactcaattattasttttagtaatttttaaacttctctttagtagacttgttgaatgttcctgca

SEQ ID NO: 24730 - DNA, 537 bp, Homo sapiens
aaacacccaaatatctaccaaaatagaatagatgaagaaattgtggtaaagtaatatagtggaatattgtacaacaattaaaattactaaactatagtaatgcacgtcagcatatgtcaatcacaaaattatttagtgatagactaaattcacagaatatataaatatttcttctttgtgtgaagtgattttctagcagtatgttttaattttttgcytttttgtgtatctgttgtagagtattgatttgaggttaccatgaggctctcaaataatattttacaaccaaatattttaaactgatgacaacttaatttgaatcacaaaaaaattttaaaaagcaaaaaaaaattaaaacttttatattttagcatcaccatccccccacttcttgccattttatctctatttataatttttatactatctatctcataaagttattgtacttattacttttgataggtttttcttttagtcttcctactcaagatacgagtagtttgcacatcaaagttacagcgttagaatattctg

SEQ ID NO: 24731 - DNA, 537 bp, Homo sapiens
aaacacccaaatatctaccaaaatagaatagatgaagaaattgtggtaaagtaatatagtggaatattgtacaacaattaaaattactaaactatagtaatgcacgtcagcatatgtcaatcacaaaattatttagtgatagactaaattcacagaatatataaatatttcttctttgtgtgaagtgattttctagcagtatgttttaattttttgcctttttgtgtatctgttgtagagtattgatttgagrttaccatgaggctctcaaataatattttacaaccaaatattttaaactgatgacaacttaatttgaatcacaaaaaaattttaaaaagcaaaaaaaaattaaaacttttatattttagcatcaccatccccccacttcttgccattttatctctatttataatttttatactatctatctcataaagttattgtacttattacttttgataggtttttcttttagtcttcctactcaagatacgagtagtttgcacatcaaagttacagcgttagaatattctg

SEQ ID NO: 24732 - DNA, 537 bp, Homo sapiens
aaacacccaaatatctaccaaaatagaatagatgaagaaattgtggtaaagtaatatagtggaatattgtacaacaattaaaattactaaactatagtaatgcacgtcagcatatgtcaatcacaaaattatttagtgatagactaaattcacagaatatataaatatttcttctttgtgtgaagtgattttctagcagtatgttttaattttttgcctttttgtgtatctgttgtagagtattgatttgaggttaccatgaggctctcaaataatattttacaaccaaatattttaaactgatgacaacttaatttgaatcacaaaaaaattttaaaaagcaaaaaaaaattaaaacttttatattttagcatcaccatccccccacttcttgccattttatctctatttataatttttatactatctatctcataaagttattgtacttattacttttgataggtttttcttttagtcttcctactcaagataygagtagtttgcacatcaaagttacagcgttagaatattctg

SEQ ID NO: 24733 - DNA, 625 bp, Homo sapiens
atagacgggagttcaatacttcattgacagcagtagaaaaatatttgatgcagactctggtcttaaactgtactcttgaccaattgaaactaatagataaatcagaatatttcatccaacaatggcacratatacatttttctattctgttcatgaaatatagtcaatttatggatttcatgcacagatgaaaattcacagattaattccccaaaactaatcatatacttgttcataaagcaagtttcaatatacttttaaaaatctatcactatatcagatcaagtatattctcagaccacagtggaataaatctaggaatctataccaagaggagtcctcaaagccatacaagaacaaggaaaataaacaacttgcttttgaatgactttgtgtaaacaataaaattcaggcaaaaattaaaattttttgaaacaaatgaaaatatagacactgcacaccaaaacttctcagatgcagcaaaagtagtattaaaaggaaagtttctaaaactaaatgtttatttcaaaaagataaaagatttcaagtgacaacctaatatcacacttcaaagcactggaacaacagaaacaattcaaacccaaggacagtcgaagaaaaaaat

SEQ ID NO: 24734 - DNA, 625 bp, Homo sapiens
atagacgggagttcaatacttcattgacagcagtagaaaaatatttgatgcagactctggtcttaaactgtactcttgaccaattgaaactaatagataaatcagaatatttcatccaacaatggcacgatatacatttttctattctgtkcatgaaatatagtcaatttatggatttcatgcacagatgaaaattcacagattaattccccaaaactaatcatatacttgttcataaagcaagtttcaatatacttttaaaaatctatcactatatcagatcaagtatattctcagaccacagtggaataaatctaggaatctataccaagaggagtcctcaaagccatacaagaacaaggaaaataaacaacttgcttttgaatgactttgtgtaaacaataaaattcaggcaaaaattaaaattttttgaaacaaatgaaaatatagacactgcacaccaaaacttctcagatgcagcaaaagtagtattaaaaggaaagtttctaaaactaaatgtttatttcaaaaagataaaagatttcaagtgacaacctaatatcacacttcaaagcactggaacaacagaaacaattcaaacccaaggacagtcgaagaaaaaaat

SEQ ID NO: 24735 - DNA, 625 bp, Homo sapiens
atagacgggagttcaatacttcattgacagcagtagaaaaatatttgatgcagactctggtcttaaactgtactcttgaccaattgaaactaatagataaatcagaatatttcatccaacaatggcacgatatacatttttctattctgttcatgaaatatagtcaatttatggatttcatgcacagatgaaaattcacagattaattccccaaaactaatcatatacttgtycataaagcaagtttcaatatacttttaaaaatctatcactatatcagatcaagtatattctcagaccacagtggaataaatctaggaatctataccaagaggagtcctcaaagccatacaagaacaaggaaaataaacaacttgcttttgaatgactttgtgtaaacaataaaattcaggcaaaaattaaaattttttgaaacaaatgaaaatatagacactgcacaccaaaacttctcagatgcagcaaaagtagtattaaaaggaaagtttctaaaactaaatgtttatttcaaaaagataaaagatttcaagtgacaacctaatatcacacttcaaagcactggaacaacagaaacaattcaaacccaaggacagtcgaagaaaaaaat

SEQ ID NO: 24736 - DNA, 625 bp, Homo sapiens
atagacgggagttcaatacttcattgacagcagtagaaaaatatttgatgcagactctggtcttaaactgtactcttgaccaattgaaactaatagataaatcagaatatttcatccaacaatggcacgatatacatttttctattctgttcatgaaatatagtcaatttatggatttcatgcacagatgaaaattcacagattaattccccaaaactaatcatatacttgttcataaagcaagtttcaatatacttttaaaaatctatcactatatcrgatcaagtatattctcagaccacagtggaataaatctaggaatctataccaagaggagtcctcaaagccatacaagaacaaggaaaataaacaacttgcttttgaatgactttgtgtaaacaataaaattcaggcaaaaattaaaattttttgaaacaaatgaaaatatagacactgcacaccaaaacttctcagatgcagcaaaagtagtattaaaaggaaagtttctaaaactaaatgtttatttcaaaaagataaaagatttcaagtgacaacctaatatcacacttcaaagcactggaacaacagaaacaattcaaacccaaggacagtcgaagaaaaaaat

SEQ ID NO: 24737 - DNA, 625 bp, Homo sapiens
atagacgggagttcaatacttcattgacagcagtagaaaaatatttgatgcagactctggtcttaaactgtactcttgaccaattgaaactaatagataaatcagaatatttcatccaacaatggcacgatatacatttttctattctgttcatgaaatatagtcaatttatggatttcatgcacagatgaaaattcacagattaattccccaaaactaatcatatacttgttcataaagcaagtttcaatatacttttaaaaatctatcactatatcagatcaagtatattctcagaccacagtggaataaatctaggaatctataccaagaggagtcctcaaagccatacaagaacaaggaaaataaacaacttgyttttgaatgactttgtgtaaacaataaaattcaggcaaaaattaaaattttttgaaacaaatgaaaatatagacactgcacaccaaaacttctcagatgcagcaaaagtagtattaaaaggaaagtttctaaaactaaatgtttatttcaaaaagataaaagatttcaagtgacaacctaatatcacacttcaaagcactggaacaacagaaacaattcaaacccaaggacagtcgaagaaaaaaat

SEQ ID NO: 24738 - DNA, 625 bp, Homo sapiens
atagacgggagttcaatacttcattgacagcagtagaaaaatatttgatgcagactctggtcttaaactgtactcttgaccaattgaaactaatagataaatcagaatatttcatccaacaatggcacgatatacatttttctattctgttcatgaaatatagtcaatttatggatttcatgcacagatgaaaattcacagattaattccccaaaactaatcatatacttgttcataaagcaagtttcaatatacttttaaaaatctatcactatatcagatcaagtatattctcagaccacagtggaataaatctaggaatctataccaagaggagtcctcaaagccatacaagaacaaggaaaataaacaacttgcttttgaatgactttgtgtaaacaataaaattcaggcaaaaattaaaattttttgaaacaaatgaaaatatagacactgcacaccaaaacttctcagatgcagcaaaagtagtattaaaaggaaagtttctaaaactaaatktttatttcaaaaagataaaagatttcaagtgacaacctaatatcacacttcaaagcactggaacaacagaaacaattcaaacccaaggacagtcgaagaaaaaaat

SEQ ID NO: 24739 - DNA, 574 bp, Homo sapiens
tgttttgagctactaaatttgtagtgatttcttatggcaacaatgaaaattaagatgatatgtttaatttttttcttatccatatagrgaaaaaaaaatcccaaaactgcattaattagggtttccctgttttattttaaatatgatgtattacactttttgatggaaaagaaaacttcagccaaagccatcttggagtaagatgtgaagttaagttctgagcccacatactgaatataattatgaaatgatagtaaaggaattgtgactggaaagtaatgtctatataatattcatacatctttttgttcttttgtcatcagtgcatataaaatccttcacacctgatgccgcagatgcttaataggcaagcaactctccccaactgaagcgatgctgtacaaaacagaagggctaacacaaatcagggtttgaagtgtattgaagtaaaatctattctccaattaacaagcaatgttgcgtttaaatacataaatgaattataaaattataaaattttgacaaacattctgagaaggatgtatttgtagacacttgggaaatcatcatgcca

SEQ ID NO: 24740 - DNA, 1078 bp, Homo sapiens
ggatcctttgaatttctggcatggtcacgtgtgcctgtgtgtgtgtgtgtgtgtgtgtgtgtgtgtttaacaaggctacttaaaaagctatctttcttactctacatgatcgccttgtctctgtggtgaacttctaggaaatgtaaatttgcttttcttttttttttttccttttgtgcatgagaaagtggcaactttgcaaaaacaagccaggcatctgttcactttttgtagaaacggagaaacaatattgtgattttttttttttwaaaagagagaaactcctagctcctataacaatttttgttgaagaaatattcatgttagaatgactagccattattacgcactaataaggtataactgtgtggtgctagacattaaaaatataagagttttccctaaaaggaacatttatttccaggagcaggaaaacagcagcagggttttatggtcccaccgctcatgcacagtgtacagtaagtgctacagaaacattagcgtataagtgcccattagcctcgcacagaagaatccagggcccattactcagacttctaaaggctcaatattggatcactgttatcaaactaagattagctaaaaatttacctggtacttccttagaaatgacctcatcaatttaatacaaatttggcagatggggtattttgttatcctgatggccaattttgacttttacaggaaaatgcagtctttgaaatcttgtcttaaatatgggcatgccatttttttttttgccttctttagatactttgggggtttgaagatttactcaagctaatgacccacttttactcacagcatgcatttgcattacacaattaggcaacattcaccaaacattcatcaaacaatatggaatctggacttttagcaagaggggaaagcaacatctggataaaattatcagctggatttagggatgaaaactcggctcattgctttctcagttttacattataaaaccagccaggcccctaaagtgaactgctcaggataatcgtaagcaggggcttattattgcagaggccactgtactttagaatttgcttga

SEQ ID NO: 24741 - DNA, 580 bp, Homo sapiens
tgcctcaagctcccaaaatgctgggattmcaggcgtgagccatcacacccagcctttttttttttcttgaaactgagtttcactcttgttgcccaggctagagtgcaatggcacgatctcggctcaccacaacctctgcctccctggttcaagcaattctactacctcagcctcctgagtagctgagattacaggcatgtgccaccatgcccagctaattttgtatttttagtagagatggggtttctccatgttggtcaggctggtctcgaacttccgacctcaggtgatccgcctacctcggcctcccaaagtgctgggattacaggcgtgagccaccgcacccggccccagacttttttttaattaaaaaatatggtgggagaaaataatagcttgcaatgtggcaatcatttataatagtttgcaacgcggacaaattttttttttaacctcttcctcctagcactttctagggccctgagataagtcttcatttgtagggagacctctagtccttagaacctgaattctcattctggtttcacaaaagaacaaactattcatttgtgcaaactag

SEQ ID NO: 24742 - DNA, 580 bp, Homo sapiens
tgcctcaagctcccaaaatgctgggattccaggcrtgagccatcacacccagcctttttttttttcttgaaactgagtttcactcttgttgcccaggctagagtgcaatggcacgatctcggctcaccacaacctctgcctccctggttcaagcaattctactacctcagcctcctgagtagctgagattacaggcatgtgccaccatgcccagctaattttgtatttttagtagagatggggtttctccatgttggtcaggctggtctcgaacttccgacctcaggtgatccgcctacctcggcctcccaaagtgctgggattacaggcgtgagccaccgcacccggccccagacttttttttaattaaaaaatatggtgggagaaaataatagcttgcaatgtggcaatcatttataatagtttgcaacgcggacaaattttttttttaacctcttcctcctagcactttctagggccctgagataagtcttcatttgtagggagacctctagtccttagaacctgaattctcattctggtttcacaaaagaacaaactattcatttgtgcaaactag

SEQ ID NO: 24743 - DNA, 580 bp, Homo sapiens
tgcctcaagctcccaaaatgctgggattccaggcgtgagccatcacacccagcctttttttttttcttgaaackgagtttcactcttgttgcccaggctagagtgcaatggcacgatctcggctcaccacaacctctgcctccctggttcaagcaattctactacctcagcctcctgagtagctgagattacaggcatgtgccaccatgcccagctaattttgtatttttagtagagatggggtttctccatgttggtcaggctggtctcgaacttccgacctcaggtgatccgcctacctcggcctcccaaagtgctgggattacaggcgtgagccaccgcacccggccccagacttttttttaattaaaaaatatggtgggagaaaataatagcttgcaatgtggcaatcatttataatagtttgcaacgcggacaaattttttttttaacctcttcctcctagcactttctagggccctgagataagtcttcatttgtagggagacctctagtccttagaacctgaattctcattctggtttcacaaaagaacaaactattcatttgtgcaaactag

SEQ ID NO: 24744 - DNA, 1530 bp, Homo sapiens
  misc_feature (1)...(1530): n = A,T,C or G
ttcctatacctttaaactagcctttgtataaccttaacaatgcagttaagttagactttaccaatacaaacaggaaagacctagggatctatgtgaaaccataaagggtatctgtcaacatgtgaactgtaaaccactgactgcggaattcactgaagagcttgttaaaaaggtgcatgctggattttttatttattaggtctcatgcggatcctaggaatctaactttgcgtgagcaccccaatccccaaatgattcacacataaacatgagtggagtttctctctttgagaatatactggcttcaatgtcatttaactgccagccttaacttctattatcttccctattcttccaggcagagacagctccgtttaaacagggcgaatttgggatcctttggatccctgcttggttgggtgattcagaactcatctgtgtatttgggttgttcaattacatagtttcaggttgatacttcataatgacaaatgtctacctcattagcttccagtgtatggttgcttttcatttagctaatgccttagtgggttatttcctcttggttccctgctgagtatcagtgtaatgtacctgatcggtgcccagttatttttgattgactactataaggcattaattagaacaccagcaactaggcctaccagatcaactgtctgtgactgaactgaacaatcatttaccgtaacaccctaggcattttggttaagccaataactggactaacttttagctctcagaaaagttatttgatgacactgaccaatgaactcatccccaaagaattagtataacttctgaccttgcctgctcttaaacacaaggaataaacatattactaggcgtatatagctcactatgcacacctacacaggacaaaaatagtataatgaaggtggtatagatgatgtcacaccactttagacactggaagcattagctgtagaaaatgccaatagactggtgtgttcaagaactatacattttcttatgtttaaggaaaaccacaatttaaatgtaaattgttattttgcttcagtgagaaatgaactaaaatgcaagttgtccctcagaaaaaggtattagacgtgtgtgtgtggtttttttgagatggcgtcttgcgctgtcaccaaggctggcgcagtggtgctatctgggcccactgcaacctttgcctcctggactcgaatgattctcctgcctcagcctcccgagtagctggaattacaggtgcctgccaccatgcccagctaatttttgtatttttagtagagacagggttttaccatgttggtcaggccggtctcaaactcctaacctcaggtgatccacccaccttggcccgccaaagtgctgggattacaggcgtgacgactgtgcctggcctagacctatgttttatatgttcttggtataatctgtaaacaacagagtcttggatatggggcatagtttaanngagawatcatttcttaaacttgacccatagtaggctngttctgaaaccat

SEQ ID NO: 24745 - DNA, 1530 bp, Homo sapiens
  misc_feature (1)...(1530): n = A,T,C or G
ttcctatacctttaaactagcctttgtataaccttaacaatgcagttaagttagactttaccaatacaaacaggaaagacctagggatctatgtgaaaccataaagggtatctgtcaacatgtgaactgtaaaccactgactgcggaattcactgaagagcttgttaaaaaggtgcatgctggattttttatttattaggtctcatgcggatcctaggaatctaactttgcgtgagcaccccaatccccaaatgattcacacataaacatgagtggagtttctctctttgagaatatactggcttcaatgtcatttaactgccagccttaacttctattatcttccctattcttccaggcagagacagctccgtttaaacagggcgaatttgggatcctttggatccctgcttggttgggtgattcagaactcatctgtgtatttgggttgttcaattacatagtttcaggttgatacttcataatgacaaatgtctacctcattagcttccagtgtatggttgcttttcatttagctaatgccttagtgggttatttcctcttggttccctgctgagtatcagtgtaatgtacctgatcggtgcccagttatttttgattgactactataaggcattaattagaacaccagcaactaggcctaccagatcaactgtctgtgactgaactgaacaatcatttaccgtaacaccctaggcattttggttaagccaataactggactaacttttagctctcagaaaagttatttgatgacactgaccaatgaactcatccccaaagaattagtataacttctgaccttgcctgctcttaaacacaaggaataaacatattactaggcgtatatagctcactatgcacacctacacaggacaaaaatagtataatgaaggtggtatagatgatgtcacaccactttagacactggaagcattagctgtagaaaatgccaatagactggtgtgttcaagaactatacattttcttatgtttaaggaaaaccacaatttaaatgtaaattgttattttgcttcagtgagaaatgaactaaaatgcaagttgtccctcagaaaaaggtattagacgtgtgtgtgtggtttttttgagatggcgtcttgcgctgtcaccaaggctggcgcagtggtgctatctgggcccactgcaacctttgcctcctggactcgaatgattctcctgcctcagcctcccgagtagctggaattacaggtgcctgccaccatgcccagctaatttttgtatttttagtagagacagggttttaccatgttggtcaggccggtctcaaactcctaacctcaggtgatccacccaccttggcccgccaaagtgctgggattacaggcgtgacgactgtgcctggcctagacctatgttttatatgttcttggtataatctgtaaacaacagagtcttggatatggggcatagtttaanngagatwtcatttcttaaacttgacccatagtaggctngttctgaaaccat

SEQ ID NO: 24746 - DNA, 1530 bp, Homo sapiens
  misc_feature (1)...(1530): n = A,T,C or G
ttcctatacctttaaactagcctttgtataaccttaacaatgcagttaagttagactttaccaatacaaacaggaaagacctagggatctatgtgaaaccataaagggtatctgtcaacatgtgaactgtaaaccactgactgcggaattcactgaagagcttgttaaaaaggtgcatgctggattttttatttattaggtctcatgcggatcctaggaatctaactttgcgtgagcaccccaatccccaaatgattcacacataaacatgagtggagtttctctctttgagaatatactggcttcaatgtcatttaactgccagccttaacttctattatcttccctattcttccaggcagagacagctccgtttaaacagggcgaatttgggatcctttggatccctgcttggttgggtgattcagaactcatctgtgtatttgggttgttcaattacatagtttcaggttgatacttcataatgacaaatgtctacctcattagcttccagtgtatggttgcttttcatttagctaatgccttagtgggttatttcctcttggttccctgctgagtatcagtgtaatgtacctgatcggtgcccagttatttttgattgactactataaggcattaattagaacaccagcaactaggcctaccagatcaactgtctgtgactgaactgaacaatcatttaccgtaacaccctaggcattttggttaagccaataactggactaacttttagctctcagaaaagttatttgatgacactgaccaatgaactcatccccaaagaattagtataacttctgaccttgcctgctcttaaacacaaggaataaacatattactaggcgtatatagctcactatgcacacctacacaggacaaaaatagtataatgaaggtggtatagatgatgtcacaccactttagacactggaagcattagctgtagaaaatgccaatagactggtgtgttcaagaactatacattttcttatgtttaaggaaaaccacaatttaaatgtaaattgttattttgcttcagtgagaaatgaactaaaatgcaagttgtccctcagaaaaaggtattagacgtgtgtgtgtggtttttttgagatggcgtcttgcgctgtcaccaaggctggcgcagtggtgctatctgggcccactgcaacctttgcctcctggactcgaatgattctcctgcctcagcctcccgagtagctggaattacaggtgcctgccaccatgcccagctaatttttgtatttttagtagagacagggttttaccatgttggtcaggccggtctcaaactcctaacctcaggtgatccacccaccttggcccgccaaagtgctgggattacaggcgtgacgactgtgcctggcctagacctatgttttatatgttcttggtataatctgtaaacaacagagtcttggatatggggcatagtttaanngagatatcatttcttaaacttgacccwtagtaggctngttctgaaaccat

SEQ ID NO: 24747 - DNA, 1530 bp, Homo sapiens
  misc_feature (1)...(1530): n = A,T,C or G
ttcctatacctttaaactagcctttgtataaccttaacaatgcagttaagttagactttaccaatacaaacaggaaagacctagggatctatgtgaaaccataaagggtatctgtcaacatgtgaactgtaaaccactgactgcggaattcactgaagagcttgttaaaaaggtgcatgctggattttttatttattaggtctcatgcggatcctaggaatctaactttgcgtgagcaccccaatccccaaatgattcacacataaacatgagtggagtttctctctttgagaatatactggcttcaatgtcatttaactgccagccttaacttctattatcttccctattcttccaggcagagacagctccgtttaaacagggcgaatttgggatcctttggatccctgcttggttgggtgattcagaactcatctgtgtatttgggttgttcaattacatagtttcaggttgatacttcataatgacaaatgtctacctcattagcttccagtgtatggttgcttttcatttagctaatgccttagtgggttatttcctcttggttccctgctgagtatcagtgtaatgtacctgatcggtgcccagttatttttgattgactactataaggcattaattagaacaccagcaactaggcctaccagatcaactgtctgtgactgaactgaacaatcatttaccgtaacaccctaggcattttggttaagccaataactggactaacttttagctctcagaaaagttatttgatgacactgaccaatgaactcatccccaaagaattagtataacttctgaccttgcctgctcttaaacacaaggaataaacatattactaggcgtatatagctcactatgcacacctacacaggacaaaaatagtataatgaaggtggtatagatgatgtcacaccactttagacactggaagcattagctgtagaaaatgccaatagactggtgtgttcaagaactatacattttcttatgtttaaggaaaaccacaatttaaatgtaaattgttattttgcttcagtgagaaatgaactaaaatgcaagttgtccctcagaaaaaggtattagacgtgtgtgtgtggtttttttgagatggcgtcttgcgctgtcaccaaggctggcgcagtggtgctatctgggcccactgcaacctttgcctcctggactcgaatgattctcctgcctcagcctcccgagtagctggaattacaggtgcctgccaccatgcccagctaatttttgtatttttagtagagacagggttttaccatgttggtcaggccggtctcaaactcctaacctcaggtgatccacccaccttggcccgccaaagtgctgggattacaggcgtgacgactgtgcctggcctagacctatgttttatatgttcttggtataatctgtaaacaacagagtcttggatatggggcatagtttaanngagatatcatttcttaaacttgacccawagtaggctngttctgaaaccat

SEQ ID NO: 24748 - DNA, 521 bp, Homo sapiens
aaaagatgccatcaagacctgaatytgcacttggcccacaaagcatgtaatataaaaatatgtgtttctcctttacaaacctgaataatagaagtacattatgtattttctgaaatcatttcctgcccctacatttacggtagtgcccattattctacttcataacactctgcccttcctcttcctcatgccacattttgcagtagcatatttctttatttacttgtttatttttgccccctgtaaagtgccacaaaggcagggacacacgtatttcagtctccactgcctggctcacagagaaaaactcaatgaatagttatttaagggaatataagtgtttgtgtttttccaaaaaaagtagtatgaaggaaatcactgatatttcacccaaaggtagaagtgttcactataaacatctaagaataattttattctaaatgttcaacatgcagttgataaacatttactaatgacaacaaaataactgcatttagtatactatggtatcacagtaagtc

SEQ ID NO: 24749 - DNA, 535 bp, Homo sapiens
gcccttttaagggcttacaactctaagggatccacgtgaaagggtcataatagatcaagcaagcatgaggaacgtgactgggggctacatgcatcacctaacagaacaaaaagttttacagtgctttctcatacaatgtctggaatttacagataacacaagtaattttgatcaggggttaatattattattattattttaaccaccagggccagatggtggcgccaaggtcatctagctatttatcttacttctgtttctttccaactttttgctttctcccttttctcctgtcttataaactagggaaaagaggaggtaggggagaagctgggaaggacaacaggagaagtggtggtctcattccataagcaatggcagacacccctccccctgccaggctgctgcctcacaggtcaatctcagactgctgctttagcagtgagcaaggctccgtgggcatgggacccgcgggatgtaatctcctggtgtgccatttgctaagaccattggaaaagcgcagtatttgygtggc

SEQ ID NO: 24750 - DNA, 1778 bp, Homo sapiens
atcaaacctgaagtcattatatctcaagagcatagggacaagcagatggaattggaaggaaggcagtggtaatgggtactgctctaggcactctttaacttttgaactctgcattctgagctgggcattatggttacaactggcggttaaaaaacctatttttgttcttgttttcttcctactcctcatctgatttaccccaaagaaacaatagttgactcttcacccatcctaaaatgttgcaataatctgatagttctttctctagactaagttacttgagtctttccaaacatggtcttatatattcccgtagggtcttaaagcaatcactcaacttattatctataagagaggcaaaaactatttatctcatattatgacaaatctacaatatctgaagatacttagaacttagctgtcatgtggtatcacagcattacataaaatagaaaataggacataggcattaaattgaatttaagaatagtgcacaccgtgcaaagtgaaagacaatacaatggtgagtagttctttttatattcaaagacaaaatgtataggtatggattaaacaccaggaagctggcagtgttagtcaattaaaggtaagttggatatttacagttctaactttgctggttacaaacagtctgttaggaacataacagaccttttaatttacccaactcttgtcttctctgtgtgttttaagcttaatagttgcataaaatgattggggccctgaactgattgtgaatttgtggggaagggaaacaaggtagcaggggatccataagggtgtgggatggggtatgagatcaagtgtagggaatgtgtgcaagcatgtgcattcattaattcatacgacaaataggtattgaggacttaatatttgcaaacaaatgtcatctctaaagacagccatagctgagtatgagatatatcccatgttcataagtaactggaatgccagatagaccaagaaggggccataggaaaggttcaggtggttatggtagtttggagaaaagaacattacctcaagcaaaagtacacagagaaacttaaagaagaggtaaagtttgagctgtacagggagtgagatttaggaatggtggttctcaatcttgattaattacagaatcacctggagagttttcaaagactatgattagggttctcactagactaactaaagcataaccttggaaggtggctccaggctttttatttcaataggtttttggggaacaggtggtgtttggttagatgaataagttatttagtggtgatttctgagacttttggtgcacccatcacccaagcagtgtacactgtacctaatgtgtagtcttttttttttttttttttgacatggagtctcgctctgtcacccaggctggagtgcagtggtgtgatctcggctcactgcaagctctgcctcccaggttcatgccattctcctgcctcagcctcctgagtagctgggactacmggcacccgccaccacacccggctaattttttgtatttttagtagagacggggtttcaccatgttagccaggatggtctcaatctcctgacctcgtgatccgccctcctcggcctcccaaagtgctgggattacaggcgtgagccaccacgcccagcctggattaattcttgagccatctgtaccaaccaagcctgtgaaagttctacttaattttattaacaaaccttttcatttaaaatattaataaatgtttaacaagatcaatttacaggggaccgtg

SEQ ID NO: 24751 - DNA, 687 bp, Homo sapiens
atcaggagttcaagaccagcctggccaaaagaatgaaaccttgtccctactaaaagtacaaaaattaaccggatgcagtggcaygtgcctgtagtcccagctactcaggaggctgaggcaggaggattgcttgaaccctggaggctgaggttgcagtgagctgagatcatgtgactgcactccagcctgggtgacggagcaagactctgtgtccaaaaaaaaaaaagaaagaaaaattgtagttgcccaataaatgtgacttaaaatagagtcaaagagaaggaacaaatagaatagaataaaatgcaagcggctctgcttttcccctgtcctcctgccctgggtttggcatgggagtggagttctgaggccttggaagtccttcggggagaaggggtccctccattgttccatctgcctggaagagcatccaagcctgccaactgagagctccagtgcctgtgacccagtgagtgggtctggggcaagaataggcttccaatagctccctccaagttcatgcctattcctaggataactaggaatcccaggaatgtagttggttctgaaattctaaaaggcaggtaaaataaatatcatgacaacatagtgaaagtctgagtgcccttcctctccaattgctgcacctggccttggggaggagcagggctctgaaaagtgacaaat

SEQ ID NO: 24752 - DNA, 524 bp, Homo sapiens
taggaaaaatattttgagtgaatgttaaatttaaaaggacataaaattatccgtggaacacaatcttaatacaaaaataaaatgtctacaaaaaagattgggagaaatacatcagatcattaaaattagatatgcatatataataccttcagaatccaaaggtcattatggagacacaaagcatcattatgccatgggmtgggtccttggaatgaggagtgttatatgcagtctaccctcctgcctacaatctccctcattcaaagtgactgggaaagccgaagagaatattatatacctttgaacactgaagcagaggcacaaggatacccctaggcactaccaaaaagtcttgttttgtgaagagagctccttccctttcccccttcttttcttctcttttttcctttctcctttcctttggatcttccttcctagagcacttcccctgcaatcagaggaaattagaaagtccccaaagatcaaaaagtcaaaataattaacagattcgttaattcattcaa

SEQ ID NO: 24753 - DNA, 567 bp, Homo sapiens
caatgtaaaaatatcaaatataaaatgagtaagactcttggagtctatggtcagyaaggaagaaaggaatcaaatggtttatcacaaaacaatgaaagaggtgttggaattgaagctatataaaggattgtgtgaacatattggaaggaacaaattttcttatggataggtttgacagttttcacaaaggagagaacatttgattttggtctttaaggatgagtaagtgtttgttaggcagatacatttgcaaagggtatgtatgccttgcaatgaataaagaacacaggcaaaaaagcacagagtaataatgggctttagtggcttgtggccagatcaaaaattgtgtgtgtgtgtctgtgtatgtgttaagggagtgggtgaagagttgggtcttgagtcttgggtggggagggaagaaaactagattagattgttggaaccaggttatgaatggtcatacataataaatgccaagccaaaaaatttacatgggatcctgtagacaatggagagacactgaagttctgctcagatgccagtctgtacatcggcatcgtttaataa

SEQ ID NO: 24754 - DNA, 1829 bp, Homo sapiens
ttattctgtgtaatacttcattgaactaatttcctttttgtttctctaggtagtcattataggaaaaatgctgaaatgttttatctcatgtgtaaagtaatattgaatatcccctgtcctcaccatcacccctgcccccacaagacgtgcttcctcaaaattttgagatctagttaactccatatctctacacttagagacctgtacaaaatgctttgtaatgttaacagtgccaatttgcatttctgattatctgtatgcccagttatatttattgctgtttatatgtcatcctctaaacatcatttgtaatcttataacctatgctatatgggctctgtacatagtacaggttatatgaaaatatagttttcagcatcaaaagaactctgggttggaattttcagtgaagtagcctgtaactcctgttaacagtaatgggagttccatgactacctcaccataccccttgctgaaaatgctactattcctgagggagtcactgacctttgcatccattgtagaggtatgggaggagcaaggtgggagaaataccttaaaagtaataggtttgccacacagagacaaaagaataatcagagcacttagaagctagaggaagcttatgaaagaatggggaaaaaagtgagcttctcgttccagggatccttcctgttctctrttttcagtgtgggcaagcaaaccagggccctatggactctaatactaaagaatgaattatagacctgaatagtaatgtgatagggctagtgatttcatcagtgaccacggtccttgtcattgctttttagatgtatgtgtgtatttgggtgtgccaatgtattaaataacttatttgttttaaaacataaattgtgttttttcaaaaatactcatgatgaatttggcagtatgagaaatgcactttatatatatatatttctgcagtcgtagtaattgaataaacaaataggttacatcattaatttttgcagtcatcccatgtactatcactcttagtttggtccttttccatcaatcttttagacctttactcaaattattatattaaaaaaatagaatttttttaaatgctaagtaatgatggtatttataaaaagttgcttactttattccacatttggttttaagtttttttgtttcgttttgtttctaagagtcagtctctctatgtcgcccagcctggtgtcctcccacctaagcctctcaagtagctggaactacaggcctgcaccaccgcacctgactgaaaacactgattttttttcacttttctctccaaacttgtttttccatttttcttccagcctcttatagttcattttcatatattagtttttattactttgtaaaggcagtcgatttctttttgttctaatttatattttttcagaaattagattttaatcttgatattttttagttttgtttaatgcctacctattataaattagagatttctatgccttacttgtcaatgggaaatgttataccactattaagattaaaaagcatagtaatgaatatttttacagatgtatttgttgttcctccagaccaatatctaagcttcaatgcaaagctcagtttgattttagaaatatttcacatgttctcatacttccttatccaaacattctgaagagtttctatgcttttcatgtcctctgcctctcaactgtacttttatgacattaatgtccttagagttgtagtgttggactagttttccagaatctcatggtctttttaaaacttattttgattccatactgttagctttagatttttcccaagttcactaaatg

SEQ ID NO: 24755 - DNA, 579 bp, Homo sapiens
atgtttaccttccacttttttggttgtgctgagatttttgttttgactgtcatggcttttgatcgctatgctgctatctgccaatccctccgttacactgtcatcatgagtgctaatgcttatactgtgctggcatcactgtcctggttgggggccctgggtcattcctttgttcagaccctcctgaccttccagctgcccttcygtaatgctcaggttatagaccattacttttgtgatgtccacccagtcctaaaacttgcctgtgctgatacaactctggtaaatatgttggtggttgccaacagtggtctcatctccctggggtgtttcctcattcttttggcctcctacacaagtcattctgtttagtcttcaaaaacagtctgcagagagctgacacaaagttctctctacctgtggatctcatctgactatagtaactttcttctttgttccgtgtatctttatttatctccatccactactttcccattggataaagctgggtctgtgttctataccaccatcaccccaatgctgaacccactcatctatactctgaggaatgaggagtaa

SEQ ID NO: 24756 - DNA, 801 bp, Homo sapiens
tttttatactcaaggagattctttgacttcagaaggtcaccttgatgacacttgggtgactgtgttcgggttttctcaagcctctgcttcctacatattattacaatttgcacagtatgggaatatcttaaaacacatgatgtctaacacaggaaattgaatgtatattcattatcagtctaaactgcaggctcggaaagccttaaccaaagatgggaggatttttagagaattcatcatgattggtgtaaaatcctgtattgactaaactgtaatgggaagcactgacagacgtgctttatcatctccatctttcgcctttacaccaccaatcaaaactttaggtacactagcacaacctgaaagtactcctrggatttctgccatgagacctcttgctacagcatacaaagattctactagtgattatcaggttatttctgacagatgaaaatcttgtatccaaagcaatggagtacatgtctggccggtagtagaagaccaaggaggaggttgttacactaaaacagagttagcagagtgctgctggttccttcggttagttatataactgttcctgcagtattggacagttatacttcttttaggaagaagcctttttcattaaagatacagcctattttgtagctcacactttagaagatgcttgagatacattttaaagaaaactaaaaatccctgtaaatagaattttgtgctttctgtaacagtgcatgcttcaacacagaaaactcagcattgattattgtaaattaagtaactgaaattctggtgagactt

SEQ ID NO: 24757 - DNA, 579 bp, Homo sapiens
gactaagtgtgtttttgaagtgggcagtttcaattaaattttccaaaacattttttgtaaacctttttcttctgataacttagaaatcagacaacagccacccctgacatagtttgcagcatgtcttcaagaagaaactgtctgcaaggaaggtctgatatctcttatcatcttctgttagacaggggctggctcactcagtcaaaaatagttaagattacctctttgaactttcatttcttcctgagccactgagtgaatccagagaccttcagctgtgtcaggccatggttacttctcaaggaaccagtcggacgtgttcctcaaaatgtagattctttctcttgatgaggacacactgcagcataatataytcctttaattattcagctgatttaatgattcaagatattatctatgtaatgaaaaagagtcacctggtaacgacagttcatatagctgcatgtgacatatgctcattctgttatagcaagacactacataatgttgtgatatatctatgtacctgtttatcccatgatagactgaatgtttgtgtctctcccaaaatttaaattg

SEQ ID NO: 24758 - DNA, 1191 bp, Homo sapiens
ctgccttgatggacaaggagaaaagcagggccctgatgagggagccccgcactgccaggatggagcaggagtgtcaaaggaagccttccaacagcggtggcacaggcgccaaggcarcaaggaagggtgggagctctgcaaggcaccgggcactccaggcagaaggacctgtgtggggaaaagcaaggcagctggaaaaagcaagcggagctgcgaaggcgccaaggtataaacacagaccaagagccaagggtggggccggtacagggggtcactgggagatgccagcaccctccacccaggcgtccttcggggccagccaacctaaggaaggaggccaggcctcacgcccctctgtgcctgacccctagccacactgccctgtggggcccggcctggtttcccctccactgctcagggcggaaatccagcaggggcagccaggccgacatccaaccctcccaccgccagggcctgggccacagcccctcttccggggcctttaacgaagccataaatccccccgcagggccgtgggaggggcggcggccctgcacatgtcccggcggccggacagaggccggcatctctggctggcggtgactgagcgccccgacaccccatcactcattccccgcgcccagctgcccccgcctcggcagcagcccatccatctcagccggcagctttcaagtccggccccaggcccctctgcttagtgttaagatgagcccggctcacgcggactgttcttatttatctggaggttcgtcccactgtggccatcactctgcggggcggccccagttcccgggacaggcccccagaatgcgatcctcctccgtttcctttcccgcccccacctggcaacgcacagagaaggcctgcagcccgagggcggatttgtttcagtcgcaggtcgctgggcgttttgacctctgctgttttcttggaaggctttcagcagccctttgaggcatcagtgtccgtgctctgtagcggtggaaactgaggcacagagagggaagctcagagttctcctggctgtctggctctgatgcaggaccagtggccaatctttggccaaatcctgcgaggcctcctggggcctttgcatggctgccttgcaagtttggtcagatcaattttcgtccagcattctctgctacactgcaaagtcctccagggcaa

SEQ ID NO: 24759 - DNA, 500 bp, Homo sapiens
ctcacaagtcaagctaacccatgggtgaatttttttgctcctctgtcagttgggtacaagggaccctccatatagacatagatgagagccaaaggaagatgccagtgaaacagtggccaatgatgtggggagctgtgtgatttgyttatgcagtttatttctgctttctggccatactgggcccacccaatctgttggctctgcaatagtgactgatctcagctaatgatgagcagttctggcacatgatgtcccatagtcaagtaccccatctctatcagggcacagtaccattccaggagttatttttgaaatgtgtataattttccactgcagatggtatgagcttgctccagaacttcagaggtctacattgagattctccttttgaagtttaccataacatctacacagcatttttttcccaccatggagagctccaataccatagggtctattgggttgtatggcccaagcagcagggcttcttgcattatggc

SEQ ID NO: 24760 - DNA, 500 bp, Homo sapiens
ctcacaagtcaagctaacccatgggtgaatttttttgctcctctgtcagttgggtacaagggaccctccatatagacatagatgagagccaaaggaagatgccagtgaaacagtggccaatgatgtggggagctgtgtgatttgtttatgcagtttatttctgctttctggcyatactgggcccacccaatctgttggctctgcaatagtgactgatctcagctaatgatgagcagttctggcacatgatgtcccatagtcaagtaccccatctctatcagggcacagtaccattccaggagttatttttgaaatgtgtataattttccactgcagatggtatgagcttgctccagaacttcagaggtctacattgagattctccttttgaagtttaccataacatctacacagcatttttttcccaccatggagagctccaataccatagggtctattgggttgtatggcccaagcagcagggcttcttgcattatggc

SEQ ID NO: 24761 - DNA, 1103 bp, Homo sapiens
caagcccagggattccctgcctctctcccatctaccagggctgagctcatctccccaggtggagtcccagccaagatccaccatcccataaagctggcaaaggctggggaagtgcctgccatctgggcaaagatgcaggttccctttggaggtgggggtggccctgtgtcaacccacaaggctggccattagtgggggcctggactgggcccacctggtggatgacccgtcttgaaactcccacctgtatcacagccctgggttcccacctcagccatcatcccataatctcaggttggaggccagcagctgccatagagccccgagcctggggctggcctgggcacagggtctccatcagaatcattctatcattatcaaagaccagagccaggaccggcccaaggcacgaggcacctgcctcaggtgtaacacatgaggaggcaccaaaaactcaggcgggtagatcacctgaggtcaggagtttgagaccagcctggccaacatggcaaaaccccgtctgcactaaaaatacaattagctgggcgtgttgatggggtcctgtaatcccagctactcaggaggctgaggcaggagaatcacttgaactcaggaagcggcggtggcagtgagccaaggtcacgccactgcactccagactggacaacaagagtgagactccgtctcaaaaaaaaaaaaaaaaaaaaaaaaaaaaattaaggccaaaaatccatgataactgaactattaaactttgaaataaaatgttgacagtatcagtattatcaatgtttccttttgccccagggcccaggtggctcagtagggggttgcctctctccctttacccttgtacttgctaccttaaagaccactgtgactgatgactacaaccacaaaggcacggggaccaccccacgtctgccccccagtgtctcccaccaraatcatcactgaggtattatctgtcctctcctctctcccagggaaacgggccttgtaattgacctcattttatacacacggaattttatatgaggccttgattttatccatcagggactggaagccaaatgggggcaggtgagctatagggatatttt

SEQ ID NO: 24762 - DNA, 602 bp, Homo sapiens
tgcctgttggggtttctgggcttagctaatggcagattacaatggtggtctctaggtgctgaagcatcccaagatagatgttcttgaccctgtctacactctgtaaccaacggttgtggtcatattagtgtaagataatactgagaagtctctatcgtagaggaagcctacaaaattagcatttgctctttagacaaaataagtcttgtgtttacaactctatcactaaaaatgctgacctcttaaaatatattaattagccaaccaattgcccgctagatgcacatacaaataattaggcccagatgttgtttctggccatcaggaactgaaactaatgacctggaattcatgttctcagagtggcgtccttaaattcttccttkaagaacaatttaaagcattggctccgcggaaggtaaattaacccccttccacttaaaatatattgcaaactagcaattaccaggtacccaagaaaataattcattgtttgaatagttgctctcctaagatttaataaaactcaaaacccttcatgttctgcagtgaaataagccacaaacatgaatgttttatagggtgattaaaatttctgctct

SEQ ID NO: 24763 - DNA, 644 bp, Homo sapiens
tcagtatttgccatatgtgctagcagcatcagcatcagttgggagattatggtggcctccatgtcagacctcctaaatcggaatatcagagaaggtggcccaggtaagtgtgctttactaagttcttcagaagattcttaaagacaatgaagtttgagaagcactatcttagggtacataagcatgaagctagactggmggagctctgtcattgactaactgtatgatggtgagaaagttgcttatctcctctgagcttctatttctttttctgtatcatacgtttgttgtgaagatccaacttttagtatattgcaagtgcatggaactttacaaaaactcagtagacattattactattattgccaatattgatgttgctgtttttttaggtcttaccatctgcagcatgttgctggctggtgaaatgacgcctctcctgagggtgttatatgcgttaacaatttattcttgtacagctggtgattcaatgtttgttatttaagtggtaaaattgttcactacatttattaaatatttaaatggtaaataatgtaactgcaaataaacaatggataaaacctaaaaatgctgcataacaaggcaccagttgagattgcttttaacaattttagaatccatag

SEQ ID NO: 24764 - DNA, 557 bp, Homo sapiens
attacaaatatgcagttttaacaccagtgaatgttttccattccagctcgcagggaataaaatgccagtgtgttttcactgccttcttgcatatgttggtagtaaaatattcacgacttggagaattatgcagtgtgttttcaacagcagcttttgaaagccactttttccattaaaactgtcagtttggtaatatagccatgatttcaaagcaaaggatcattatggcgcaaatcaaagatagattacatattttatgtttacatattctaggaccttcacggtgtaaagttgtcgattttttttagactttatgtaagtctcatccattttggaattggaatgcatcacctttattatgaaccaaataaaaccagtgtataatatatgtggcattgctaggtattatacctgctctattcactagyaactcccagggaaaagaatggcaatgagaactggaacaagcccttccctgttgctttattttttagcaagtggacccctgtgtatcttctagcttccttacattttggaaagatatgcagatatcccca

SEQ ID NO: 24765 - DNA, 953 bp, Homo sapiens
cgactatgtcccagggactgtcgtaaacgtcatgtaatttattcttacagttcccttagatagttatgatgatgatgctcatttttcagatacagcgactggcatccagagatctgctgtaatgaccccacaaagctagtaatttcacaaagctagtaagtgatagcccgggttgcaccaggtctcctgactctgtccagtcctctttccgccatccacagtctgtctcaactgtcagatatgtagaaggtctttaaacatgcgagctcacttcccacttctgaggctgtgaggaaatggtactcccttcactttgggcataaamgcaatgaacataatccaggatatgagagaaaattttctgccttgtcaaatactccaaacatcagtctatcattggcctctagggaatcagttcattattacaagctgagtgtgcagacagtaagtagacaattacaggaaaccctagggacatctgccagggtcttgtagtagacatttttcattttttctggcctcccaactagggaactccatggacgtgattagtggaggagcccacctcccacagaaaagctaaaaatgcctgccccctcacaggtagggggttcaggtatgagatctaggtattgccaaacagcccatccaccctaagtttggatcataagcttgtggtgataagacgggttctctaggaatcctttctgctatgggtgggggcagcaggggcagccagccaccatttcagaggggacagggccatagttctagtggctatttccagagcccaatgtcagtggtgtctgtgaggcaatctgcactgtccggtctgatggtgcagtgactatgtctttacaaggccagctctatgctttgtgattaaattaaccaaacttagcttctgctgctctacaactgaaggccctcctagcttgtgcaatctgataagt

SEQ ID NO: 24766 - DNA, 585 bp, Homo sapiens
agccagacttttggagtattgctatctgtaaagggaaaatataaacaaccagaacaacctatctgagaatggaactcccaaagcagtatgacttagatcaaatgatttttaaggggtttcagcccttaaatcaaatgatttatacaagggagggggttccatcatccaggggactccctcctgccttataaatcatgtgatctaagggctgagaccccattgtgaacagagaaggcctgccttcgaatctgccaccaactggggatgggaagcaacctttgrcaagatagttattctctttgtgaatccaaagctggtttttggaaacctgagcctcagaaattggcgcttagaatgtgtagtcctacattgggcaacgagactatttctgtgctgggagtatagccccctcttcccatatcacccatttacctgcctcgcatcccatcagctgggcgggagggcaaggccaaagggcttccatccttcactgtgaggaatgcaagttccctacacgagagggagagagagctcattatcaagaggtctttcctccccaggcagcttcagagaaccatctgttga

SEQ ID NO: 24767 - DNA, 544 bp, Homo sapiens
acttacttgattctacctgctaacatttcctggaggaagtttgggaaatgccgatttagcagattcttttgttgtgccgtggatggtgctggttgatgtgggcaaaacaaagaacacgtgagtcagatccgcctggggctcttactraagtgcaggttcccaggtgccactttaggcttacagacccagttgtggggtaagcctgggagtcttttagcaggtgattctgccacatagtatagttggaaaacctctgggcatactcattgctggtccctctagaaatccaggtgacaatagccaatgagaagctccaagagacccagttgtccatggggtagagggaatgtgatattgaaaccaaagaagaaaatctatgatcagttttcagcagtgactgtcaagagaaggagaagggtgagttagcgctgatgctggctgacaggtcagcgggttggtttcaccaaggagtgtgatgaaggctgatgttgtctgtgggaatgtatgatggtaactggtttgtagctaatttggggaagcagtg

SEQ ID NO: 24768 - DNA, 431 bp, Homo sapiens
tcttattttatattttatcagctcgcatggtcagtaaaagcaaagacgggactggaagcgatgacaaaaaagccaaggtaagctgacgatgccacggagctctgcagctggtcaagtttacagagaagctgtgctttatgtctgattcattctcatatataatgtggggagtatttgtcactaaagtacagctgtcatttaaagtgctttgtattttggggcaggcttttaaaaagtccagcatttattagttttgatacttaccccagggaagagcagttggcaggttcatgaagtcatgctcctaattccagctttcttagtgtactttcagtgagaccctgacagtaaatgaaggtgtgtttgaaaaccaamcccaggacagtaaatgaaggtgtgtttgaaaaccagccctaggacagtaaatgaag

SEQ ID NO: 24769 - DNA, 431 bp, Homo sapiens
tcttattttatattttatcagctcgcatggtcagtaaaagcaaagacgggactggaagcgatgacaaaaaagccaaggtaagctgacgatgccacggagctctgcagctggtcaagtttacagagaagctgtgctttatgtctgattcattctcatatataatgtggggagtatttgtcactaaagtacagctgtcatttaaagtgctttgtattttggggcaggcttttaaaaagtccagcatttattagttttgatacttaccccagggaagagcagttggcaggttcatgaagtcatgctcctaattccagctttcttagtgtactttcagtgagaccctgacagtaaatgaaggtgtgtttgaaaaccaaacccaggacagtaaatgaaggtgtgtttgaaaaccarccctaggacagtaaatgaag

SEQ ID NO: 24770 - DNA, 431 bp, Homo sapiens
tcttattttatattttatcagctcgcatggtcagtaaaagcaaagacgggactggaagcgatgacaaaaaagccaaggtaagctgacgatgccacggagctctgcagctggtcaagtttacagagaagctgtgctttatgtctgattcattctcatatataatgtggggagtatttgtcactaaagtacagctgtcatttaaagtgctttgtattttggggcaggcttttaaaaagtccagcatttattagttttgatacttaccccagggaagagcagttggcaggttcatgaagtcatgctcctaattccagctttcttagtgtactttcagtgagaccctgacagtaaatgaaggtgtgtttgaaaaccaaacccaggacagtaaatgaaggtgtgtttgaaaaccagcccyaggacagtaaatgaag

SEQ ID NO: 24771 - DNA, 620 bp, Homo sapiens
tttatgcatgtcatgaacttgtttagcagctgcattyatgtgagatgctcagttgtctcccgatgctgcctgcctccctgtgtgcatctttatgtactatatgccctcattaattttggaaagaattttaaagagtgctcaaataagacttccaaatagtagccggtattttttttctttaggtgttggagtgcaaagctcattgaagcaacccccagatggctgaattgtatcctaaacacagtcctagataagataaaagactaactgatgcctagaggtctcaataaaccttctaactcggttaaaattttgttcctgcttccttcctgcagctctaggtcccagttttaagttctgttcttcatctccaaactttagacattgggcaaactgctggtttcctttatgtgaaaacttcatcaacttgtgtttgattgtcacagagtagtagcttggctaaatttgtctccacggttttttccccctaaaggaagtctacagtaatcttgtagggtggggttagggaggttctgtattgtttggatactgtgtataggataatgctgtgtctaggataatgtgtataggataatgctgtgtaaaggaggatgtaaaaa

SEQ ID NO: 24772 - DNA, 599 bp, Homo sapiens
aggaagtctgtctcttcatttgctctttgaaaaagtaattcacattatcaggaaaattgggggtaactataaaggccattttttgtttctggtaaagaatatttaataattaatggacacataattgaacaatacagatattatatggagagaagtattccctttttaagtctcttctactcttttgggtaaatcaaagagaaaattccagtttggtgttmatatgactttaagttctccctcactctgactaatatccctttttaatgcaaaaagtagacctcaggctcaaagccctgttgttggtagtacctgccccactctgacccagacaagactctcaatgataagaattttaagtcagaagtgaaaggagaaaaaaaaaatctcaagtgtcttggtgagaaaggatgtcactcccttatgttaggcccaggcccagttggaaagaagacccagagagaagtggctctctcattcatttgtgtctattatttcattgatttctgagcaaattagaggctctgtggaaaaggactggcaaggaaatatggaacagcgtgaatgtagcattctacttagcacgaggaaatgtgtta

SEQ ID NO: 24773 - DNA, 723 bp, Homo sapiens
gaggacttctccgtcaccccagtcactgcctccatcccccttttagctgttcttctctttgacatattagttgacctctctaattttgtttcttcatctgtgaaatccagatacctctactcataarcatttcaagcaccaagcacctgactgttatgttctctttcccttaaaaatatacatcaacatgctagaaactgctaaggaagaggacgggacagaagagaaaacaaggggaaaaaaaaaaaacagtaacatccagaaaacaaacgcttccaagagcttttctaagttaaaagatggctcaccaatggcgaaggcggtgtccctgtcgattgtggccgcttccttagggtcaaataacaaagaagcaacttcatctctagataagaggctggcatcactttgagggagggcgagtcgttgcagctgctgggctaaggacgtcatctttcacgccagcggagttttaatgacacgggctaaaaaaacgtaagcactttgataagtttctacgaaattataaggcgcctcgtaaacaaacaattctcttctgcactcagcaccgtcatggacacacaacgcgggtgtcctgagatttgtggaccccggagatgcaaagacgatggcagcagcgttaacaactaattacagtagcggcgaccgcgccaaggctttccttcaaccctgattccgcagatatccggaaaactcttaccctcc

SEQ ID NO: 24774 - DNA, 723 bp, Homo sapiens
gaggacttctccgtcaccccagtcactgcctccatcccccttttagctgttcttctctttgacatattagttgacctctctaattttgtttcttcatctgtgaaatccagatacctctactcataaacatttcaagcaccaagcacctgactgttatgttctctttcccttaaaaatatacatcaacatgctagaaactgctaaggaagaggacgggacagaagagaaaasaaggggaaaaaaaaaaaacagtaacatccagaaaacaaacgcttccaagagcttttctaagttaaaagatggctcaccaatggcgaaggcggtgtccctgtcgattgtggccgcttccttagggtcaaataacaaagaagcaacttcatctctagataagaggctggcatcactttgagggagggcgagtcgttgcagctgctgggctaaggacgtcatctttcacgccagcggagttttaatgacacgggctaaaaaaacgtaagcactttgataagtttctacgaaattataaggcgcctcgtaaacaaacaattctcttctgcactcagcaccgtcatggacacacaacgcgggtgtcctgagatttgtggaccccggagatgcaaagacgatggcagcagcgttaacaactaattacagtagcggcgaccgcgccaaggctttccttcaaccctgattccgcagatatccggaaaactcttaccctcc

SEQ ID NO: 24775 - DNA, 611 bp, Homo sapiens
attttcctgaataccagtcagcaggagccctggggaagaactcttggtggaggaaatcccagcttgattccctccggtgtggagttggcaggaacattggaartgcccagcttctctgtttttattgcatatgttaatcagagttttccccatatgtaggggaaagctatagctgtacctgactgtgggctgttccttacttagaattgttctctggtctgggacagcaatgcagagaatatggtgtattacagagagctgtttcattctaaatgaatgcttgcatctctgtgtgtaggcagccatttatttgggtccctgaaaatagtagcagtatggtgaacttaaattaaagaatatttattttgctgtctgtgtagtacaagctgcttccccagttgccggatgggttgagaggagaatcatcagtgtgcttttcttttagcttgaattcatccctaagaagagaatgaggaaagtacaataaatgctgctgctgctgcctaaaactgagcaacagttgggtctgccctgtcacagagccacatcttgcacgtaattacccaggctccaagggaacaagttattttgagaagcatagctcaggatca

SEQ ID NO: 24776 - DNA, 1218 bp, Homo sapiens
accttgaccctccaaatatgtcatctttcatagatgagattagagaagttcagagaaatgaaagaggacattttatttttggtagcagccattgcggtgactattggacattctctcctcctctgtgaagattggggtcttctcagcctttgtcgacctataaagttcatttgtgacttttcagtaacttggtgtcctggttgaggacatgttctgcaggggctgtgggatagataaaggaagatgatcatgatgaagaggagccaggaaaatggagcttaaaatgaagtacttatgcagaattggtgacacattcctctgctttctagagttggtttcctaaaggagacaccacaaagattcaggtcaattatatgatttgaaagatccaaatagccaggatgaatgagttatgggaattgctactatcaaatgatcagaattgggtggtaggcttgggaagattttccatctttcacattcactcttcacatatgcctgatctgtattgttcattctgaaagtctttgcaggtttccttctgcctgagtaaagattgttccttgtaatctctgaactctcactggatagctttgttaagtacttttgcttgactgaaagccctttttttgttgatagggctgaaagggtaagcttaaaattggcagctgtattatctatgactagatggtaagctttttgaaagcatattagtactgaggarttctagcaagtttaatgtccactttgccactgaccataagacatgtgttaggccagtttgggaagttaggcagagtgaaaatcctggatattataaacacagtgatggaattggtacgacacctttatttcactaatactatcattattagaatacttagagttctgtaagacagactatttttaaaagtactataggcataattttaggaaattcctgaggtgatttcctaaaaagaggaattctttatttcttagtttggacttccatatcttcaaacatgtcaacaaatcaaatattagtatgtcaactatcataaaatatttcctgagcatttgcttttgttctggggaactcaagatagccaagaggcctagcagaaacagtggaaaaaagagctttactacttaataatttattattgtaaatgctctctgggcatggtggcatgcatctgtatttctagctacttgggaggggaggctgaggtggga

SEQ ID NO: 24777 - DNA, 1218 bp, Homo sapiens
accttgaccctccaaatatgtcatctttcatagatgagattagagaagttcagagaaatgaaagaggacattttatttttggtagcagccattgcggtgactattggacattctctcctcctctgtgaagattggggtcttctcagcctttgtcgacctataaagttcatttgtgacttttcagtaacttggtgtcctggttgaggacatgttctgcaggggctgtgggatagataaaggaagatgatcatgatgaagaggagccaggaaaatggagcttaaaatgaagtacttatgcagaattggtgacacattcctctgctttctagagttggtttcctaaaggagacaccacaaagattcaggtcaattatatgatttgaaagatccaaatagccaggatgaatgagttatgggaattgctactatcaaatgatcagaattgggtggtaggcttgggaagattttccatctttcacattcactcttcacatatgcctgatctgtattgttcattctgaaagtctttgcaggtttccttctgcctgagtaaagattgttccttgtaatctctgaactctcactggatagctttgttaagtacttttgcttgactgaaagccctttttttgttgatagggctgaaagggtaagcttaaaattggcagctgtattatctatgactagatggtaagctttttgaaagcatattagtactgaggagttctagcaagtttaatgtccactttgccactgaccataagacatgtgttaggccagtttgggaagttaggcagagtgaaaatcctggatattataaacacagtgatggaattggtaygacacctttatttcactaatactatcattattagaatacttagagttctgtaagacagactatttttaaaagtactataggcataattttaggaaattcctgaggtgatttcctaaaaagaggaattctttatttcttagtttggacttccatatcttcaaacatgtcaacaaatcaaatattagtatgtcaactatcataaaatatttcctgagcatttgcttttgttctggggaactcaagatagccaagaggcctagcagaaacagtggaaaaaagagctttactacttaataatttattattgtaaatgctctctgggcatggtggcatgcatctgtatttctagctacttgggaggggaggctgaggtggga

SEQ ID NO: 24778 - DNA, 555 bp, Homo sapiens
tgaagcatgaccgtccctaactcagttgttttagaggggctgctatgggtgatctctctagcatggaggactgtaagtagatttcataacaacagagaagctgatgatggagacaacttctcttctccaccttgtgatcatctaaccgcayagaatctcccaaactaaagggctaaagggatttgttttattatgggaaactgtctctgatgctagtttttaaaagaaaacttgtatgcttctctccagacacaaaattaataatttcttcctgagcacctttcaacaagtttggctggaaaaggttaatgaaaaaactcagtatgacaggcttatacccattttaatggtaatgtaacctgtggagagacctgctcattctctgcacactcctcctttattgaccatgatttaacgttaccataagaacacgaatttgtacaatttttaggaagaattctgattggtcagacttgaagaaagatggcaagggctgtgtcctaccgaaaaccatgaccggagtttaatggctctggtgttgacttttatcttcct

SEQ ID NO: 24779 - DNA, 435 bp, Homo sapiens
gaatagatcacattttccacttcagtaaataaaaaagacagtatggtaatttatttatttatttatttatttatttctctctttctctttctttctctttctttctttctctctctttctttttttttaaaaagtaccaaatctatctttaaacagagttgaacattttaatatagtttagttcaacaaacttttgktgaattccatctaggactcaggcgctccatcagatcccagggacaccaagatgtgtacaataggatcctgaccttggggagctcactacttgccttccaggaaagtgtgaattagccttagatgcacacctggtataaaattccttgctaagactacctctcagtggcggcaagattctgacatttccagaccctgtttggtctattcacatgtatgacacgcagcacactgtcacaa

SEQ ID NO: 24780 - DNA, 435 bp, Homo sapiens
gaatagatcacattttccacttcagtaaataaaaaagacagtatggtaatttatttatttatttatttatttatttctctctttctctttctttctctttctttctttctctctctttctttttttttaaaaagtaccaaatctatctttaaacagagttgaacattttaatatagtttagttcaacaaacttttgttgaattccatctaggactcaggcgctcyatcagatcccagggacaccaagatgtgtacaataggatcctgaccttggggagctcactacttgccttccaggaaagtgtgaattagccttagatgcacacctggtataaaattccttgctaagactacctctcagtggcggcaagattctgacatttccagaccctgtttggtctattcacatgtatgacacgcagcacactgtcacaa

SEQ ID NO: 24781 - DNA, 905 bp, Homo sapiens
ttttggtgacaaaactgttctgtatgttgtttgtatcaatgtcaatatactggatgagatattatgctatagtcaccaagatgttaccttttaagaaagctgagtaaaaagtatgcatgatctcgctgtattatttttttacaactgcgtaagaatctacaattaattcagaacaaaatacataatttaagaaaatatcttgtcctttacttttccactaattattttattctatggcaaaaaacagaccatttttaatatagatgtatccaaatgacatggctttgtccagcattgtggcatttttttttcttcaggattgttaacaacaagtgtattgatttagcctgagaacacaaacgtgtgtaaggtgtaccttttaaattatttttaagggaaaatatccctaaaaaacagtatctacaggttatgttaagacagaatggccaaaacttcacaactaagcaaacaaaaactataaactgttgacagctgccctcttctttacatctccataaatgggcaacagcaaactggctatctgaatagatgctattttcttttggtttctcagaataatgtcttctattacccactagttgtaggtttttcccctaaatttaaataaatcatgccccctatgctccacctcctactgatttttcaactgggggtcacatgatacatctttatagttaactaatgattctgagccatttctgcccctgctgtgtcactagttatatctaaaagccagagttcacataaaattattaatgtcctttattatatagcaagataaataaaacttctattaaacaacaaaaagaggcaagttctrtggggttttttgtaattttatttttaattttatgtttgtaaaattactctagcagcagtttgtg

SEQ ID NO: 24782 - DNA, 864 bp, Homo sapiens
agtcttttcttgttgcttgccttgaagtgacctctcactatgcttccgccaatgggctaatcaacttcttcaggcagcagcttgaaggcagagtccaataaacttgttggagctcagccacagcatctgctgtgactgctcctcctcatccttcctcccaagaacctgcattgcatggtcctgcctgccccacccagagtgcccttctggttgccggcttggaccacaggctctttcagaaggctggtctggaattgctactgccccttcatgcatgtccaccctctctctgtcttacaattggctgaggtgtttctgtgcagctgatttttctgacccatattcacatcgtttacatcccaggtagaaaaataaagatgacaacaaaggagaaaaagtaccccagccaaattggtctagtcactgtgcctgaaacacatgttgtgtgttgtcatctctatgtttttgcttttatcctcctgcctggaattctcttcctctcctctgtttttcaaaattaaatcccagctgggctctgtggctcctgcctgtaatcccaacacttcggaaggccaaggtgggaggatcatttgaggccaggagtttgagaccagcctgggcaacacagtgagacccaatcctgtttctacaataacaattagcaggatgtgctggcatgcacctgtagtcctagctacygtatggcaggataaggtaggaggatcatttgggcccaggagtttaaggctgtagtgagctatgattgtaccactgcacttcggcctgggtgacagagtgagatcctgtctcttaaacaaacaaaaaaacccacatggcttaaaccccctcttcactttactccca

SEQ ID NO: 24783 - DNA, 1227 bp, Homo sapiens
tttaaagtatctttaaggccaggtgcggtggctcatgcctgtaatcccagcactttgggaggccaaggcaggatgatggcttgagcccaggagtttgagaccagcctgggtaacacagcaagacactgtctctacaaaataataataataatactacaaaaatttgctgggtatggtggtgtgtgtctgtagccttagctgctcaggaggctgaagtaggagaatcactttaactcaggagtatagggctgcggtgagctatgattgcacccactgcattccagcttgggcaacagagacagaccttgtctcaaagaaaaaaaaaragagagagaaagaaagaaaataaaaagaaagtaactttaaagtctgagagcttatgtttctatgataaatggccatctcagcctagaaagctttaggctcagggttcaaaattgaaatgtctgcaataagaagtaatataaatgagagaaataggctgggtaagacaatatagagtgatgaaaactgcaaacctgtcccgtttgaagtggaaagtcactgtttggtgccagctaattattgccatgtagaaattcaggctcaggtttatccaatcttctgatttttttaaaaaaggatttttatgaaagataggataattttaaatgttggtttcaacacatttaaatcttggcttctactgattgcagcagaaacagcagctccttggtggcctattctacagcgttgttaggggaatcattactacactactgaaagttcaattaaaatattgttgctaacattctgacatccaaacagaacacctcctcaagctggatttttctaggaagccaccaagtatgcaagctctgtgttaagcccttgctacagctgaagctctgtctttgaatttccagtagatacttttctgaacaacagtgattccagggaaggatatccagtcaagccgatggatgtagctaccatgatatgaacttgggggatttggtgacttctccctaagcacgccttggagccaaggtggagatgagttcagaggctatttggaaggacttgctttgtctctgtctcctccatgaacatcacatcaactgacaaagcacagagcatgaggggactttcatgcttgagacatcatttagcaccaaagtagccctcacgactccacctttcaatatattcctaagaggaaacaaaaaagataaaaatgggctgcaa

SEQ ID NO: 24784 - DNA, 1227 bp, Homo sapiens
tttaaagtatctttaaggccaggtgcggtggctcatgcctgtaatcccagcactttgggaggccaaggcaggatgatggcttgagcccaggagtttgagaccagcctgggtaacacagcaagacactgtctctacaaaataataataataatactacaaaaatttgctgggtatggtggtgtgtgtctgtagccttagctgctcaggaggctgaagtaggagaatcactttaactcaggagtatagggctgcggtgagctatgattgcacccactgcattccagcttgggcaacagagacagaccttgtctcaaagaaaaaaaaaaagagaragaaagaaagaaaataaaaagaaagtaactttaaagtctgagagcttatgtttctatgataaatggccatctcagcctagaaagctttaggctcagggttcaaaattgaaatgtctgcaataagaagtaatataaatgagagaaataggctgggtaagacaatatagagtgatgaaaactgcaaacctgtcccgtttgaagtggaaagtcactgtttggtgccagctaattattgccatgtagaaattcaggctcaggtttatccaatcttctgatttttttaaaaaaggatttttatgaaagataggataattttaaatgttggtttcaacacatttaaatcttggcttctactgattgcagcagaaacagcagctccttggtggcctattctacagcgttgttaggggaatcattactacactactgaaagttcaattaaaatattgttgctaacattctgacatccaaacagaacacctcctcaagctggatttttctaggaagccaccaagtatgcaagctctgtgttaagcccttgctacagctgaagctctgtctttgaatttccagtagatacttttctgaacaacagtgattccagggaaggatatccagtcaagccgatggatgtagctaccatgatatgaacttgggggatttggtgacttctccctaagcacgccttggagccaaggtggagatgagttcagaggctatttggaaggacttgctttgtctctgtctcctccatgaacatcacatcaactgacaaagcacagagcatgaggggactttcatgcttgagacatcatttagcaccaaagtagccctcacgactccacctttcaatatattcctaagaggaaacaaaaaagataaaaatgggctgcaa

SEQ ID NO: 24785 - DNA, 801 bp, Homo sapiens
gccaaggactctgatgtgaacacccatggggtgctgcattttgcccaactcccccttcctggctctcattctttcagaaatttccagaagtctaacactaatttgatatactaattcacaatcaggaatgaatggatgtgttaggcccttcttttgcatttctgtaaagaaatacctgaggctgagtaataaacaaagaaaagaggtttaatgggctcacagtcctgcaggctgtacaagaagcatggtgctggcacctgcttggcttctggggaggccttggggagcttttgcttatggcagaagaggaagcaggagcaggcacatcacagcaagagggaaaacaaggggcctgggaggtgctgcacactgttaaacaaccagatcttgcaagaacacactcaccttcttgaggacagcatcaagccattcatgagggatcttcccctgtaacaaaaatacctcccatcaggccccacctccaacactgggaataacatttcaacatgagatttgaaggggacaaatatcygaatcatacaaatggattgatatactactctccctcccccaccacacacacattatgtttacattttagctgctgcctgcaatgtctaaccctggggtagttagccatgcaagaggctgaggcattgtgctggtcctggaggaagtgtcatttctgtttggggtaaagagaaccttccaacctttcgagtcacaatatagaggcatggcttggtctgcctaaggtcagaaacgttgtcctacaggtcctttatcagagcacgtatcttt

SEQ ID NO: 24786 - DNA, 1117 bp, Homo sapiens
agtccaaaattctgactaactgaaagctctggggtagcatgtcttgattgcatcttgacaagatttactgccggggggagaagttgtcttaacattggctgcaaagaaatgctgctatggaggcagagttccctgcactcgggtccgagcttccatctctcactggaaagaacctgaggactttcacaatgaaagttgatgtgtatgtgacaggcacaactatatctgtttcctctcttctctcttaattaattacatctcacaggcatacacatttgagaaatgtatatataagtgaatataaatacagagattaaaagctaccatccaaagaggtgtttagagttatgtatgtactcgttataacacctattagttaaaactaagaaaagtccattaaaagctaasttcctttcacagagtgaccagatttgagcttgagtttcgtcaaggcagcacaccacagcgctctgatttgccatggcatttcgcttctgaccacttgctgtattgagtatttccccaggcaaaggggcacacaccttagtaactgggctggagtctcacatctgcccagtagcacatttgcaaaaaaagattagctccaaataggtctccctggctctttgggggtcatggggcttctcccaggtacttgtaaccatcctgtcctatgtggcatggctgtcccacaccctccaccattgttccaggtgaggccagggtgaatctccagtcttcacagtaacattctctcctgctgctgaagggcaaatttcctgctttgtgctggctatgtaggttccctgggcactgaccagtttacagatcagaactgccttgagctctcggcctgtgaaacagactttaatggtgtcatctgttctgttttgtcaaagcctcctctctttgctcctgctcctgctttcactcttgtttcccttagggtgattttcttgccattaagcttctcagtgaatgctgaggggtttctcctgggtggccaccaaaaaaccctcttaagtctagcctcaacgccctctgtaggccccatgagacttagctcccttgccttctgtagctctggtcagggtgggttattgttgtccacctacat

SEQ ID NO: 24787 - DNA, 618 bp, Homo sapiens
tgtggacacatcacattagcagatgtgggaatgatagaggttattttgacatacagagaggagacaagaaaacggaagtgtaaccacaaagctgggttgccacatcctatggaggtgtaaattcataaggataacattgagtcacccagaaaagttgtattgtgtcttccttttaagaaacaatgtgggccgggcgcggtggctcacgcctgtaatcccagcactttgggaggccgaggcgggcggatcacgaggtcaggagatcgagaccatcccggctaaaacggtgaaaccccgtctctactaaaaatacaaaaaattagcmgggcgtagtggcgggcgcctgtagtcccagctacttgggaggctgaggcaggagaatggcgtgaacccgggaggcggagcttgcagtgagccgagattgcgccactgcactccagcctgggcgacagagcgagactccgtctcaaaaaaaaaaaaaaaaaaaaaaaaaaaaatgtggtggaactaaaagcccagtaaaagtgtaacatgaaaggaaaggctatgttatattcatccaatagggtgtgtgtttgtgtatgtgaatatgaagaaatttatcataaagaattggtt

SEQ ID NO: 24788 - DNA, 618 bp, Homo sapiens
tgtggacacatcacattagcagatgtgggaatgatagaggttattttgacatacagagaggagacaagaaaacggaagtgtaaccacaaagctgggttgccacatcctatggaggtgtaaattcataaggataacattgagtcacccagaaaagttgtattgtgtcttccttttaagaaacaatgtgggccgggcgcggtggctcacgcctgtaatcccagcactttgggaggccgaggcgggcggatcacgaggtcaggagatcgagaccatcccggctaaaacggtgaaaccccgtctctactaaaaatacaaaaaattagcagggcgtrgtggcgggcgcctgtagtcccagctacttgggaggctgaggcaggagaatggcgtgaacccgggaggcggagcttgcagtgagccgagattgcgccactgcactccagcctgggcgacagagcgagactccgtctcaaaaaaaaaaaaaaaaaaaaaaaaaaaaatgtggtggaactaaaagcccagtaaaagtgtaacatgaaaggaaaggctatgttatattcatccaatagggtgtgtgtttgtgtatgtgaatatgaagaaatttatcataaagaattggtt

SEQ ID NO: 24789 - DNA, 618 bp, Homo sapiens
tgtggacacatcacattagcagatgtgggaatgatagaggttattttgacatacagagaggagacaagaaaacggaagtgtaaccacaaagctgggttgccacatcctatggaggtgtaaattcataaggataacattgagtcacccagaaaagttgtattgtgtcttccttttaagaaacaatgtgggccgggcgcggtggctcacgcctgtaatcccagcactttgggaggccgaggcgggcggatcacgaggtcaggagatcgagaccatcccggctaaaacggtgaaaccccgtctctactaaaaatacaaaaaattagcagggcgtagtggcgggcgcctgtagtcccagctacttgggaggctgaggcaggagaatggcgtgaacccgggaggcggagcttgcagtgagccgagattgcgccactgcactccagcctgggcgacagagcragactccgtctcaaaaaaaaaaaaaaaaaaaaaaaaaaaaatgtggtggaactaaaagcccagtaaaagtgtaacatgaaaggaaaggctatgttatattcatccaatagggtgtgtgtttgtgtatgtgaatatgaagaaatttatcataaagaattggtt

SEQ ID NO: 24790 - DNA, 1812 bp, Homo sapiens
gggaagaaaatagccacagaaggaaagtacagggaggcaaacagtgggaggggccagctcatctcttttctccttccccccaaagactgctggttgtcagtgggcctataaaatcttttatgatcttaaaggtattttggaagactaagtcaatctttagcattcttaacctggagcaggggttctgaaacttgaactggcacattggcatcacctgggaactctaaaacacactgatgtctgggtaccaccctcagaaattctgatagaatttgtctcaggtgtggccagggcaacgggctttttaaaagactttccaagtaattctaatgagtatctaagtttgaggaccactgatctagatcaattaaccatacatacatatatatatatatatatatatatatrcatttttttttaaaaagatacatttaacacctccccccacccaataaaccttatggaaacccaatgcataaaaaagattaaagtggaggtgctttacataaggtgctcttgaaacctggctgagtaggcaccatttgctacacccactccccgtttctttcaaaccctctcatcttcctacagcagtgtcttcaaagaattagggtctgaagagtaggactatttgaaaaataactggtccagagtttaaagggttttaaccatctacatctagaactctggctctttcaattaacttattaactgtatgactttggacaactataaactctctgaacctcagttctcttatatcttaattagagatgatacctatctcacaggttgtaatgaagactaaagttggatatatgctagtgtactgtcagtagagattagttccttcagtagttcaggctttcctccaggctactgcaagctttcaggtctgtcctgggatgggactgatggtttggtttaatctgggaacttcagttaccttcatattatactcatatggtagggtgtacacagattccctttactcatgaggggtctaaaattcctgattgacttgcagcatcataggaataaatggaggtgggatgggggtggagtttgttcactgctgaatgctaagggagaagccaggagcttccatgaaatgactcaggaaatgctctataattcagataaactgttaatcaatggggagggaaccaggcaaagtccattttaaaatgaaaaaggtattaagatccataataggcatagtggaagggctgggggtgttgaggtgggaaggagttctctatggaccagaggagcaggttcatgactgagggaggagttattgattttttttgtaaacaatagatttttaagcaggaatgaagaaacatgaacatattcttccctatttttttgttccaatatggttaaacaaaactcccagataatatagaaaccttgcttattccccttatgaatattttaccagtattgctaagaagtgaaattgattgatattaatttaacttcctcctcttcccacccagacattagtaaatagtgaaatggttgtaagtgttcagggagatgacaaaagagaagtctgaggcttgaggaattacgaagtcagatgatctgtaattgaataatattgagtagaatacacaaatcaaaagtggtgtaaaatctattacaggaaaaactcatttgagtctggccctgtcacagtcattgaactagtgattcaagtctgaacatggccagcagtggtatttcctgtttatctttcacaaagctggcaacaatttccacattatgttctctgcacatctccaacctctacggaatgaaaaa

SEQ ID NO: 24791 - DNA, 1812 bp, Homo sapiens
gggaagaaaatagccacagaaggaaagtacagggaggcaaacagtgggaggggccagctcatctcttttctccttccccccaaagactgctggttgtcagtgggcctataaaatcttttatgatcttaaaggtattttggaagactaagtcaatctttagcattcttaacctggagcaggggttctgaaacttgaactggcacattggcatcacctgggaactctaaaacacactgatgtctgggtaccaccctcagaaattctgatagaatttgtctcaggtgtggccagggcaacgggctttttaaaagactttccaagtaattctaatgagtatctaagtttgaggaccactgatctagatcaattaaccatacatacatatatatatatatatatatatatatgyatttttttttaaaaagatacatttaacacctccccccacccaataaaccttatggaaacccaatgcataaaaaagattaaagtggaggtgctttacataaggtgctcttgaaacctggctgagtaggcaccatttgctacacccactccccgtttctttcaaaccctctcatcttcctacagcagtgtcttcaaagaattagggtctgaagagtaggactatttgaaaaataactggtccagagtttaaagggttttaaccatctacatctagaactctggctctttcaattaacttattaactgtatgactttggacaactataaactctctgaacctcagttctcttatatcttaattagagatgatacctatctcacaggttgtaatgaagactaaagttggatatatgctagtgtactgtcagtagagattagttccttcagtagttcaggctttcctccaggctactgcaagctttcaggtctgtcctgggatgggactgatggtttggtttaatctgggaacttcagttaccttcatattatactcatatggtagggtgtacacagattccctttactcatgaggggtctaaaattcctgattgacttgcagcatcataggaataaatggaggtgggatgggggtggagtttgttcactgctgaatgctaagggagaagccaggagcttccatgaaatgactcaggaaatgctctataattcagataaactgttaatcaatggggagggaaccaggcaaagtccattttaaaatgaaaaaggtattaagatccataataggcatagtggaagggctgggggtgttgaggtgggaaggagttctctatggaccagaggagcaggttcatgactgagggaggagttattgattttttttgtaaacaatagatttttaagcaggaatgaagaaacatgaacatattcttccctatttttttgttccaatatggttaaacaaaactcccagataatatagaaaccttgcttattccccttatgaatattttaccagtattgctaagaagtgaaattgattgatattaatttaacttcctcctcttcccacccagacattagtaaatagtgaaatggttgtaagtgttcagggagatgacaaaagagaagtctgaggcttgaggaattacgaagtcagatgatctgtaattgaataatattgagtagaatacacaaatcaaaagtggtgtaaaatctattacaggaaaaactcatttgagtctggccctgtcacagtcattgaactagtgattcaagtctgaacatggccagcagtggtatttcctgtttatctttcacaaagctggcaacaatttccacattatgttctctgcacatctccaacctctacggaatgaaaaa

SEQ ID NO: 24792 - DNA, 1812 bp, Homo sapiens
gggaagaaaatagccacagaaggaaagtacagggaggcaaacagtgggaggggccagctcatctcttttctccttccccccaaagactgctggttgtcagtgggcctataaaatcttttatgatcttaaaggtattttggaagactaagtcaatctttagcattcttaacctggagcaggggttctgaaacttgaactggcacattggcatcacctgggaactctaaaacacactgatgtctgggtaccaccctcagaaattctgatagaatttgtctcaggtgtggccagggcaacgggctttttaaaagactttccaagtaattctaatgagtatctaagtttgaggaccactgatctagatcaattaaccatacatacatatatatatatatatatatatatatgcatttttttttaaaaagatacatttaacacctccccccacccaataaaccttatggaaacccaatgcataaaaaagattaaagtggaggtgctttacataaggtgctcttgaaacctggctgagtaggcaccatttgctacacccactccccgtttctttcaaaccctctcatcttcctacagcagtgtcttcaaagaattagggtctgaagagtaggactatttgaaaaataactggtccagagtttaaagggttttaaccatctacatctagaactctggctctttcaattaacttattaactgtatgactttgkacaactataaactctctgaacctcagttctcttatatcttaattagagatgatacctatctcacaggttgtaatgaagactaaagttggatatatgctagtgtactgtcagtagagattagttccttcagtagttcaggctttcctccaggctactgcaagctttcaggtctgtcctgggatgggactgatggtttggtttaatctgggaacttcagttaccttcatattatactcatatggtagggtgtacacagattccctttactcatgaggggtctaaaattcctgattgacttgcagcatcataggaataaatggaggtgggatgggggtggagtttgttcactgctgaatgctaagggagaagccaggagcttccatgaaatgactcaggaaatgctctataattcagataaactgttaatcaatggggagggaaccaggcaaagtccattttaaaatgaaaaaggtattaagatccataataggcatagtggaagggctgggggtgttgaggtgggaaggagttctctatggaccagaggagcaggttcatgactgagggaggagttattgattttttttgtaaacaatagatttttaagcaggaatgaagaaacatgaacatattcttccctatttttttgttccaatatggttaaacaaaactcccagataatatagaaaccttgcttattccccttatgaatattttaccagtattgctaagaagtgaaattgattgatattaatttaacttcctcctcttcccacccagacattagtaaatagtgaaatggttgtaagtgttcagggagatgacaaaagagaagtctgaggcttgaggaattacgaagtcagatgatctgtaattgaataatattgagtagaatacacaaatcaaaagtggtgtaaaatctattacaggaaaaactcatttgagtctggccctgtcacagtcattgaactagtgattcaagtctgaacatggccagcagtggtatttcctgtttatctttcacaaagctggcaacaatttccacattatgttctctgcacatctccaacctctacggaatgaaaaa

SEQ ID NO: 24793 - DNA, 1361 bp, Homo sapiens
gattttcaaaactctccctaccttctgaaactagccgcaatgtgaacttgtcctttcttcacttagcctccttaactcactgcagtgttatgtgatgtgtacaggtggggactttaataaaaccctatttgatgatgacttgatgaaagtctatttggcctgtttagataggagaaaaacaagtcatgtgtataagtgcagtgtaaggttctttaatttgaaatactggagccaagcaatgcaaaagctgagagactccatttaatagcatgttaatatattaaaacccttaataataaattcatagcacttaaaatacawatatttctacaatgtaatattattttacagatggtatttagtaaatagccagtatttactgggaagtggggaattcattgtcctttgtgccttgctttgttgacacattctaccatgtgaaggccaagagcccgtaagaatagaaaaacctttctgtcagcagcagcctcatcaagctggtccctctgtagactctgctctgtccacttattttctttatccttactgctaatccatcaagtaaccatttcgccttcttttaaagcccagccacaagcattatttcttcccggagctttcattgacctgtgcctctccctgcactgtacctctcgaggtatccagtagtggcagttgaagtatatgaagaaggattttatacattatttacttttgttctgagtagttcttttaaaccttgtgaaagcaatttcacaagtgtttcctatagtattgctctgatgtggataggaaagacctcattatagcctttggacatgaagaaactgagacatcaggaggctgagaattgccaaatagtggtagagttttagcatctttcagctccacagctctactagccaaatgtgcgttccaaaatatttcccacaggtttctgactcttggattttaagtagtatgttatggctggtacctgggatttggtgtatttaaaatttgtttgggccagtcgcagtggctcacgcctgtaatcccagcactttgggaggctgaggcgggtggatcacctgaggttgggagttcgagaccagcctggccaacatgttgaaacgctgtctctactaaaaatacaaaaattagccaggcatggtggtgcacacctgtaattccagctactctggaggccaaggcaggagaatcgcttgaacccaggaggtggaggttgcagtgagcagagatcctctcactgcactccagcctgggtgacagagcgaatctttgtctcaaaaaaaaaaaaaaaaaacactgtttgactcattatttgaatgggccaagcaagggctgaccaatgcatagag

SEQ ID NO: 24794 - DNA, 1224 bp, Homo sapiens
gtcaggagcgcggactatattatatagaacccagagattcaaaggcctgattatgaatggatagttacacggatagattaatgatggatggatggaagaagtgtggttcatctgtcatgactggtgcctctagctctaagatgtctgactttgaatccagaggaagaagtgggatcactggggttaggggagtatcctttaaaagttttgcaaaaaacatttgcagtcacttttggtttatctctgccggttggatttagttttcctgaagccccttcggcgtggccatctatgacttatgctccgggcaatggaatgtggctttttcttccctttcacccaggagctctcaagctgcctctttgcttccttctctacctatctscatggattttaagcttatctggatactcattgtgaatactcatgagggctaatttcactgcattgctccacaaaagagttcctggattccatattctggaataatttagcagacttcaggatgaatcaaaagaagccagtcacagaaaaatgtccatcaaccttttagtttaatcatcccttatgccttaagggtatgttgtaacacagctggcctagacagcctctctcctgctcccctggctctacgggttttcctctggcccagcccacctgtccaggctcacctcttgccccattcccactttgcagcctacattgaagccaaatcaaactattcacagctgccctggcgctctggactatgtcaagtacccttgactttgctcatgtagctggagggttctttcctcttcctccacatctccccatgttcccttctctttccccatcaatctttaaagactcacaaatccaaaatattctactctaaaaaagctttcattgacagttttcctccacctccacccattaccaagtactttctcctatacatacttctattacagcaatgataatactgcaaatacattcacaagaaggaaaaaaaaatctcaagccaattagcaagtgactagagtctgagggaagtccacagtggagatgagtaagaggccttgtaatgcagaagagccaaacagggattaagggataatgctgtaaaaaagcaaaataaataaccagggcaggctctgttgaatcttacagagatggccttctaggttaaacattttttgaagtacagacatgcaatgcttaacaaggaggatatgttctgag

SEQ ID NO: 24795 - DNA, 1224 bp, Homo sapiens
gtcaggagcgcggactatattatatagaacccagagattcaaaggcctgattatgaatggatagttacacggatagattaatgatggatggatggaagaagtgtggttcatctgtcatgactggtgcctctagctctaagatgtctgactttgaatccagaggaagaagtgggatcactggggttaggggagtatcctttaaaagttttgcaaaaaacatttgcagtcacttttggtttatctctgccggttggatttagttttcctgaagccccttcggcgtggccatctatgacttatgctccgggcaatggaatgtggctttttcttccctttcacccaggagctctcaagctgcctctttgcttccttctctacctatctgcatggattttaagcttatctggatactcattgtgaatactcatgagggctaatttcactgcattgctccacaaaagagttcctggattccatattctggaataatttagcagacttcaggatgaatcaaaagaagccagtcacagaaaaatgtccatcaaccttttagtttaatcatcccttatgccttaagggtatgttgtaacacagctggcctagacagcctctctcctgctcccctggctctacgggttttcctctggcccagcccacctgtccaggctcacctcttgccccattcccactttgcagcctacattgaagccaaatcaaactattcacagctgccctggcgctctggactatgtcaagtacccttgactttgctcatgtagctggagggttctttcctcttcctccacatctccccatgttcccttctctttccccatcaatctttaaagactcacaaatccaaaatattctactctaaaaaagctttcattgacagttttcctccacctccacccattaccaagtactttctcctatacatacttctattacagyaatgataatactgcaaatacattcacaagaaggaaaaaaaaatctcaagccaattagcaagtgactagagtctgagggaagtccacagtggagatgagtaagaggccttgtaatgcagaagagccaaacagggattaagggataatgctgtaaaaaagcaaaataaataaccagggcaggctctgttgaatcttacagagatggccttctaggttaaacattttttgaagtacagacatgcaatgcttaacaaggaggatatgttctgag

SEQ ID NO: 24796 - DNA, 1224 bp, Homo sapiens
gtcaggagcgcggactatattatatagaacccagagattcaaaggcctgattatgaatggatagttacacggatagattaatgatggatggatggaagaagtgtggttcatctgtcatgactggtgcctctagctctaagatgtctgactttgaatccagaggaagaagtgggatcactggggttaggggagtatcctttaaaagttttgcaaaaaacatttgcagtcacttttggtttatctctgccggttggatttagttttcctgaagccccttcggcgtggccatctatgacttatgctccgggcaatggaatgtggctttttcttccctttcacccaggagctctcaagctgcctctttgcttccttctctacctatctgcatggattttaagcttatctggatactcattgtgaatactcatgagggctaatttcactgcattgctccacaaaagagttcctggattccatattctggaataatttagcagacttcaggatgaatcaaaagaagccagtcacagaaaaatgtccatcaaccttttagtttaatcatcccttatgccttaagggtatgttgtaacacagctggcctagacagcctctctcctgctcccctggctctacgggttttcctctggcccagcccacctgtccaggctcacctcttgccccattcccactttgcagcctacattgaagccaaatcaaactattcacagctgccctggcgctctggactatgtcaagtacccttgactttgctcatgtagctggagggttctttcctcttcctccacatctccccatgttcccttctctttccccatcaatctttaaagactcacaaatccaaaatattctactctaaaaaagctttcattgacagttttcctccacctccacccattaccaagtactttctcctatacatacttctattacagcaatgataatactgcaaatacattcacaagaaggaaaaaaawatctcaagccaattagcaagtgactagagtctgagggaagtccacagtggagatgagtaagaggccttgtaatgcagaagagccaaacagggattaagggataatgctgtaaaaaagcaaaataaataaccagggcaggctctgttgaatcttacagagatggccttctaggttaaacattttttgaagtacagacatgcaatgcttaacaaggaggatatgttctgag

SEQ ID NO: 24797 - DNA, 1224 bp, Homo sapiens
gtcaggagcgcggactatattatatagaacccagagattcaaaggcctgattatgaatggatagttacacggatagattaatgatggatggatggaagaagtgtggttcatctgtcatgactggtgcctctagctctaagatgtctgactttgaatccagaggaagaagtgggatcactggggttaggggagtatcctttaaaagttttgcaaaaaacatttgcagtcacttttggtttatctctgccggttggatttagttttcctgaagccccttcggcgtggccatctatgacttatgctccgggcaatggaatgtggctttttcttccctttcacccaggagctctcaagctgcctctttgcttccttctctacctatctgcatggattttaagcttatctggatactcattgtgaatactcatgagggctaatttcactgcattgctccacaaaagagttcctggattccatattctggaataatttagcagacttcaggatgaatcaaaagaagccagtcacagaaaaatgtccatcaaccttttagtttaatcatcccttatgccttaagggtatgttgtaacacagctggcctagacagcctctctcctgctcccctggctctacgggttttcctctggcccagcccacctgtccaggctcacctcttgccccattcccactttgcagcctacattgaagccaaatcaaactattcacagctgccctggcgctctggactatgtcaagtacccttgactttgctcatgtagctggagggttctttcctcttcctccacatctccccatgttcccttctctttccccatcaatctttaaagactcacaaatccaaaatattctactctaaaaaagctttcattgacagttttcctccacctccacccattaccaagtactttctcctatacatacttctattacagcaatgataatactgcaaatacattcacaagaaggaaaaaaaaatctcaagccaattagcaartgactagagtctgagggaagtccacagtggagatgagtaagaggccttgtaatgcagaagagccaaacagggattaagggataatgctgtaaaaaagcaaaataaataaccagggcaggctctgttgaatcttacagagatggccttctaggttaaacattttttgaagtacagacatgcaatgcttaacaaggaggatatgttctgag

SEQ ID NO: 24798 - DNA, 522 bp, Homo sapiens
gttttaaagaaaaataaacagaatccttatgttgacttatttctattatgtttcttaaacataaacttggtataaaattcttatgtttaatgtccctttataattatacatgaaaaaatataaattaaatataaacactgccaatataattcaagttaacagcattaattgaatgatacttgatgctgttttgctgaaggtaaattgcaattccaaggatgactgacacttcagtgcagtttcttgtctgttcagtatgtttatcctactacatgcccggggaacacccgacgcttctgctctgtttctttattttcttaaggcacaaaaagtaaatacaaagtccaagggtcactgtagcttaatctgcatgaattaagggacacttccctctaggttcaaggagttagaagttcagagtcactagctttwtatcattaaactggaggagggccccatcaccactcaaggttctacccttttgccatataaggaaatttgtgctatgtctcatcccattat

SEQ ID NO: 24799 - DNA, 558 bp, Homo sapiens
ccattatgaggctagaattactctcaggagatagacaggaaatatctgggcctaaaccattctgatatgaaattgggtttagaaatctgactcacttttattgaaatatctaagggaagctaccaaatcttaatgaagaaattttgttttctctcccacaagtttccctgcacaatagtcatttctctccctttatggctgtttgacaaaagttgtgtcccacaacagaattggaaatgacagttatttctttcctgaaacagttccctttcygctacagcacaggtatgaccagttacagccaccaagacataaggaaagtgtggagaaaacgttcctcattaataaaaagaaagagatgtaagaggagagtttccttcttcccttctgcctttagaagaaagtgtgagggcatgatttctgaagctttggtagccactttgcaaacatgaggatataggcctaggatgaaagccaaccagctgtgggtaggaacatggaatatagaaagagtctgagttcctaatgacagtattgtgatgctggatcaatccagcc

SEQ ID NO: 24800 - DNA, 522 bp, Homo sapiens
ctctctggcgagttggggctgacccccatttctcatcagctcatcagagatacagagctggtccaggagtcctcccccgggctccccaccacacacacacttaatccatttattttcagatccctgcccagaaatctccaggaaccctgaccaggccttgcatccctaagtccaaaaattttgcagcaaaaaaagccattctaacttgaagcttttaatagcaaataaataaagtgatccaggctccaaatggtccaggcaaggccaccccacataggactgtgaatatcacaataggtgattgttttaaagtgttttaatgagtctcaaaacatcctacataatatcagcctccacttcagtcttcttgacaggctccagtaaataacatgagttgacaggaataaaacagcttgctcaggagtaattgagtggaattagaatgaacagwcaagaaagaaaaattggcgcttgggtcacaaggaactttttgttagaaacgctctgggggatttggtggga

SEQ ID NO: 24801 - DNA, 1173 bp, Homo sapiens
tctctgatttaaccttcatttaaaaattaacttaacattaaccagtcagctttttactgttgcttcatttctttgtccccaccttacaaaacccaccgctctgccagtgcccagtgggagctctcattctattttgtagaacggcagctgtcctgattcatgaactgtgagtaagaaagaactataactaagtttgttgtaattttgtcttttgacaacgacaacaatgcaagctctttaggattcaagttataattccaattagacctcatggccagcttgtgcctctcaatatcaacaaaggccattcaaatttaccaacccactccacagagctttgtctagctaattcaaccttattcctctagtttctctcctcagtttgtgctagtaaaataacaggttgtttttaacttgttttgtattttttaacctttgaaacccgttcttcaaaaaaaaaaaaaatcttagaagcagcccaatgaaataaacagaaaaataccataccattctgtgctgaagcatggaagtagctgcaaaaacctctatacctgaagacatttgaattgttaactatgttattttgtagtccttttatattatgctatatwttcatttaagtattatatgattgtatatatgtcaatgtctttcaaagtctaatgaacactatatgaatcacccagggatattgttcgagattcctgttgaagagttctggtgtgggatgagagaggctgtatttctagcaaactcctagatgaagccactgctgctagaccttggccctgacatacatacaatcataggacagtgaatgaatacaaaacattacattaaaaaaccacaaaacaacatagttaacacattgggtagcacagtactgggttactgtgggctaactcgtggcagataaaacaaagtatgtttttacttgctgttattaagacctcaaaaattaaaataatagtaagaactgattaatgaggtacaaaacttctcacctaattaaatgaattccccattcagaactcggtaatgtcaagaaggtcaggaaagtcctcaagctctctcaacctcagtttccacttacattctgattctttgagctccatgattctaaaggcaacgtgctcttaaatctaattgcaagtctcgcaagtctagagtgga

SEQ ID NO: 24802 - DNA, 603 bp, Homo sapiens
gatcatggctcactgcagcctcaacctcctgggctcaagcaatccttgacttgcagcctcccgagtagctgtgaccagaggtgcgagccactgtgcccggctaatgttttaatttttttgtagaggtagggtctcactatattgcctaggctggtcttaaactcctggcctcaggtgatcctctcatcttggcctcctgaagtgctgggattactggcatgagctaccatgcccagcccaaatagtcattcttaaaccatttatctgtgtgaatctggattttgagactgtgtgattaaggtgtcagattaataaaaggtgtcagcttatattcatagttctggacctgttatttttgtattcatgaaaacagcctcatttatctcattggtcatgtaaatatcaagtaaatcttatacattttaacttaagaaatgttttatgctcataaaatgctacttttaatatgctctataaattatgaagttctactgctaaaaagccttgaaaataaaaccaccgatcaagtgcaatttccttattttataggaaattgaggcacagagagaatagsatacttgcccatggtcgtacattgataac

SEQ ID NO: 24803 - DNA, 536 bp, Homo sapiens
tctctgtctctctgtctatctctatctctttcaccctccaccttccaccatgggataacgtagcaagaagtcccttgccatatgctggccccttgatcttagacttcccagcctccagaactgtaagaaagtaaatttctgttctttataaattatccagtctgtggcacttagaaaaaataatagcacaaaatagactaagacacaaaggaatggaaaattatgttggggttaggatcctggkggtcaaagaagagtgattgcctcccttatccttgggtgaagaggaagagactcatatgtgccttctaggaaacatcatgctattttgtttggtctcttattctccacctgcttgtccgtgttcactgctaacgagggatcctggctgaaatgtagtggtcatgtggtggtgttgggaagaagaaggctcgtacaatgagatttgatgtccctgtcccacacagggatggttccactctcagaacgtggcccagtctctatctgccagaagttctgacagaagagcagagttt

SEQ ID NO: 24804 - DNA, 536 bp, Homo sapiens
tctctgtctctctgtctatctctatctctttcaccctccaccttccaccatgggataacgtagcaagaagtcccttgccatatgctggccccttgatcttagacttcccagcctccagaactgtaagaaagtaaatttctgttctttataaattatccagtctgtggcacttagaaaaaataatagcacaaaatagactaagacacaaaggaatggaaaattatgttggggttaggatcctggtggtcaaagaagagtgattgcctcccttatccttgggtgaagaggaagagactcatatgtgccttctaggaaacatcatgctattttgtttggtctcttattctccayctgcttgtccgtgttcactgctaacgagggatcctggctgaaatgtagtggtcatgtggtggtgttgggaagaagaaggctcgtacaatgagatttgatgtccctgtcccacacagggatggttccactctcagaacgtggcccagtctctatctgccagaagttctgacagaagagcagagttt

SEQ ID NO: 24805 - DNA, 1168 bp, Homo sapiens
aaaaaccaaaaagaggctcaagcttatttaaatgatggagacatttacatctcacatagagaaagtctagaggtaggacagactctctgccaaatttctagattgctttttgtgtgtgtgatttgctcttctcttttcccctggaaggtttggtcttggctcaggctgtcttccttcatggtttcaagagggctgccagcagcagctggggtagcgtgctttcttatttcacatataggcagatagggaaagcatggaataaaaatccttcctttctacctaaattgaccaacttaggtcatgccctcacttctggacaactaacattgccaggggaataccctgtgttgattggcctaaacctgagtccttgaagtaaacactggtcaggaagatgagattaccagaacctacatctgaaggcacacagggtaagagggggagagtagacactgaataaaattgaggtctcctaggaaggagaaaggcgtgagagttgctcaacaaatacccaagagagtccaccacacctagcatttaagcatcccaaggagagctgtcaagacctgtgtgcttgctgggaagatgtcatgctgtcccatctctgaggtttttggtctttcctaccctcagccagctgatatggctgctcccttcttcctggcccaaaaagttgtgacagggtggcagggttgttttttctcaccacctgaggcatacactgttgtaacttttgcaggaaatgacttcataaagtgattttcctccaaagggaactacataactagcaggctcctaggggctttctggtggactgggtttcgaaaggttcagcgtcttactcaaggtcatgcactgctgactgtcagaacctgcactaggaacaggtctttccattacaccaggaagatgtcaatgtggtagaaatgatgtcagccctttgagggtaaggctatgagtaaagaatgcaaatttagaccttgggcaaattccctaatttctctaggccccagtttaygcactaatatagtaaaggaatcttattagaagatgttaaaagtaccttccaattctaagaatatatgaatagttttagataatgggtgtcttccaaaaacctgaaaacacttgttctattagatcatttaactacagattatttgtttaa

SEQ ID NO: 24806 - DNA, 1168 bp, Homo sapiens
aaaaaccaaaaagaggctcaagcttatttaaatgatggagacatttacatctcacatagagaaagtctagaggtaggacagactctctgccaaatttctagattgctttttgtgtgtgtgatttgctcttctcttttcccctggaaggtttggtcttggctcaggctgtcttccttcatggtttcaagagggctgccagcagcagctggggtagcgtgctttcttatttcacatataggcagatagggaaagcatggaataaaaatccttcctttctacctaaattgaccaacttaggtcatgccctcacttctggacaactaacattgccaggggaataccctgtgttgattggcctaaacctgagtccttgaagtaaacactggtcaggaagatgagattaccagaacctacatctgaaggcacacagggtaagagggggagagtagacactgaataaaattgaggtctcctaggaaggagaaaggcgtgagagttgctcaacaaatacccaagagagtccaccacacctagcatttaagcatcccaaggagagctgtcaagacctgtgtgcttgctgggaagatgtcatgctgtcccatctctgaggtttttggtctttcctaccctcagccagctgatatggctgctcccttcttcctggcccaaaaagttgtgacagggtggcagggttgttttttctcaccacctgaggcatacactgttgtaacttttgcaggaaatgacttcataaagtgattttcctccaaagggaactacataactagcaggctcctaggggctttctggtggactgggtttcgaaaggttcagcgtcttactcaaggtcatgcactgctgactgtcagaacctgcactaggaacaggtctttccattacaccaggaagatgtcaatgtggtagaaatgatgtcagccctttgagggtaaggctatgagtaaagaatgcaaatttagaccttgggcaaattccctaatttctctaggccccagtttatgcactaatatagtaaaggaatcttattagaagatgttaaaagtaccttccaattctaagaatayatgaatagttttagataatgggtgtcttccaaaaacctgaaaacacttgttctattagatcatttaactacagattatttgtttaa

SEQ ID NO: 24807 - DNA, 1168 bp, Homo sapiens
aaaaaccaaaaagaggctcaagcttatttaaatgatggagacatttacatctcacatagagaaagtctagaggtaggacagactctctgccaaatttctagattgctttttgtgtgtgtgatttgctcttctcttttcccctggaaggtttggtcttggctcaggctgtcttccttcatggtttcaagagggctgccagcagcagctggggtagcgtgctttcttatttcacatataggcagatagggaaagcatggaataaaaatccttcctttctacctaaattgaccaacttaggtcatgccctcacttctggacaactaacattgccaggggaataccctgtgttgattggcctaaacctgagtccttgaagtaaacactggtcaggaagatgagattaccagaacctacatctgaaggcacacagggtaagagggggagagtagacactgaataaaattgaggtctcctaggaaggagaaaggcgtgagagttgctcaacaaatacccaagagagtccaccacacctagcatttaagcatcccaaggagagctgtcaagacctgtgtgcttgctgggaagatgtcatgctgtcccatctctgaggtttttggtctttcctaccctcagccagctgatatggctgctcccttcttcctggcccaaaaagttgtgacagggtggcagggttgttttttctcaccacctgaggcatacactgttgtaacttttgcaggaaatgacttcataaagtgattttcctccaaagggaactacataactagcaggctcctaggggctttctggtggactgggtttcgaaaggttcagcgtcttactcaaggtcatgcactgctgactgtcagaacctgcactaggaacaggtctttccattacaccaggaagatgtcaatgtggtagaaatgatgtcagccctttgagggtaaggctatgagtaaagaatgcaaatttagaccttgggcaaattccctaatttctctaggccccagtttatgcactaatatagtaaaggaatcttattagaagatgttaaaagtaccttccaattctaagaatatatgaatagttttagataatgggygtcttccaaaaacctgaaaacacttgttctattagatcatttaactacagattatttgtttaa

SEQ ID NO: 24808 - DNA, 1138 bp, Homo sapiens
tcaagttcacggggtcacagccttgacagggagcagcctccatgttacagagatatctcctatactgtcctggagccggggactggctactggtcgtgggtgtgtggctgggtcccccagcacttcacttgctgtcaatgcatgcatgtgcattcatctaggattaattaggcaccactgtgtgccaggtagagtgccaggctctgggatacagagccagctggtgccctgcttcaatgggcttttgttctagtggtcaatggtccattttgagcaccaggctctgagccattatttcatttcactcwgacagccacctagcaggtgctgttggactctcagccttctttggagcagcattctttctgtggtgaaatgcctaggtccatttggagacgcgaatgggaggtttggtggtcccagtaagaagagatttctctccagtctctatctgtcccacttgcttgaaagactgagtcattcgagggcctcctctggggctagcaagggaccccgtaggtgccttggtacctcttcctgcagcccccagtggcccccatagcaggccaggcatagtcaaacccctgggaaagcccagctcagagccatcagtgatatctctgagagaagtgatgagtgtctagtcacagagcgaaaagggcagagactacattaccaaggccctaggtatagaagaccagtgccctcctgccagggctgtgcatatgcccagagctgcagcagcctttggggggaaattgcagattagaccaggcatggtgctgggcctccacgagacagctgtgcggaagctgtgatgcccttctcttgcctaattccacccttctgttttcacttgctgtgcgtcctgctaaattcccttctcaggctaaaagtttccatctctgggcttggcccaaagtgaaattctctggaaactttcagctgagttcacttagctattgttgagtgaaaggtaggtgggggaggagacgatttgggttcagcttagttttgatactgcaaatgcaagtgcggcgagacctagaactttccccttggctgctggggtttcagttggggtcagggaggcaaatggggtcatgaagacagctttgggctgggattgggacccctt

SEQ ID NO: 24809 - DNA, 1138 bp, Homo sapiens
tcaagttcacggggtcacagccttgacagggagcagcctccatgttacagagatatctcctatactgtcctggagccggggactggctactggtcgtgggtgtgtggctgggtcccccagcacttcacttgctgtcaatgcatgcatgtgcattcatctaggattaattaggcaccactgtgtgccaggtagagtgccaggctctgggatacagagccagctggtgccctgcttcaatgggcttttgttctagtggtcaatggtccattttgagcaccaggctctgagccattatttcatttcactctgacagccacctagcaggtgctgttggactctcagccttctttggagcagcattctttctgtggtgaaatgcctaggtccatttggagacgcgaatgggaggtttggtggtcccagtaagaagagatttctctccagtctctatctgtcccacttgcttgaaagactgagtcattcgagggcctcctctggggctagcaagggaccccgtaggtgccttggtayctcttcctgcagcccccagtggcccccatagcaggccaggcatagtcaaacccctgggaaagcccagctcagagccatcagtgatatctctgagagaagtgatgagtgtctagtcacagagcgaaaagggcagagactacattaccaaggccctaggtatagaagaccagtgccctcctgccagggctgtgcatatgcccagagctgcagcagcctttggggggaaattgcagattagaccaggcatggtgctgggcctccacgagacagctgtgcggaagctgtgatgcccttctcttgcctaattccacccttctgttttcacttgctgtgcgtcctgctaaattcccttctcaggctaaaagtttccatctctgggcttggcccaaagtgaaattctctggaaactttcagctgagttcacttagctattgttgagtgaaaggtaggtgggggaggagacgatttgggttcagcttagttttgatactgcaaatgcaagtgcggcgagacctagaactttccccttggctgctggggtttcagttggggtcagggaggcaaatggggtcatgaagacagctttgggctgggattgggacccctt

SEQ ID NO: 24810 - DNA, 866 bp, Homo sapiens
cactcccagacttagtgattcagcaggtctggggtattgccccatggtttgcagttccaacaagtttccaggtgatgccgatgctgctaatttggttatcrcactttgagaaccactgttctagagccatctccagtagtcatctgggatgaaagtatcagcctggctaaactttctactctttcctgatcacagtatgacctctgtggggttaacatcctagccccttattttaacctccacacttgcattgaacataccaggtgtaccaagatggttcaaacaaaaagacttaaatgaagaggctgctacagaagtgtgggcaggatgttaaaggagcacacaggggaagttgaggcaccagagactagcagcagcaagaagcagtgatcgcttctagggctgcagaggcaagtggaggaatcagtgttctgtgggcttggcgagagctgggcttgcggaggatgggctgtctgggggagccggtgctgtggacacacatggctgctgccaaaaatgcagcacaacaagaaggggcttctctcttctgctgctctccagtcacctcccggagagtgccattggctcagtccagctggagccagaaggcaatgggagaagtagtttccagggatcatgctcccagggcatagaacagagtagaaaatggatctggagcgaactgtcgggcaaatggagaataaccagacctcggcaagaccctgctctctcttcttggctatgctcgagctcttgacatctacctttgcttcctccagaagcttacttagtaggggccagccggcaagagagaagagaggctgcctaatgcctgtggtcacccttagcccccactcaggcagtca

SEQ ID NO: 24811 - DNA, 981 bp, Homo sapiens
caggccagactgccttggttagaatcctgattccaccactaatgaggtgtgcaactggggggaagtcatatcatctctccatgccttgatttccccatctgtacaatgggaataataatagtccctatctcactgggttgctgaaagaattaaatgagttaatacttgaaaagtacttcaaaatagctcttggcacataacaaatgtttataaagtgttttgttaaatgaactgaagaaaatcatctttcccttttcaaataagttgtgtaggccctacactgtagggtaacctggacatcttttcagttctaggtgaaggaggcctgaaaatagagagctacatgtgcccatgggtaaatattaattgtgatccagcagacagatgtctttctactattatgtctttgtaataaagaatctgaacaaagaaactgaagacaaagagagagattttttctttaaacccttagacctcaggctgaaattaatatgtttagattagcagatagtaatgcaatttctaaaagtaaacttgaggggaaaaatatcaagagacctagcattgtgtggttaagagaagaaaaagtgaaataaaaataactccataccctcatgcaaccccacacaggcagacaacattatccagacaggggataagtctgtccctgtgtcaaccctttagaagttaaggctctctcctaagcttgagccaacccagccaggtatctctctggcttagacttccatgatagctacagggagcgggataagttgacacttytccttcaagttctgctctgctgttccttctaggaagaccaaattcacagccaagctccctaagatctagtccaaagcctgagccagcaggaaacaattcttatttcagatttccagctactgaaatggtgtgtcttccctaggctctgtctataatcacttcctttcctctttctcccagtatcttctccttgcttca

SEQ ID NO: 24812 - DNA, 523 bp, Homo sapiens
taagggataaagagaaaaaatgtgccacttactatcaagctatttaaaggagctaggtaataaaataatcataatttatttttactgttggttcttccctttttcatctttttgccttttttttccattgtctttcttgttactaatcctgtgaaaattcaccctctgtttggcagcccgggtcattgttatttgtgctaagctcctatattattagtctgttatcatattgccataaaaaaactacttgaagccaggcgaggtggctcatgtctgtaatcctagcactttgggaggccgaggcaggcagatcacttgaggtcaggggtttgaaacccgactggccaacatggtggaacsctgtctctactaaaagtacaaaaattagctggaaattgcttgaacccaggaggtgaaggttgcagtgggccgagatcgtgccactacactccagcctgggcaacagaacaagagtccgtctccaaaaaaaataaaaacaaacaaacaaacaaacaaacaaaaa

SEQ ID NO: 24813 - DNA, 720 bp, Homo sapiens
tggtgggtaattggggagtgacatttgatgggtttccagggtggctctggggtctgcacttggctgagaatacagctatgatttagaaattcatcccaagggttgagaacagggaaagataatgtgaggcacgctagccctggtctcctttgacctcagcagggtgaatcagggatgcagaacaggaaaccatgtgctgttattgagttggcatagcgtgatgttttgctttcagagcttttattgctattacagagcactgagctctctctttgtttgctacacattctctccccaagagacagcctcttttcctcttgagggatttaaaaaacaaatcatagttcttattttattcagtgtccaccattaagaattcatgcagagcaattttacttgttgccaattaagagctcccagtggaggtctatgattacagtgaaggcaacctgtttaatactcrgcgtccccttagtctacataaattaaccccatgaggatagaggcatgctaattcttaagatgcctggatgataggattcttagatacaggatacacagaaggtacatcttcaagaggctctgggcctgactcttctcagagagcatgtcggctttttcttcttacctgtattttacaactacaagataatttctagataacattttagcaaagaatatttcttcctcaaggatagaataatggcatgtggcctcgca

SEQ ID NO: 24814 - DNA, 383 bp, Homo sapiens
agaatagaaaaaacaaaacaaaaccataaacataattttttaaagaaggaaatgaaagcataatgtgcccccttgcttccaatgtaaagagagacctgctctctaggagtaaaaatttaaagtgttgcagtgtaatggctcatcaaattgaataaagtctgtgtagattaggaaagatcttcaaaattagkctctgagatgtgtacccgtggtctgagaagcaccagagagccacaacttgttcttaaggaagagaatgaaaagttaaaggcagcattttaggcaaggtagcctggcagtaggagaggaaggaggccaagtggtatgtctgttgccattttccaggtatgaggtggaggagtaaacccacaatagggaaggaa

SEQ ID NO: 24815 - DNA, 1635 bp, Homo sapiens
tgctgaggtttttaatcctggctcctctgatgggtcacctttaaaaaaaatgagtgtatatattaaaaattttctgaaagtttttgagcacacaagatttttaaaaagtgttttatatttaacagatacgatcaggttaaacatctatttttggtattgcatgtagtggactaatgattttacacaactttctgccagcatttaatatcatatgtgtttgactctttcaacattgcttatgtctgaggagcacaaaataaaaattctcaaggagctccctgaagagacctagtctagactaagtgaaatttatggagaatttgcactgtctgtttttggtacagtacagagaagtcccagggatggtagcaaagatgagagccccaaaagcttgggataacagacgatgatcttcctcttaaaagtacaaaagggtgctggcaacaacccaccctttcccacggactcagttatactcctgtaagccggggggrgggggtttgaaaatctacttaatgcattttgaactcttcagcttgatgggtcattgtcccaagaaatcggtttgaatcggcagccgaaatacacagtgtgacagtggaaggtcctctgcacccagtttgacaaggacgacttggcagtttgtccagccttacaggtgagcctttcataggaccacatccacaaaagggaacagaggagagcagcacatccccagacctgaatcccaaaggaagtggaccattttcttgctttcgtgtgatgcactcttgtagggcacaaaaggttagtgtttagtccttctcacagcatggcaagtggagctggtcccaacctcggggattttgggaggttctgtgggaagtgttttggcagcctgagcattctctgtcaacagttcaaattcatgggaaaaggcatgaagccaaaagtgcttgcaggtgaattatttgtccctttcaagtgcatcttacttaccctgatgacgtgtaagtgtgtttatctttgttgggagggactatcaggtaggtcagtaaatccttccatgtataaattataaatcacaaatggcatgcaggagaaataccaagtcagaatctgctcatttgtttgtccgtttctcatcccaaatattaaacacaaacgatgggtgaaaaattgatattaatcataataaaaacaagaccatgatgttgacatgctcccaaagtgtttggtcatgagagaagaaaaagtggaacaactgttctttgtaaaacatggatgagctggaagccagaactgacccatttaaagaaagcaagagaaacagatcaggcttattatcaaatacaaaagaacagcatgtcactaacaacctaaatttatctcagatgtacaaaaaaatcttactcatcccaagcagatctctagaccaacattcaaaaatgactataaaaggcatgggaagttgaaaaccttttctaggattctatttacaagatgctacctcaatttttgtttgtttgtttgagacgaagttttgctcttgttggccaggctggagtacaatggcacgatcttggctcactgcaacctctgcctcctgggttcaagcgattctcctccctcagcctcccaagtagctgggactac

SEQ ID NO: 24816 - DNA, 1739 bp, Homo sapiens
taggctccctccatccctggtatgtggtcctcattttcatatagaccaagagctagagctccagttaccatttcttaaagtatattttaatgccaaatagtgaataaaggtggccagaaaattcatgcacagaatccttctttttctcattttgtgctgattggtataaattttattgtatttgtagtctctggaaatcttctaactttgagaggacaaagatgaattcctagtcctgttttggatggtcttcaaatgatccttaagggcagttatttaaaatgtctttcttaactcacccaacctaggctgaccgaatgtagtctgtataaactagatggttaaagataaagaagcctatatatcagatgcatagacaaagaataaaatggcatccagaactggtccccacctattcccaatcctggttccacagcagaatacattcatagttcaggcattcttccttgagatagatataatgtaagtgaccaagtctcttggacaagtattgtctctgatcaatccctgccaaactcctttccttggttaactcaagtggttagatcttactccctgaacagaaggaatatgagaggtcaatacatgcctagactattcagtcctctgatattgctccacaccctttccctcaaaagccatgagacctttcaatggtcccagttcctctaccagaacaccagagatgcctgctttacatggacttatatattcccaagaatcacttggataaatgagtggtgctgctttcccgtggttggggaaaagctaggaacctgacaatgcagtgctcagaacctgctgaccggtactagttatgctgtcttgccatagtagtgcagttctttaaaatgttgatacttgctctcttatcaaaggttggtttttttgtttttttgtcaagacagggtctcactatgtcacccatactggagtacaatggtgtaatcttggcttactgcaacctccaccttctgggctcaagctggcctctcacctcagccttccaagtagctgggaccacacccagtcaattttttattttttattttttaatttatttttattattactttttttgtagagagagggtttcgccatgtagcccatgctggtcttgaactcctgggctcaagctgtctgcccacctggacctcccaaagtgctgagattacaggcatgagccaccgcacccagcccaaataaagttttaagaaattacttggccaggcatagtggggcctttgtagaaaaacatagcttttctatgagaagatgatcaatattttcttttcctttgaatttggaattaccattttggaactgttgtcaacaatgcataataatatatcagaatgcttcctagtatattattggagaaagaacaaacaaaagtttaaattgatataaaatgcatataatggaacaagcaaccctgcaaaaaaaaaaatawatatatatatataccatctgggaatttctgataataacattgaaatctgttcacacagtctaaaattcttttgatgtatcgtagttttgaaaaaaaggtaacagtttactatatataacaaatataaggaaaatattaaattttttgaaagatactagtttttatttttgttcattttttagagacagggtctcactatgttgcccaagctagagtgcagcggcccgattatagctcactgcagcctctaactcccggactcaag

SEQ ID NO: 24817 - DNA, 541 bp, Homo sapiens
gggtctggctctgtgacccaggctagagtgcggtgacaccatcatagctcactgaaatctgaaactcccaggttcaagcgattctcctgcctcagccttctgggttgctgggactacaggcatgygccaccacacctggctaattttttattttaattttttgtagggatagggtctcattatgttgccaaggctgatcttgaacccctggactgaagtgatcctcccaccttggccccacaaagtgttaggattagaggcatgagccatcatggctggcccctatgccttttgatcaagaaattgtgagcaactattgggctcctaaaaacacagcattccattgcacatggtgttctctcagagtatctcactgctgctcagctgtcttctctcaaaacacctccttccagccctcaatgaaataacctttcaattaattggcttcctcctctgtacccttttctattttattaaactctacaattgctacttgactcaagaatcacaaaataatcattgcacaagtctgcttttcccc

SEQ ID NO: 24818 - DNA, 541 bp, Homo sapiens
gggtctggctctgtgacccaggctagagtgcggtgacaccatcatagctcactgaaatctgaaactcccaggttcaagcgattctcctgcctcagccttctgggttgctgggactacaggcatgtgccaccacacctggctaattttttattttaattttttgtagggatagggtctcattaygttgccaaggctgatcttgaacccctggactgaagtgatcctcccaccttggccccacaaagtgttaggattagaggcatgagccatcatggctggcccctatgccttttgatcaagaaattgtgagcaactattgggctcctaaaaacacagcattccattgcacatggtgttctctcagagtatctcactgctgctcagctgtcttctctcaaaacacctccttccagccctcaatgaaataacctttcaattaattggcttcctcctctgtacccttttctattttattaaactctacaattgctacttgactcaagaatcacaaaataatcattgcacaagtctgcttttcccc

SEQ ID NO: 24819 - DNA, 584 bp, Homo sapiens
aaagctaagtaacttggccagtgtcacattgctaatcactctacattcctttaaaagttggcattgggagactgatagtctgaaccaatttacaatgttgatggcactgtaaattgattcaatcttttctgagattaacttggcaatgtytaacagcaataaaatggtccatgcccttttatacaattattttggcatttattctgagagtaatacatgcacgtcctcctgtatactttaagccatttctagattacttttaatacactcacatatcaacttgtgcaaagatgtttctgacagagaattaaacaccccaaactttttcacttatttaacaaatatttattgaatacctgctatgtgctaagcaaggattcagcaggagaaaaaaaaattaaagaacaaagatgatctctgctttcatgaagaagtttcatgcacaattatcttgagtgcaacagaagaatgaataatgaaagccaagtacataatgttgaattgtctagtagtctaatagctacattaaaaaggtaagaagaaacaagaaaaattactttaaataatatattttatttaaccca

SEQ ID NO: 24820 - DNA, 584 bp, Homo sapiens
aaagctaagtaacttggccagtgtcacattgctaatcactctacattcctttaaaagttggcattgggagactgatagtctgaaccaatttacaatgttgatggcactgtaaattgattcaatcttttctgagattaacttggcaatgtctaacagcaataaaatggtccatgcccttttatacaattattttggcatttattctgagagtaatacatgcacrtcctcctgtatactttaagccatttctagattacttttaatacactcacatatcaacttgtgcaaagatgtttctgacagagaattaaacaccccaaactttttcacttatttaacaaatatttattgaatacctgctatgtgctaagcaaggattcagcaggagaaaaaaaaattaaagaacaaagatgatctctgctttcatgaagaagtttcatgcacaattatcttgagtgcaacagaagaatgaataatgaaagccaagtacataatgttgaattgtctagtagtctaatagctacattaaaaaggtaagaagaaacaagaaaaattactttaaataatatattttatttaaccca

SEQ ID NO: 24821 - DNA, 584 bp, Homo sapiens
aaagctaagtaacttggccagtgtcacattgctaatcactctacattcctttaaaagttggcattgggagactgatagtctgaaccaatttacaatgttgatggcactgtaaattgattcaatcttttctgagattaacttggcaatgtctaacagcaataaaatggtccatgcccttttatacaattattttggcatttattctgagagtaatacatgcacgtcctcctgtatactttaagccatttctagattacttttaatacactcacatatcaactwgtgcaaagatgtttctgacagagaattaaacaccccaaactttttcacttatttaacaaatatttattgaatacctgctatgtgctaagcaaggattcagcaggagaaaaaaaaattaaagaacaaagatgatctctgctttcatgaagaagtttcatgcacaattatcttgagtgcaacagaagaatgaataatgaaagccaagtacataatgttgaattgtctagtagtctaatagctacattaaaaaggtaagaagaaacaagaaaaattactttaaataatatattttatttaaccca

SEQ ID NO: 24822 - DNA, 512 bp, Homo sapiens
tgatagaacatgctctgtgggagaaataaaagagaaatgattgatttcagtggagcaagagagaagctgtagtttataggtaccagatgactgggagcgattgggaatttgtgctgaatattaatagtttggtagaattttgacttgagaaggaayagagttaagaacactcatctcattcaaaggaggacactagatttcaaatatctgcatcaaaaaatgagtattatgaacaaattgaggccaatacatgccatccccagaatggaaaaatgtatatcaccaaactctttataaatctcgcctactgattgtgttaataatttgttttttatacagtttttattattttctagttgacaaataaaaattatatatattatttacaacatgtttaaaaatataaatacattgtgaaatggctaaatcaagctaattaacatatgcgttactgcacatgcctatcatttttcaccttaaaaaggcatagaagcagataatggaatggtggt

SEQ ID NO: 24823 - DNA, 592 bp, Homo sapiens
cttttcacgttcttctacctgcttttattctggctgtgctggcagctgattagattgtgcccacccagattaaaggtgggtctgcctttcccagcccactgactcaaatgttaatctcctttggcaccaccctcacagacacaccccaaatcaatactttgcacccttcaatcaagttgacattcagtgttaaccatcacacctggggttgactcgggccacactggtatcccaagagattaaatctagtaggtaggggactgmagaaagaagttccaggaaacactaaatttaagctgaaagagcaatgatatttaagtctataagtgatgagtccattggaacagcagcagtatagaggatacagaccaacttcggcggcagggctcagctaaagggaacaagatgtggcatcaggagcccagccatgtctgtggaggttcaagacaagacatcggtatcaggggcaactagtccaaggatgtagactaggtaggaacagttcacaggtctcaacttaggtgccaaccacacctggttgttaggaattgatatactgagatagatagcgtctgaggcagacatgcctgca

SEQ ID NO: 24824 - DNA, 592 bp, Homo sapiens
cttttcacgttcttctacctgcttttattctggctgtgctggcagctgattagattgtgcccacccagattaaaggtgggtctgcctttcccagcccactgactcaaatgttaatctcctttggcaccaccctcacagacacaccccaaatcaatactttgcacccttcaatcaagttgacattcagtgttaaccatcacacctggggttgactcgggccacactggtatcccaagagattaaatctagtaggtaggggactgaagaaagaagttccaggaaacactaaatttaagctgaaagagcaatgatatttaagtctataagtgatgagtccattggaacagcagcagtatagaggatacagaccaacttcggcggcagggctcagctaaagggaacaagatgtggcatcaggagcccagccatgtctgtggaggttcaagacaagacatcggtatcakgggcaactagtccaaggatgtagactaggtaggaacagttcacaggtctcaacttaggtgccaaccacacctggttgttaggaattgatatactgagatagatagcgtctgaggcagacatgcctgca

SEQ ID NO: 24825 - DNA, 1061 bp, Homo sapiens
cccaccatgacccaaacacctcacactataggccccatctccagcattggggatcacatttcaacacgagatgtggatgggacaagtatccaaactatgtcagaggcctccccctccctctcatcagaatcttctgtcctcagttcaggtgcatgctggcctccatgcctggcttcctagaaagtcatcttggcgccaaggggttgggcagggccactaggctgagggttggagccctatctctcctagtcccagcctgggtctccatcactgggtaacccgtactgctcgctgcattctctccacacctgctccctacagcccaggggtcagtctgggtgcaggcctgggtagaggtccaggagcagattctgccccccagctcatacttcctgtgcaccatggcagaaaatgcaccagcatggccaggagcactggcttgtccctgtagtctcagtgttttgggaggctgaggtggaaagatcgcttcagaccagcctgggcaacatagtcagaccctgtcttgaaaaaaataaaattaggcatggtggcatgcacctgtagtcacagctactcaggaggctaaggtgggaagattgcatgaacccaggaggtccaggctgcagtgaggtgtgattgcaccaccacaatccagcctgggcaacagagcaagaccctgcctctgaaacaagaaacaaagtgcaccagtgtgtggattccagcttctcctggtgtgtggacctgacctcactcagccccatcagtgagtaggaggcttcctgctgtcttccagaacactctcaccactacacctgtgttcctcctgcattctctggcaggctttgtgaggagacctgtcacctgcctctctggctgcccwaaggcccagctcaaaccttccctgaccctgagaacctttttctgaagagtctttcccccacccataggccccctcatttcagagcttttggtggggtgagtacaaggatcgactctctgctaccagcctgggtagggtccctagggttgggtctctggatggcatatgagggtctagacca

SEQ ID NO: 24826 - DNA, 889 bp, Homo sapiens
aacatacttaggaaattaactctgacttttctgtggagtcagtccagaagggaaaaagaaaggatccggaaaacaagttaggagactattaaagccgcccaggtgagagactagctcatagaagggggtttttagcagagatggagtttacagtgataaaggagtaaaatggttagaacttggtaatgggagggaagagggaggagaaatatgcaacagacaatacaattctgctccgtacttggcacagtgtttagcccaagaggcacaaagtgagcaagcctgatgtgacccctgccctcaattaacttaatctagtggacaatgcttactaataaataattaacatatgatataacagtgcctcaggaagaactattggtgtgtgggtgcaattggtaccagaaaaaggtattgaattcaatgaaagtaagaaccaggccaggcgcagtggctcatgcctgtaatcccagcactttgggaggccgaggcgggtggatcacgagatgaagagttcaagaccagcctggccaagatggtgaaaccacgactctactaaaaatacacaaaaaaattagctgggtgcggtggcaggtgcctgtaatcccagctactcggattctactgaggcaggagaatcgcttgaactcagagggcggaggttgccactgcactccagcctgggcgacasagtgaggctccatctcaaataaataaataaataaataaataagaaccaaatttcaaagagtatgcctcaaaaaggaagtgtaaagtctttaccttgggggaaaaaaatcactgtcaaaatgtttggtttcatcttatacttaccagaaactaggttactgtgggactatgtactcatttaaaagcaaagaatgattca

SEQ ID NO: 24827 - DNA, 593 bp, Homo sapiens
agttaattacatagaatcttcaaaacatattgggaatgatggtgataatgtggaccttgtttactagcagaatgcttgccttatctctattcatctcctctacattcctaggaaataggtactattattatctccattttacaaatgagcaaggttactaaagctcagcaaggttaatgtcacatagcttgcagaaagatttcttctactatacaacttgatctctttaacatgtaaactgtgtaatttgcaatagtttgaaaatcaatggaagatgaaaatgatccaaaccccaaaaataaatacatatgggaaaagttacgatctggaccaactgcattcaaaggaaatgcagttttattagtttcaaggacatacagtaaccagaaaatgactaacaagtgctggcagttcgggcccagacttagtaartagataaaaatgattagcatatctaagaagttcttgtcttgctttctatgatggttaatactgactgtcaacttgattggatcgaaggatgcaaagtattgatcctagatgtgtctgtgagggtgttgccaaaggagattaacatttggcaacagtcagtg

SEQ ID NO: 24828 - DNA, 605 bp, Homo sapiens
acataataatgccctgtgcttcatacaatcactgcaggaagatgttamtgtgggaatgttaagaggcagtgaaatccaaactgggtcttggaaggctaaattagagtcctgtaagtgaagtagagaggaagtagaattccagctggagggataagccttcgactcaaggttctgagctctatctcattcttttagaaaactgagaaacctgtttctttcagtcttcttaccatattcctttttttttaattcgtaaactgaattaatataggtgtcatgtgatataacaggaaatgagacttatagctaaatggaatttcaatatcccatattgcgctctgttctctagtcctgagctgctgctttcttttaatcagagctatattgaaatgattcacataccacaatattgacctgaagtgtactcttcagtgctttttaatatattcctggggttatgcattcatcaccacagttatttttggaagatgtttaatgcaaaaaacccagtatccattagtacccactcactattttccctcagccccacggcccaaaggaaacactaatttattttcgtctctagggattggcctattctggac

SEQ ID NO: 24829 - DNA, 605 bp, Homo sapiens
acataataatgccctgtgcttcatacaatcactgcaggaagatgttaatgtgggaatgttaagaggcagtgaaatccaaactgggtcttggaaggctaaattagagtcctgtaagtgaagtagagaggaagtagaattccagctggagggataagccttcgactcaaggttctgagctctatctcattcttttagaaaactgagaaacctgtttctttcagtcttcttaccatattcctttttttttaattcgtaaactgaattaatataggtgtcatgtgatataacaggaaatgagacttatagctaaatggaatttcaatatcccatattgcgctctgttctctagtcctgagctgctgctttcttttaatcagagctatattgaaatgattcacataccacaatattgacctgaagtgtactcttcagtgctttttaatatattcctggggttatgcmttcatcaccacagttatttttggaagatgtttaatgcaaaaaacccagtatccattagtacccactcactattttccctcagccccacggcccaaaggaaacactaatttattttcgtctctagggattggcctattctggac

SEQ ID NO: 24830 - DNA, 970 bp, Homo sapiens
taatattagccttgatggttatctayttatgagttttttttaaatctaggtctaatttgatcctattgaaggaaaaaattaattcaaggacctggaacaataaaatgcaaagtgagcaagttgcaatgctgcaacagagaagccaacttgaatcgaagtgtacggtttctgccatctctcattgttttccatacatcctaccaattagattttaagtttcagcaacctcattagtttttcaggctttatgactcaagcttagggggttgggggtggagggcagcaacccacaaaacaaagacttcaatgtctctaaaagctgagaaaattccagcattgtcagggcagatactatttataacccatttaatgtgtatgctcccaaatgcattttctacgcacagcatctgacctacacttctgaattcctggctttagcaatggaagtgaagcagctaaaagtctgacgatcaaagggaaagaaatgaactccttgctattattattttataacatccagcatcatgtgacaaacagaatcaaagggttcctgtttttgactcacctttgtcaagaaagtgcctcattgctataagtttggggctcaaattgctggaaaatgtgggtttggaaaatatcctacaacgaggctgaaatttttttaaaaagttgtggaaaatctcatttaacttttttccagaacacacacacagacacatacacacacacacacacacgagtaaatgctgagacattttattgaatgtgtatatatgtggcctataataacacacattctatttctatgttgacacttgtattgcaccagagcagggatctacaggaagatatcttttcacgatgttgcccaaagtgcagagtgttgggcaggccagcatcgcagcaaaacttctataatgattgattacaacagactgcaaggcctgcacatcacctccattccattcat

SEQ ID NO: 24831 - DNA, 970 bp, Homo sapiens
taatattagccttgatggttatctacttatgagtttttttwaaatctaggtctaatttgatcctattgaaggaaaaaattaattcaaggacctggaacaataaaatgcaaagtgagcaagttgcaatgctgcaacagagaagccaacttgaatcgaagtgtacggtttctgccatctctcattgttttccatacatcctaccaattagattttaagtttcagcaacctcattagtttttcaggctttatgactcaagcttagggggttgggggtggagggcagcaacccacaaaacaaagacttcaatgtctctaaaagctgagaaaattccagcattgtcagggcagatactatttataacccatttaatgtgtatgctcccaaatgcattttctacgcacagcatctgacctacacttctgaattcctggctttagcaatggaagtgaagcagctaaaagtctgacgatcaaagggaaagaaatgaactccttgctattattattttataacatccagcatcatgtgacaaacagaatcaaagggttcctgtttttgactcacctttgtcaagaaagtgcctcattgctataagtttggggctcaaattgctggaaaatgtgggtttggaaaatatcctacaacgaggctgaaatttttttaaaaagttgtggaaaatctcatttaacttttttccagaacacacacacagacacatacacacacacacacacacgagtaaatgctgagacattttattgaatgtgtatatatgtggcctataataacacacattctatttctatgttgacacttgtattgcaccagagcagggatctacaggaagatatcttttcacgatgttgcccaaagtgcagagtgttgggcaggccagcatcgcagcaaaacttctataatgattgattacaacagactgcaaggcctgcacatcacctccattccattcat

SEQ ID NO: 24832 - DNA, 970 bp, Homo sapiens
taatattagccttgatggttatctacttatgagttttttttaaatctaggtctaatttgatcctattgaaggaaaaaattaattcaaggacctggaacaataaaatgcaaagtgagcaagttgcaatgctgcaacagagaagccaacttgaatcgaagtgtacggtttctgccatctctcattgttttccatacatcctaccaatyagattttaagtttcagcaacctcattagtttttcaggctttatgactcaagcttagggggttgggggtggagggcagcaacccacaaaacaaagacttcaatgtctctaaaagctgagaaaattccagcattgtcagggcagatactatttataacccatttaatgtgtatgctcccaaatgcattttctacgcacagcatctgacctacacttctgaattcctggctttagcaatggaagtgaagcagctaaaagtctgacgatcaaagggaaagaaatgaactccttgctattattattttataacatccagcatcatgtgacaaacagaatcaaagggttcctgtttttgactcacctttgtcaagaaagtgcctcattgctataagtttggggctcaaattgctggaaaatgtgggtttggaaaatatcctacaacgaggctgaaatttttttaaaaagttgtggaaaatctcatttaacttttttccagaacacacacacagacacatacacacacacacacacacgagtaaatgctgagacattttattgaatgtgtatatatgtggcctataataacacacattctatttctatgttgacacttgtattgcaccagagcagggatctacaggaagatatcttttcacgatgttgcccaaagtgcagagtgttgggcaggccagcatcgcagcaaaacttctataatgattgattacaacagactgcaaggcctgcacatcacctccattccattcat

SEQ ID NO: 24833 - DNA, 970 bp, Homo sapiens
taatattagccttgatggttatctacttatgagttttttttaaatctaggtctaatttgatcctattgaaggaaaaaattaattcaaggacctggaacaataaaatgcaaagtgagcaagttgcaatgctgcaacagagaagccaacttgaatcgaagtgtacggtttctgccatctctcattgttttccatacatcctaccaattagattttaagtttcagcaacctcattagtttttcaggctttatgactcaagcttagggggttgggggtggagggcagcaacccacaaaacaaagacttcaatgtctctaaaagctgagaaaattccagcattgtcagggcagatactatttataacccatttaatgtgtatgctcccaaatgcattttctacgcacagcatctgacctacacttctgaattcctggctttagcaatggaagtgaagcagctaaaagtctgacgatcaaagggaaagaaatgaactccttgctattattattttataacatccagcatcatgtgacaaacagaatcaaagggttcctgtttttgactcacctttgtcaagaaagtgcctcattgctataagtttggggctcaaattgctggaaaatgtgggtttggaaaatatcctacaackaggctgaaatttttttaaaaagttgtggaaaatctcatttaacttttttccagaacacacacacagacacatacacacacacacacacacgagtaaatgctgagacattttattgaatgtgtatatatgtggcctataataacacacattctatttctatgttgacacttgtattgcaccagagcagggatctacaggaagatatcttttcacgatgttgcccaaagtgcagagtgttgggcaggccagcatcgcagcaaaacttctataatgattgattacaacagactgcaaggcctgcacatcacctccattccattcat

SEQ ID NO: 24834 - DNA, 543 bp, Homo sapiens
tgtattagtttgccccaatatccttttgaaaaaatatccatactttaaaaagatgaaggggcggctgggtgccctggctcatgcctataatcccagcactttgggaggctgaggtgatagaattgcctgagctcagtcaggagtttgagatcagcccaggaaacattgtaaaaccttgtctctacaaaaaaaaaaaaaaaaaaaaaaaaaaatmcaaaaattagcctggcatagtggcatgcacctgtgaccccagctacttgggaggctgatgtgggaagacctcctgagactgggagggaggcagagcttgcagtgagctgtgattgcgccactgcactctagcctgggtgacagtgagaccctttctcaaaaataaaattaaaattaataaaaaaaaagatgaaggagatttctttttgcctctctatccctaacacataatttttaaacaagcacattaaatattccttgtggcaattttaataaatgtctaagtatgaacacaaggtgaagctcattcatactacgttctagttgaag

SEQ ID NO: 24835 - DNA, 543 bp, Homo sapiens
tgtattagtttgccccaatatccttttgaaaaaatatccatactttaaaaagatgaaggggcggctgggtgccctggctcatgcctataatcccagcactttgggaggctgaggtgatagaattgcctgagctcagtcaggagtttgagatcagcccaggaaacattgtaaaaccttgtctctacaaaaaaaaaaaaaaaaaaaaaaaaaaatacaaaaattagcctggcatagtggcatgcacctgtgaccccagctacttgggaggctgatgtgggaagacctcctgagactgggagggaggcagagcttgcagtgagctgtgattgcgccactgcactctagcctgggtgacagtgagaccctttctcaaaaataaaattaaaattaayaaaaaaaaagatgaaggagatttctttttgcctctctatccctaacacataatttttaaacaagcacattaaatattccttgtggcaattttaataaatgtctaagtatgaacacaaggtgaagctcattcatactacgttctagttgaag

SEQ ID NO: 24836 - DNA, 511 bp, Homo sapiens
ctttctgaatctgtttatcatcttttagcattcctttcagacatctctgctctttttttttgaacaaatgtggcatcctctttaatcttgctgatgatacaaatttgtagggagtcttaattttttaattcatctgttcttcagctactccatttctgaaatgagtgttaatactgacttttgcatttggtgttttttgaaggaaaatcattccatttcaccggtccttgtggagggacagagcggggtgtcccatctcccatgctgttgacattggagctgggtaattctttgctgtggcggctgtccrgtgcactgcaggatgtttagcagcatcgtcggcctcaaatcattagatgccggtagtggtcccccaaacatacatgcaaatatatctctagatgttgcctgcagttgagaacctgtattatttaaacaagtgcatcatcctctttaatcttgctgatgatacaaatttgtagtgagtcttaattttttaattcacctgttc

SEQ ID NO: 24837 - DNA, 909 bp, Homo sapiens
ttttctgctgctgaattcattacaaaatgaaaaaaagttcttgaagaaaaatgacactaaagtaacatttgtaagaaactttctataaagctgataataaaaactatcactacttcagtgcagccatctgtagccctaaycatcttacacttttgagaaatgtatttctgatatgcaaaacataaatgagcaaaacagtacacccaaagtaaaactatgaaaagtaatttaccaaggtgtaatagacactgtcatgtgaactgtttgtttcaaaatgaaacctgcctgtggcaatgagaagatcactatgcccagtcagtgtataccatcagataagtcccagtctcaaagaaccaaagaattttaactttcaaaaagttatgtgaacagtcattgcatatgctgaatgtaattcatttataagaacttaacatagttcacattgagacaatcagaaaaatcagcaaattgaccatgatcaattttttttaatgtggaatagaaatgatattctgttgggaaatatgttttcctccaaaatagtaatttaaaacctttgtttttactaacagtcataagaaacctcctttctgtttactatatattagataataattcattagatatataatattttcctacttaggtctgcaaatttctataatttactgttttaatattttgctagtttaataaattgtatttttacttttacatttatactgttaacaaagtgagtgttctagtaacattgctggtgtagggtaaatgttatattcataagtcctcaattttcatcatcatttttattatggttttaaattatatgagcaaattatattttcaataagtttttatgaatttaacataaattctaatatatttaggaatattctcatgtttgtttca

SEQ ID NO: 24838 - DNA, 909 bp, Homo sapiens
ttttctgctgctgaattcattacaaaatgaaaaaaagttcttgaagaaaaatgacactaaagtaacatttgtaagaaactttctataaagctgataataaaaactatcactacttcagtgcagccatctgtagccctaatcatyttacacttttgagaaatgtatttctgatatgcaaaacataaatgagcaaaacagtacacccaaagtaaaactatgaaaagtaatttaccaaggtgtaatagacactgtcatgtgaactgtttgtttcaaaatgaaacctgcctgtggcaatgagaagatcactatgcccagtcagtgtataccatcagataagtcccagtctcaaagaaccaaagaattttaactttcaaaaagttatgtgaacagtcattgcatatgctgaatgtaattcatttataagaacttaacatagttcacattgagacaatcagaaaaatcagcaaattgaccatgatcaattttttttaatgtggaatagaaatgatattctgttgggaaatatgttttcctccaaaatagtaatttaaaacctttgtttttactaacagtcataagaaacctcctttctgtttactatatattagataataattcattagatatataatattttcctacttaggtctgcaaatttctataatttactgttttaatattttgctagtttaataaattgtatttttacttttacatttatactgttaacaaagtgagtgttctagtaacattgctggtgtagggtaaatgttatattcataagtcctcaattttcatcatcatttttattatggttttaaattatatgagcaaattatattttcaataagtttttatgaatttaacataaattctaatatatttaggaatattctcatgtttgtttca

SEQ ID NO: 24839 - DNA, 510 bp, Homo sapiens
agcaggctgtgcaggtgtgcacagagcataccactaaaagctggagtgacttaaggggaggaaagtgaaagaggaaagtcagggtcgtgcccttgggagttcgtccttagagaccaagcagtgcagcccctggcctcatggagcctggctttgaggagcagctcatcttcagtgccttctcagtgtggttctgtccctactgcagggctaggccattcttactcatggccggaggggagacatgggatcttctcacccgctggagccatgcctgtattaggcactagggcagcagtaacaaacaccacagactgagtggcttaaacaacagaaatgattgtctcagagttctagaggctggaagtccaagatcaaggtgctggcaggtttgatcccttctgaggcctctctcctttgtatgcagatggccgtcttctctctgtgtcctcatatggccttccttcyctctgtgtgtgtctgtgtcctcatctccccttctttctttctttc

SEQ ID NO: 24840 - DNA, 1855 bp, Homo sapiens
tcactttccgaatcactgattcggggtttgggaagctcttcattttctgagtcactggcctggtgcctcggagggtcctcactttctgagtcactgatacgaggtttgggaagctcctcattttcagagtcactggcctggtgccttgggggttcctcactttctgaatcactgacctgaggtttaggaagctcctcactttcagaatcactcattcgaggtttgggaggctcctcattttcggagtcactggcttggtgccttgggggttcctcactctcagagtcactgatttgaggttttagagcatcttctgtttcagagtcactagcaggactcttctggagctcctcaatctcagaatcactggcgggatgcttcccaacatcttcgttttctgagtcacttgcatgcccattaagaagttcctcattttcagagtcactaccaggtaatttcctggtctcttcactctcagagtcgctcccatgctgattgacatcctcattttcagaatcgcttgcaggaggctctgcacgttcctcagattcagagtcgctgtccttttgcctgtgaagctcctcactttcagagtcactagcattaagatttaagggctcatcgttctcagagtctgtcacatgatgtcctttggggaggccatcttctcgatcactagtttcattctgaaaaataaagtgagaaaaaattaggaaagtgcaaaaaaaaaaaaaccattaataataaaacattaaattttttctgtgatttttttaaaatacaggattatgtgcacctaaatggagaattcttgtcctatacccatatagaaayacccccacagaaagccaatcagtgaaatggttttatttggatccccaaatggggaaatataaccagccttcatcaaaacagatttgtaaagcatgccctcagattactacagaaaactgaccgtgaagagctagattttttcttttttaaaaggcgaattttctcatacatacttctgttttgtaaaaatataactctaggctggacaaggtggctcacaccttttgggaggccgaggtggtggatcacctgaggtcaggagttcgagaccagcccggccaacatggtgaaaccctgtctctattaaaaatacaaaaattagctgggcgtggtggtggacacctgtaatcccagctactagggaggctgaggcaggagaatcacttgaacctgggaggcggaggttgcagtgagctgagattgcaccatcgcactccagcctgggtgacagagtgagactgtcaaaaataaaaataaataaataaaaataaataactctatttttcaaagaaatacaagcaaacatgtaaccaagttcttttacacaggaacattcttgggttttataaggttaagattatttaagggaaaagaactataaaatttaattttatttaaagggtcaaataacatatgggcaccttctcccaagataatttaagcaaacaaagaaaggagaagttaacatttcctaagtacccactaagagccaataccacaacaggctctctcctgttagttcatttactcctcataatggtacttctcatgataacaaaattgaggcttacagtagtcacggtcctgtgtctagtaaccctagaaacaagaaagcttaagttttagggagaacatgattcatctaactataccaacacataatgttacttgaaataattactctgaaaacatgccctggggtacaaacttgatatgtgcatattatagctatggctttaaaatgcagagaaaaatatacaaaattaaacatgccaaaatactaacaagtattttaggatcc

SEQ ID NO: 24841 - DNA, 1855 bp, Homo sapiens
tcactttccgaatcactgattcggggtttgggaagctcttcattttctgagtcactggcctggtgcctcggagggtcctcactttctgagtcactgatacgaggtttgggaagctcctcattttcagagtcactggcctggtgccttgggggttcctcactttctgaatcactgacctgaggtttaggaagctcctcactttcagaatcactcattcgaggtttgggaggctcctcattttcggagtcactggcttggtgccttgggggttcctcactctcagagtcactgatttgaggttttagagcatcttctgtttcagagtcactagcaggactcttctggagctcctcaatctcagaatcactggcgggatgcttcccaacatcttcgttttctgagtcacttgcatgcccattaagaagttcctcattttcagagtcactaccaggtaatttcctggtctcttcactctcagagtcgctcccatgctgattgacatcctcattttcagaatcgcttgcaggaggctctgcacgttcctcagattcagagtcgctgtccttttgcctgtgaagctcctcactttcagagtcactagcattaagatttaagggctcatcgttctcagagtctgtcacatgatgtcctttggggaggccatcttctcgatcactagtttcattctgaaaaataaagtgagaaaaaattaggaaagtgcaaaaaaaaaaaaaccattaataataaaacattaaattttttctgtgatttttttaaaatacaggattatgtgcacctaaatggagaattcttgtcctatacccatatagaaacacccccacagaaagccaatcagtgaaatggttttatttggatccccaaatggggaaatataaccagccttcatcaaaacagatttgtaaagcatgccctcagattactacagaaaactgaccgtgaagagctagattttttcttttttaaaaggcgaattttctcatacatacttctgttttgtaaaaatataactctaggctggacaaggtggctcacaccttttgggaggccgaggtggtggatcacctgaggtcaggagttcgagaccagcccggccaacatggtgaaaccctgtctctaytaaaaatacaaaaattagctgggcgtggtggtggacacctgtaatcccagctactagggaggctgaggcaggagaatcacttgaacctgggaggcggaggttgcagtgagctgagattgcaccatcgcactccagcctgggtgacagagtgagactgtcaaaaataaaaataaataaataaaaataaataactctatttttcaaagaaatacaagcaaacatgtaaccaagttcttttacacaggaacattcttgggttttataaggttaagattatttaagggaaaagaactataaaatttaattttatttaaagggtcaaataacatatgggcaccttctcccaagataatttaagcaaacaaagaaaggagaagttaacatttcctaagtacccactaagagccaataccacaacaggctctctcctgttagttcatttactcctcataatggtacttctcatgataacaaaattgaggcttacagtagtcacggtcctgtgtctagtaaccctagaaacaagaaagcttaagttttagggagaacatgattcatctaactataccaacacataatgttacttgaaataattactctgaaaacatgccctggggtacaaacttgatatgtgcatattatagctatggctttaaaatgcagagaaaaatatacaaaattaaacatgccaaaatactaacaagtattttaggatcc

SEQ ID NO: 24842 - DNA, 613 bp, Homo sapiens
tgggcagtctggcttcaggtccctggtttccaccactgtacaacactgcctctcattacccaggatgcacctaagactcccagaaatgggggctggggcacaaaagcagcagtggtgggaagtggaagaagcaagccagcaggatacttcagtggcactagacagtggagatgccacccccattacacatgggtccactctctaccttgcactggactctgtctcttaccacaggcttaaaatcttccagggccagagctctgccttagttatcttgayacatccacaacccaagcatgatgtcttgtgcatacaaagagctgagtgaacgctagatacattaaattgctagaaattattaataaaatctttatggttgagcatgtttttgtcttggagcactctgaagggtgcatttctcaaagaggcatgtaatgacaccaggaatggagctgtttgggtcacagctctcttctgctgggaccaatcccagtttcttgttctctcgacagcctagagggaaataataacttgtttttaatagtgctttgcacttttcacaatgtttttgaaaatacatcacctaagttaattttcaaaaaccccaaatgaa

SEQ ID NO: 24843 - DNA, 1177 bp, Homo sapiens
tcactacatgtaatttgcagttaatacatcmatgccttctgctcttacttctctccttaaaacattacatctttttgcttaactaaagtggtgactctctctctcattttctttttttttctttttttttgtcagttcctattgcatttttccccacttcgcactctggtattataacctgacactgagaatgtttgcctcaaaaaaactggaaaaacaatgtttttccagtatagacgaattctgtactcggcttttcctgatgtatccaaattgttctatgtaaccaggaaatttcacatgctcttactttttctaaaagccatccattccacctggtggaggtactacttgtgtgtgtgtgtgtgtgtgtattattatcctataatatggtttacttataaccttagacacacactcttccagtgtctaattgaattaaagtagtttttcatggggtttaatttccagcttactcaaaagggcatataccaagagaaatggtcatactacaaaaggttttttttctctctctctaagtaatccacctaataagcaggtattttatgtttcaagatagcttcctgtggtttgggctgtctttattcgggttttgaccacctgaaaaaactaagtcatctctaatacaggtctaactattttttttctcttgactatgtaacttttgaatttgtttttgaagtctttccattattactctggctaaataagtgaccattatctctcaaggatatgtaattctactttaattaaatatttttaggctttttgaatccaaacaaatgacaaacttccccagaatcaaattcaaatttaactctttttcacctaaaattgactaagggattttctagttgggatcctgggaagtctcaaaagatttgtctcccattaggcttgtttgaccagctcccaaaatcttctctagtgtctgtgagctttctttcaaaacaatatgtagcatttccctcgctagtaaacccccaatcttctctttgtccttcacacatatagaagaccaccgtggttttcagttttgttcagaactacaattctgtgattcccaaataaattgcatactttagagattcatctttattttgacttcagtagtggtgataaactctgatacaatattcaagaatatgttttataa

SEQ ID NO: 24844 - DNA, 1852 bp, Homo sapiens
tgttggacaaaggcaaaaaatagtttctcagcttaggaagagtttgaaactcaaagtactgcatatatgagctttgatactgtatttaactcctgtattgaaatttggtgtttcagggaccccagagcaagttcattggtttaaataatttggagtgaaaaaaagaaaaaaagaaagtattatttgggatacttaatgttacccccaaaataattatgtgattatctgtgccacttggctaccacgaagcagtgaaatggcctccaagaatgtaaaatatttaatcaagagactacccaggacaactcaaatggctaaaaagtcagagaaaaaaatcttgctttgagcgtaagggaattgaggagctaaaggcagttcaatttatctaggctagtgttgataccttcatttaaagctctctacaggttataaacatgtatgtggagactgttcattaaatgaaaagataaatagatgctgtgggaatgcataaaaatctcagattacttgaataagaagggagcagtattatgttaattctattaagagaggcaaaattttaaacraaactactaagaattagatgaaggcatgctgtgtaagtgggaagtaaatgaacagctgcaaatttttcaataaaaggggaaagaataaatgtccctcttagtatgggaatttgtctgattacaagcctaaccaaccatatcaaagtaacacccatgcttggataaaagataactgtgtcaaatcaaactcaacacagaagtcacagagaggtcctgaagtgctctcttcaaatggcctgcatttctaaaatttatagactcattacttttgcaagtctccttctgacctcattatttagctcccatgcttgctatctgattcagtgcatacttatattgcttggctcaaactaactttatgtcccaagtttaaatttctcctggagagaatattatcccagtccagaggcagtaacatttcctcccatactttagcaggaaacaatattcaggcataggcagacaggtgtatttttcttaaggttcccatttgtaaccctcttgataatcatgtcagagggttttgataagcttgactaatgtagcatgatcacccaggctggacaagaaacatagtaataggacagagacattctgaggagacacctgatggggtcctaatagtaaacccagtagaaatggagtcagttctaagaaattattcccttacttcacaccatttcctaaagccatttgcatgtggcctatagatttaaacataacacattaagaactctagaagaaaaaaacgggatactattttatgaccttataagttggtgcagatttcttaaataggccataataatcactaatgaaaaatgaaaagatggataaaatggagttaattcatcaaaacatctcattaaaatgaagtaaaggaaatccacagaatagaaaaaatatttgtaatatgtgtatccataaaagactcatatgcagaataagtcctactgtaattactcaagaaaaagattaaataaaatattgacaaaatcaggcacttcattagaggatatggaaaatttacatctggaaaggcattttaccttattagtcatcagagaactgtgaataaaattataatgtgattctactacatacccattgaaataactaaaataaaatgaaaaagacaattttacgtgtctgtgaggattaggagcaactggaactctcctacagggaatgtttaatgcaacagtttggaaaattgttaagcagtatctgttaaagctgcacattccagctattctagtcctaggcataatctttagcaaaatgca

SEQ ID NO: 24845 - DNA, 1157 bp, Homo sapiens
ttgtgtttaggatcagcatatggtccccaaatagtttgcccactaaattgcctgaagaatgttttttcacagagggtctacttggcatttcacaggcaggacatttctttatgacatgagccttgttttgcctattgaacaacatttagtagcacccctagaatctggacactaaatgccaaaggcatgtcccagttatagtcacaaaccaaaacaactgtgaacatttaaaaacacccacttagcagaggattcaggggatatgacctcttgttgagaattatttgcaagttttccatgaaattacagatcaagctgtctttgatgaaaaactctgttgaggaagagtgaagtgcttttctcaattgcaacatttcaagcctaggagactggctactgtgtagggtgggaagtcctgatgggagctgcctaatatatggctcaaatctcaagaatctgtccaacatggtggtctgtagtcatcctgcctctgcagggttggccacagctctgggctcccacttgctgaacagtgttaaagttggacacgttctcaccagtgtttggaaatcccttacctatgacagatatcactctctgggctgccacttagtggcaagaagtgttcttctgccccttccctgctaataggaagaaagacaaccatggactttcttttcttttcttttcttttgagacagggcctcctctatctatcacccaggttagagtacagtggtacaatcatggcttactgcagcctcaaactccttgggctcaagggatccttctgcctcagcctcctgaatatctgggactacaggtgcacaccaccatgcctggcttttttttttttttttttttttgtagagatggggtttcactatgttgcctaggctggtctcaaacttctgggctcaagcaatcctccagccttggcctcccaaagtgctaggactataggtgtgagccattgcacccaggctaaccacagaaattcgtagttcaaaaggacttttaggagatcacttacatttgggagcagtggtgcacagagggttaagtgttttgccaacagtcacacagtaaaaacaaccraaagaatttatgtacataaagtgctgtagcacacagtcagtacttgataattatttccc

SEQ ID NO: 24846 - DNA, 552 bp, Homo sapiens
tggtttaagccaaaccaataaatatctattgaacaccaacacagttccattcactgtttcagagggcgggagtacaaaaatgacagagacatgtccccagtccggaagacagaagagataaagtcagatagaggagataaagcatgcacagaaatagatattacacaggactttttaaaaattagaatttatctctatcatgtacctagcacactgaaggatgtttgcttacmtgcatctttctttccctgcaccaagctccctgagaactgggaacttgtcctaatttttcttttacattccagcaacatagtcaggaattcattcataacatgtgctcaataagtgtatgtttaacagaactgaattgccttaagcttaaaaccgattgccataaacaaatggaaatccatttcagatgtaccttgaaagaaggtgcaagcttcaaccattgagagatggtgaagggattgtttccagtagtgggaatagaaagatgagagaggaggaggtagaattacattcactgctagcatccagtcttgctgaatt

SEQ ID NO: 24847 - DNA, 618 bp, Homo sapiens
tgtgccaattcctatgttgttcaagggtcaactgtaaatggggaaactgaggccctggtcacagtagcacacacaggatgaactggagatgagaaatttgaaatacaccacactacttctccacttcaattgtctattagtaaaatgacctcccaccccttggttttaaagatcccaagtaaggaaaagaaggtacactttcaagggttcccataggaacacccagtttccattgttgaactgcagagctggtggtgagtcaatttgcatacatttcaaaaaatctacctaagatggtttcaagagcccagcatgataaattatgcaccyttggcaaagtaaggcaatgtatgttctaattaattaggtatgtgaatcacaaggagtattggacctgaaacaaaggaagggacttggagagttcagagtaaagattcataaattagctccgaaagaaatgaattaattgcttctgaattttgcactcctccccccacccccaactccacattttgtactgcaaatatgttacaagtctttgttttccttctggcttttcagctgtgtctttgaagttccctagttctgcagtaacaggcttcccttgcctggctccat

SEQ ID NO: 24848 - DNA, 539 bp, Homo sapiens
caatccaggaatactttaagaagtaaaattgatttaattttttaaaagaattttaaaactggctttgaatgtatgcattccacctgactcaaaatatgcttttgatagatataagtaaagcagccaacagaaaaacagagagagaattttaaagtatatccaaggctttcacagcattgcacaagcttcattgacacacacaaagaagcagcttcaaactacagaacaggaacaatgaaaatcaaaggcaaaggaaaatgaacaaacaggataaagctaggtgttatttcttcctcaggaatatttttagtttattatttgttgttaaagtttactgtgtgccattataatcctgtacataagttmtttacgatatttgaattgccctgtttctgtaaagtttttcaggaggagattattgtcattattatatgcatttagcagaatgctttctgttgcctactgaatcaagctaaagtcctcaaactcgttcaagtcctgacaaaataactccaacctctttctccagctttgtctcc

SEQ ID NO: 24849 - DNA, 664 bp, Homo sapiens
gttttggcatggtagactgtaagtgtcttgagagcagaacatggaaactgcacaaatccaaacacactctgcmttctgcttaagcatttgatgcttgaggtcctctataatttgaagggtgaatgttaactgttctgtcaggtaggagttatttttttaatatagctatgaattttaactaatttcacttaatgagttttgaccaataacacctttatctcaccgaacctgaccatataaactgagtaaataaagaaagtatgtgatgactgggttatatcattgctgggttacttctggagactgctattataacttcattttcttcctaaagaaaagagttggtcaaaagcaaaacttgacaaatgggatctaattaaactaaagagctcctgtacaggaaaagaaactatcatcagagtgaacagacaacctgcagaatgggagaacatttttgcaatctatccacctgacaaaggtctaatatccaaaatttacaaggaacttaaatttacaagaaaaaaacccaaacaaccccattaaaaagtgggtaaaggacatgaatagacacttctcaaaagcagatatttatgtggccaagtaacatatgaagaaaagctgaacatcactaatcattagagaaatgcaaatcaaaactacagtg

SEQ ID NO: 24850 - DNA, 664 bp, Homo sapiens
gttttggcatggtagactgtaagtgtcttgagagcagaacatggaaactgcacaaatccaaacacactctgcattctgcttaagcatttgatgcttgaggtcctctataatttgaagggtgaatgttaactgttctgtcaggtaggagttatttttttaatatagctatgaattttaactaatttcacttaatgagttttgaccaataacacctttatctcaccgaacctgaccatataaactgagtaaataaagaaagtatgtgatgactgggttatatcattgctgggttacttctggagactgctattataacttcattttcttcctaaagaaaagagttggtcaaaagcaaaacttgacaaatgggatctaattaaactaaagagctcctgtacaggaaaagaaactatcatcagagtgaacagacaacctgcagaatgggagaacatttttgcaatctatccacctgacaaaggtctaatatccaaaatttacaaggaacttaaatttacaagaaaaaaamccaaacaaccccattaaaaagtgggtaaaggacatgaatagacacttctcaaaagcagatatttatgtggccaagtaacatatgaagaaaagctgaacatcactaatcattagagaaatgcaaatcaaaactacagtg

SEQ ID NO: 24851 - DNA, 885 bp, Homo sapiens
ccaggccatggggaaatgtcgtcttccctgcccaaggctgtgttgtgacggcggcatgtctgggcaagggagatggcgcctctttcgttctggccgcagatctgcttgggtgagtgtcctaccagtatcctggtacccatgttgctgggacaagcccgaccctgcagaaccaggtgacaccttccagaggcagagtgcaggagagtgttagagacacgggaagctttagggtgagtgaggccagagggggttgatctgatggactgaagcctccctagcacccctcatcatggccttaagagacagggagctcccattccggatgtcacaggcttcaggcagtgaactcagggcacattatcctaatgtcatctgaggggactgaagtttccttttacacagaggctgggagaagaggcagacctgctgagcaagggagaagcagagtttgcagaaacgactctaacaccattagttatagtttagcgatactaccaaatttctgggaagaaaaagtaaaagccaaatgttctaygtggttagaggaataaaatacgggtcttagtgggcatacttgatgggggggtcattagggaatgaaaaggagatagtttttgtattctccatctctgggcaccaacgtgcttaccaggcctaaatactggaaatggattatttttcatcagggggtcctgggaaagaaatgggcccagagatttaaaatttttaaaaaacctaaaaacatcacaggcattcctctgggaagcaactgaagcagcagccctagagggttgtcaaggactgaggcaaatgaaaaatatgggacattgggcatttaatgtccaatgtgggacaaagagtgaccctgtcacggggcggccttaa

SEQ ID NO: 24852 - DNA, 565 bp, Homo sapiens
tgtgaacctaaagtggttctaagaaaataaagtcaatgctggacacgttggctcatatctgtaatcccagctgtattcattttcatgctgctgatgaasacatatccgagactgggaaatttactagagaaatttaattggacttagagttccatgtggttggggaagcctcacaatcatggtggaagacaaggaggagcaagtcctgtctgacatggatggcagcaggcaaaaagagagcttgtgcaggggaactcccctttttaaaaccatcagatcttgtgagatccattcgccatcacaagaacagcacaagaaagacccgaccccatgattcaatcacctcccacctggcccccccccgccccaacacgtgggaattgtgagagttacaagatgaaatttgagtggggacacagaaccaaactatatcatcagcactttgggagaccaaggcaggaggatagcttgaggccaggagttcaagagtggcctgggcaataaagtgtgacctccaacctgggcaatgtggtgagaccccatctgttacaaaaaataaaaatta

SEQ ID NO: 24853 - DNA, 565 bp, Homo sapiens
tgtgaacctaaagtggttctaagaaaataaagtcaatgctggacacgttggctcatatctgtaatcccagctgtattcattttcatgctgctgatgaacacatatccgagactgggaaatttactagagaaatttaattggacttasagttccatgtggttggggaagcctcacaatcatggtggaagacaaggaggagcaagtcctgtctgacatggatggcagcaggcaaaaagagagcttgtgcaggggaactcccctttttaaaaccatcagatcttgtgagatccattcgccatcacaagaacagcacaagaaagacccgaccccatgattcaatcacctcccacctggcccccccccgccccaacacgtgggaattgtgagagttacaagatgaaatttgagtggggacacagaaccaaactatatcatcagcactttgggagaccaaggcaggaggatagcttgaggccaggagttcaagagtggcctgggcaataaagtgtgacctccaacctgggcaatgtggtgagaccccatctgttacaaaaaataaaaatta

SEQ ID NO: 24854 - DNA, 1687 bp, Homo sapiens
gctttcatagattctctcaatcctgatccccaactctatagtgcccataaagtcatggtttttggctcctccaaattctattatggaggagaagtgggttttttgtttgtttgtttgtttgttttggtccatgttttgttatttcccaggaatgtcaccctcatgatagaaaaggatcatggcacttgtgtttccctccttccccggactgcaggcttctcaaggatatgaccaggtcagttcaaaaacttcaacatttccttcctcagctacaaatttctaccatctagagatgtttgatacatactgggaacacaataatgatacctagataaaggaatgaatgtaactaaaggaaaaaatgttattgttaatcaggaaacagttatgaggtaatataacagtttaacacacaggtccagccatgaaacagttacacaggaaagctacagttcagctggctgaacctggctgagccccagagctgcaggaggacacggttcttttaggacaaatcagcctataaggaatgggctttagggtaaggcaaagattgctacaatcagcatttagcccagaagatactttcttctgctacctcaaacaactgagatctgtaaaatcccaaccaccacacttagggaaggatcctaaaagagagctgcaatggagaactgattctcctggggttttatttttgtttttctgtcataaaagaatttgctctataaagaacaaaaactgtaatagaatctgtgtgtatgttatactatttcaaggtttatttaagaatttgaggtggattaaagtaaaagataatccccaaaaaggtatttttaatagaaataagtggtgtcaaaaagtgaagaagatgtggtcctgtactggaaacctagcactaagcatcctggtagccaaagctagaaggaaaattttacaacttacccaaaccttattttctaataaggaaacataccagaagagagaaatgtttcactagcaytgaattatatgaagaatttattttacaaacccttatataaggacactagataggtcaaagcctttaacacgggtgttacaaaacttgaatttatgctctttatatttctgtatttttaattgcttacccccagctaaggccataatattatatcatataacacaatgtcctgatatgtagcatttgggtggcctaaccagatataaggggatagcttagagattctgcagacaagttagcagatcttttggtttatccacttcagacatcaattacttgatctgcactttgaccaaggtggccaattcaagactgagatgtgtttatatctcagtactctatgcattctctgtgtccaacatggtgactgacacataataggtgcccaataactacttgacaaacagcactagtgagtgttaaacagcgctttgtaatggagagtggctagaaagctgtgcagcagcaaaggttgggcttgaagaaaaggactcctattctaatctggataggagtgtcactttttctctgcctgtgttagtgtatctaacacttctcttctggctcagactcataaaatgatacctttatccataattttagcaaaatatggaagctaactgttcaaaacctgcatatagtttattccttattaggagcttagttcttgtcaacaaacccttt

SEQ ID NO: 24855 - DNA, 1687 bp, Homo sapiens
gctttcatagattctctcaatcctgatccccaactctatagtgcccataaagtcatggtttttggctcctccaaattctattatggaggagaagtgggttttttgtttgtttgtttgtttgttttggtccatgttttgttatttcccaggaatgtcaccctcatgatagaaaaggatcatggcacttgtgtttccctccttccccggactgcaggcttctcaaggatatgaccaggtcagttcaaaaacttcaacatttccttcctcagctacaaatttctaccatctagagatgtttgatacatactgggaacacaataatgatacctagataaaggaatgaatgtaactaaaggaaaaaatgttattgttaatcaggaaacagttatgaggtaatataacagtttaacacacaggtccagccatgaaacagttacacaggaaagctacagttcagctggctgaacctggctgagccccagagctgcaggaggacacggttcttttaggacaaatcagcctataaggaatgggctttagggtaaggcaaagattgctacaatcagcatttagcccagaagatactttcttctgctacctcaaacaactgagatctgtaaaatcccaaccaccacacttagggaaggatcctaaaagagagctgcaatggagaactgattctcctggggttttatttttgtttttctgtcataaaagaatttgctctataaagaacaaaaactgtaatagaatctgtgtgtatgttatactatttcaaggtttatttaagaatttgaggtggattaaagtaaaagataatccccaaaaaggtatttttaatagaaataagtggtgtcaaaaagtgaagaagatgtggtcctgtactggaaacctagcactaagcatcctggtagccaaagctagaaggaaaattttacaacttacccaaaccttattttctaataaggaaacataccagaagagagaaatgtttcactagcactgaattatatgaagaatttattttacaaacccttatataaggrcactagataggtcaaagcctttaacacgggtgttacaaaacttgaatttatgctctttatatttctgtatttttaattgcttacccccagctaaggccataatattatatcatataacacaatgtcctgatatgtagcatttgggtggcctaaccagatataaggggatagcttagagattctgcagacaagttagcagatcttttggtttatccacttcagacatcaattacttgatctgcactttgaccaaggtggccaattcaagactgagatgtgtttatatctcagtactctatgcattctctgtgtccaacatggtgactgacacataataggtgcccaataactacttgacaaacagcactagtgagtgttaaacagcgctttgtaatggagagtggctagaaagctgtgcagcagcaaaggttgggcttgaagaaaaggactcctattctaatctggataggagtgtcactttttctctgcctgtgttagtgtatctaacacttctcttctggctcagactcataaaatgatacctttatccataattttagcaaaatatggaagctaactgttcaaaacctgcatatagtttattccttattaggagcttagttcttgtcaacaaacccttt

SEQ ID NO: 24856 - DNA, 1687 bp, Homo sapiens
gctttcatagattctctcaatcctgatccccaactctatagtgcccataaagtcatggtttttggctcctccaaattctattatggaggagaagtgggttttttgtttgtttgtttgtttgttttggtccatgttttgttatttcccaggaatgtcaccctcatgatagaaaaggatcatggcacttgtgtttccctccttccccggactgcaggcttctcaaggatatgaccaggtcagttcaaaaacttcaacatttccttcctcagctacaaatttctaccatctagagatgtttgatacatactgggaacacaataatgatacctagataaaggaatgaatgtaactaaaggaaaaaatgttattgttaatcaggaaacagttatgaggtaatataacagtttaacacacaggtccagccatgaaacagttacacaggaaagctacagttcagctggctgaacctggctgagccccagagctgcaggaggacacggttcttttaggacaaatcagcctataaggaatgggctttagggtaaggcaaagattgctacaatcagcatttagcccagaagatactttcttctgctacctcaaacaactgagatctgtaaaatcccaaccaccacacttagggaaggatcctaaaagagagctgcaatggagaactgattctcctggggttttatttttgtttttctgtcataaaagaatttgctctataaagaacaaaaactgtaatagaatctgtgtgtatgttatactatttcaaggtttatttaagaatttgaggtggattaaagtaaaagataatccccaaaaaggtatttttaatagaaataagtggtgtcaaaaagtgaagaagatgtggtcctgtactggaaacctagcactaagcatcctggtagccaaagctagaaggaaaattttacaacttacccaaaccttattttctaataaggaaacataccagaagagagaaatgtttcactagcactgaattatatgaagaatttattttacaaacccttatataaggacactagataggtcaaagcctttaacacgggtgttacaaaacttgaatttatgctctttatatttctgtatttttaawtgcttacccccagctaaggccataatattatatcatataacacaatgtcctgatatgtagcatttgggtggcctaaccagatataaggggatagcttagagattctgcagacaagttagcagatcttttggtttatccacttcagacatcaattacttgatctgcactttgaccaaggtggccaattcaagactgagatgtgtttatatctcagtactctatgcattctctgtgtccaacatggtgactgacacataataggtgcccaataactacttgacaaacagcactagtgagtgttaaacagcgctttgtaatggagagtggctagaaagctgtgcagcagcaaaggttgggcttgaagaaaaggactcctattctaatctggataggagtgtcactttttctctgcctgtgttagtgtatctaacacttctcttctggctcagactcataaaatgatacctttatccataattttagcaaaatatggaagctaactgttcaaaacctgcatatagtttattccttattaggagcttagttcttgtcaacaaacccttt

SEQ ID NO: 24857 - DNA, 1192 bp, Homo sapiens
taacataataatcaattattctcactcatgggtctgagggtcagttgggctggctttacttcatgctgcaggtctgcagatggctgaggtggctctgttcaatttatacttattctggggtccaggctggagaagcagcagctacctgggaaaagcatctctccaagcagtggcagaactgtaagagggcaagtagaaatacacggtgattcttaaggtttaggtttggcaatcatatactgtcacattcgcccacatttcattggctattgcaaatacatgactgagtacccaacatcacttgggagtaggggatgttatgctctacctctgtgagaccatggcaacaaaaatggaagccaacaatttcaatctattactgtgaataattccctggtatttttcacactggggctgaggacaagagccaaccattatggaatgtcttggtgtttaactagaaagcacaggagcttttattgccacgttacttgccgtacagagggagcctttttacagtgacagtgattgaaggtggcccatggaaagtggcagagacaagaaagagaaaaagagattccaggtggcctttgagtctctggtttatttcttcctgcggctcagctgctcctactcccctgcccatctgtgacttgattggtcaacgcttccacggattacatgtccaatgtccatccaaaaccaacttttttgttgttgcctaaattagtttgattaacttctgttactcagaaacaaaacatatccagactaatacatatactctgggtctccatagcaattagatatgaaaagagttgtatttagactatgtagtgatttctatgacaaatatgcatcactcctgtatgtatatttttacagttgaccttcctcttctctttccactgcatgttgtataaattattaagtcttttggctgaaagcacatgcctgcagccagaagaatttggagtatcccttcagaagatgatttgggctggaaaaagaaacctgaagggaaactgaaatgaaaggcaggatggtratgaaaagagatcagggctgggaattagaagagctgggctgtcactaagtagttgaataatcttaggctgacctttttgcctcccagaggctctgtttgttctctgcatattagggaaggtaattctggaccatagagaggctg

SEQ ID NO: 24858 - DNA, 560 bp, Homo sapiens
ggacagcccttctaaggcaaggccaagtgactgtactttgcactttctaaagaataatagtgattgtcaggcctctttggttttggatgcaagatgtattattgcacttgagactaatagcttgatgcacttcacagattatgtagaaggatgccatttttgaatggaaagaagaggaatagatggctttctggaaagtcctgactgtcatatagatgcttacaaatatagcttaactactacacagatcttgtggtgctagatgaatctgtggtagataaggtagtcttcgttttttgtttttgtttttttggctttagagatatggtctcackatgtcgccaaagctggagtgccgtggctattcacaggtgcaatcatcacagcacagtacagcctcaaactcctagtctcaaagaatcctcccacctcagcctcccaaacagctgggactatcagcacatgctgctgcacctactcaaagctgtctttccctcaactgacacctataacctcatagaagatactttatgggtcaactgttagaggagaaaaaaata

SEQ ID NO: 24859 - DNA, 581 bp, Homo sapiens
tttctaattaaagaaattaagaaaaaagcctaacagtttttctttgtaaatttattttaaacaacaaggactaatgatatctatttatgatacacaacatgctgttttgatatatactttacactccatgttcttgggtttggcttttggcagaatgaaccaattattacagataaaaaatatttgaagaaaaattttaaaaaagtacaacagtaaaaataatacaaataaaaataatatagtataacagctatttacatagcatctacattgtattagttattataagtaacattgagattaatgtgtacaggaggacataggttacatgcaaatatcacaccattttatataagggacttgaacattccagaattttggtgttcagcgggtgttggaaccaatctcccatggctgtcaaagaattacattatgcatacatgttagaatgtttaaatcaaactggttaaccacttttctaagaaaaacttttagggctcaatcttacagcttattttttcaacacagggagatctaacttgggctcaataygtgaagttcatccttcttgccttgataat

SEQ ID NO: 24860 - DNA, 583 bp, Homo sapiens
tgttcctccagcagccagccagcgtctgttacataggctcctgaatattgacaggtggtggtggcagagatgccagttttaaccccttatttccagcatagttccagtgtggtggcctcagagagaatagctctattactccagtctgtgttgtttgaagtgtaatgcgattccaagaggctaatctcagacctactccttagaccttctacagatcctgaaaatattttactttgtgtgttacatgtctttccacttaaaatgactggaattgtttgtgattcttgtagaaaaccctgactgggccaggtgcggtggctcacgcctgtaatcccagcactttgggaggccwaggcgggcggatcacaaggtcaggagatcgagaccatcctggccaacatggtgaaaccccatctctactaaaactacaaaaattagctgggcgtggtggcgcgcacctgtagtcccagctactcgggaggctgaggcaggagaatcacttaatcctgggaggcatagattgcagtgagctgagatgctactattgcactgcagcctgggtgatgagcaagactctgaaaaa

SEQ ID NO: 24861 - DNA, 583 bp, Homo sapiens
tgttcctccagcagccagccagcgtctgttacataggctcctgaatattgacaggtggtggtggcagagatgccagttttaaccccttatttccagcatagttccagtgtggtggcctcagagagaatagctctattactccagtctgtgttgtttgaagtgtaatgcgattccaagaggctaatctcagacctactccttagaccttctacagatcctgaaaatattttactttgtgtgttacatgtctttccacttaaaatgactggaattgtttgtgattcttgtagaaaaccctgactgggccaggtgcggtggctcacgcctgtaatcccagcactttgggaggccaaggygggcggatcacaaggtcaggagatcgagaccatcctggccaacatggtgaaaccccatctctactaaaactacaaaaattagctgggcgtggtggcgcgcacctgtagtcccagctactcgggaggctgaggcaggagaatcacttaatcctgggaggcatagattgcagtgagctgagatgctactattgcactgcagcctgggtgatgagcaagactctgaaaaa

SEQ ID NO: 24862 - DNA, 583 bp, Homo sapiens
tgttcctccagcagccagccagcgtctgttacataggctcctgaatattgacaggtggtggtggcagagatgccagttttaaccccttatttccagcatagttccagtgtggtggcctcagagagaatagctctattactccagtctgtgttgtttgaagtgtaatgcgattccaagaggctaatctcagacctactccttagaccttctacagatcctgaaaatattttactttgtgtgttacatgtctttccacttaaaatgactggaattgtttgtgattcttgtagaaaaccctgactgggccaggtgcggtggctcacgcctgtaatcccagcactttgggaggccaaggcgggcggatcacaaggtcaggagatcgagaccatcctggcyaacatggtgaaaccccatctctactaaaactacaaaaattagctgggcgtggtggcgcgcacctgtagtcccagctactcgggaggctgaggcaggagaatcacttaatcctgggaggcatagattgcagtgagctgagatgctactattgcactgcagcctgggtgatgagcaagactctgaaaaa

SEQ ID NO: 24863 - DNA, 583 bp, Homo sapiens
tgttcctccagcagccagccagcgtctgttacataggctcctgaatattgacaggtggtggtggcagagatgccagttttaaccccttatttccagcatagttccagtgtggtggcctcagagagaatagctctattactccagtctgtgttgtttgaagtgtaatgcgattccaagaggctaatctcagacctactccttagaccttctacagatcctgaaaatattttactttgtgtgttacatgtctttccacttaaaatgactggaattgtttgtgattcttgtagaaaaccctgactgggccaggtgcggtggctcacgcctgtaatcccagcactttgggaggccaaggcgggcggatcacaaggtcaggagatcgagaccatcctggccaacatggtgaaaccccrtctctactaaaactacaaaaattagctgggcgtggtggcgcgcacctgtagtcccagctactcgggaggctgaggcaggagaatcacttaatcctgggaggcatagattgcagtgagctgagatgctactattgcactgcagcctgggtgatgagcaagactctgaaaaa

SEQ ID NO: 24864 - DNA, 580 bp, Homo sapiens
ctgtctcaaaaaaaagtatttgctgcactttctgagcagtcattgacagatacctggagactcccaaatcagctggggcacaggagatatcacaccggaattaaatatttgctatgaagatgtaaggaagagatattcaaccatgggtgagaaaaatgcacgtttcataaaaacaaagagttggctctctaaataaggaggccataattggagtgaggagagcagggagaatgagacatctgggcagatgccattctgtgaagtgcaaatgtttctttgcagccaggtagcagcatgtagtttagtgtgcactctattacccgtgccctctgccttttaatgcattagtggttctttataaatttgatgacctagatggcctcatgaatatttacttactcattcatcattctccacctarggtttaaggactgagccatcaattcggtgccatcaggggttttatgtgcaagactccatagtgagaagcaattggatgggctcacctcccacagcatcctgaaattcttaaagcaccaatatttgcttggggcattttaataataataccatattttta

SEQ ID NO: 24865 - DNA, 580 bp, Homo sapiens
ctgtctcaaaaaaaagtatttgctgcactttctgagcagtcattgacagatacctggagactcccaaatcagctggggcacaggagatatcacaccggaattaaatatttgctatgaagatgtaaggaagagatattcaaccatgggtgagaaaaatgcacgtttcataaaaacaaagagttggctctctaaataaggaggccataattggagtgaggagagcagggagaatgagacatctgggcagatgccattctgtgaagtgcaaatgtttctttgcagccaggtagcagcatgtagtttagtgtgcactctattacccgtgccctctgccttttaatgcattagtggttctttataaatttgatgacctagatggcctcatgaatatttacttactcattcatcattctccacctagggtttaaggactgagccatcaattcggtgccatcaggggttttatgtgcaagactccatagtgagaagcaattggatgggctcacctcccacagcatcctgaaattcttaaarcaccaatatttgcttggggcattttaataataataccatattttta

SEQ ID NO: 24866 - DNA, 546 bp, Homo sapiens
agggcaagggtggtggtgggaatgttaagaataaggtactatataagttagcatggggtaatataagggaagtggagagtaaaacaatatatagkaccagtaaaagagtaaagtagattaggagagagagagttatagaggagtgctgttttatatagcatggttatagaagacttctctgtagagggatatttaaagtgatgatggagataagggaggaagccttgtgagttttggaggctgggggagagataattccaagcagtaaaaatagcagattcaaaggccttgaggtggcagtagggtgcttggtgtgattaaacagaccagtgtggttagattgaggctacaagtatgactgagcctacaagtggtatagatgagaggtatgcagataatatcagactttagtttttaatttctgaatatttgtgctttgcaaaaccaaacagaggtatttgtagcagtggaatgacatgacattttaaggatcactctggtagttttgtggagcatagacattgataacctagaaaagtattacga

SEQ ID NO: 24867 - DNA, 533 bp, Homo sapiens
caacttaatgttttaatctcttttcatgaatatatgactgctgatagcagatgaaagcaaaaactagttactaagctgaaaatactcaaccaactactgattgcttaaagattttattttatttatttattttttccttgaggtggagtttcactcttgttgcccaggctggagtgcaatgatgtgatctcggctcactgcaacctccgcctcccaggttcaagcrattctcctgcctcagcctcctgagtagctgggattacaggcacctgccaccatgcctggctaattatttttaataaatttttagtagagatggggtttcaccaagttggccaggctggtttcgaagtctcagcctcaagtgatccacctgcctcggcctcccaaactgctgcttaaagataacttgaatcaagccatgattcttggcttggaaataagctaagtgaattcatagtctttcctttgtttcttggctggcaaagcacaatctcagctccaggctgaacaaaaggttatgagaaatgtaa

SEQ ID NO: 24868 - DNA, 584 bp, Homo sapiens
atcttgtttcatgaatttatttagtgaaagtatgtttttgattgacataatttatatatataaaaaatcattactaaaagggaatgatttcctatgactttctatttaattttgtttcttttttgttttaggtcctgtagctttttcttttgagacggagttttgctctgttgcccaggctggagtgcagtggtgcaatcttggctccctgcaagctccgcctcccggattcacgccattctcctgcctcagattccccagcagctgggaattcaggcacccgccaccatgcccggctatttttatttttatttgtttattttttttagtagagacagggtttcactgtgttagccaggatggtctcaatctcctgacctcgttgatccacccacctcggcctcccaaattgctaggattacaggcgtgagccaccgctcctggccggtcctgtagctattatttcctgtttttctctcttgttctctttcttagcrtattattgatttttatagtgacatgttttacttcttttctcactactctctctgtgtgtatgtctttgtgtgtgtgtactataggta

SEQ ID NO: 24869 - DNA, 573 bp, Homo sapiens
tgttccttgccctagacatctcttccatttggctgtttctgagttatatttttataataaagtagtaaatataattacagttatttgttgaggttttctttttagtaattctatcaaattatttaacttgaaaaggggtttatgctagtctcagatttataggaggtagctcagaagtgtagatgggtttcagggatgtgtaactctcctctacagtgagagaggtgatgtgggactgagccctgaatttgtggggtctgtgcgaactctaagttgtgtcagaattaaattttggggcaacaaatgggtgttggagaatcagtgggttttcagggaactttccacatttaggatcaaaaacataaaaagaaagacaatgtgggggcctctgctggagagagactccaggtgtctcggggaaggtaggctctgctctgcacacaggctgctacaccatgmactgccctgtggttccaggcatcctcccatggtaagaaggaccgacgactctgagggaagaagttctgagaacagatgccttctaccctcctgccaacctgaggccaccacatg

SEQ ID NO: 24870 - DNA, 1683 bp, Homo sapiens
ttctcacctctggatactttctaagcatctacttttattccaagtgagtagaagatcaaagtgtacatatagggatgttatgaagccacagtttggcctccaaagcctccttattgaagggcagtattcttcagatagaccttgagtccatgcaagaatgtaatttaagtgtagaattatgtgactgcagcaaagctcagctgctccccttcttttctccctggctgtctccctttctgtcttcaggatttattccccttctctctcaaccccttctttggccttccttgctctctccttcttagcctcctgaatctagttagaacagagagccaaatagtgtccaaacactattcatagtttaatacacatagcaccaggaaaggctcaggttttatacatttagatattttcctcatttggagcaaagatatttctaattaaagaaaatatatatatttccatttgaatagaaattggccatcaccaacttaggcagtgaaagttaccttaagaaaatattggccaggccagatgcagtggctcacacctgtaatcccagcactttgggaggtctaggtggaaggactgcttgagttcagaagtttgagaccagcctgggcaacacagggaagcctcatctctacaaaaatcaaaaaatacaaaaattagaggggcgtggtggcatgtgcctgtagtcccagctacttgggaggctgatgtgggaggatcccttgagccagggagatggaggctgcagtgagctgagctgtgatcatataactggactccagcctgggcaagagagagaccctgtctcagaaagaaaatgtacatatatgtgtatattagtcgagtgatggttgcattctttttctccaccaaagttaaaaagatcttgaggaagacatttgaggcagatgaaagttattgtcacgtttcattgttatgttcctttgaactaccagccctttcttcacctttgaatctgggctaaatctcttgcttctacagctttttctgtggtttagaggaggacactactacgggaaaagagcaagtccagcctggtaaactgcacagagatatgcccaggtctccagagacatctacttgaggtgtaacttccacagtacgctgaagtttgttcctgtggaagtttccatgaggggcttaaaaaaaaagtccccctaatcttgttcccacgtgtctactgtgcatttgaagatgaagattatttatgtttagagagcactgtagacacttagatacctctccagcaggcagaggtctgaagggtgcactaatgtttatcactggcaccagaacaagcattacagaaatgcaagctccttggcttacctcccaaattctgctttccctcctgatggacttcaagccactttgtaaattgctttgttgtttgaggagtgcatttctatctgggttacaattctgccggagtcaatattttgacagtcttcttctggaaaactccccatttctaatatatcaccccactggattctcctttgaagttggagaacatagcccaggcctgagattacatatcaggattatctccctcttgaggtctgtgcccctgtatgagtgtgcatatgtgtatatctgagctggttaattttttcrttggttgcttagagcatggtataatattggcct

SEQ ID NO: 24871 - DNA, 1687 bp, Homo sapiens
acccgttgagcctggtgtgggtgggccagattccagagtgctggcctccagtggtgagagggaacacttttctcttgttttgagccacctaacttgttatttgttgcagccatcctaggaaaccataaagtatttattggttcatcttgacagatgataagagtagtagttttatcagataacattgtagaatttccttgccacatttgattcgtttttaagtgattcctacacttctctaacccaggtttttgcacgtggttttccttacctggaacatcccttttctttgtctttccaaatcttatccatcttccctcagatcaagttcttggcctgatctgaatttccttgatctcattttgccctactcaataatgattcctgaagcttgcatgacattttccagtttacaaagtacttctgtgacattgtcaccacattcttggatgtaaatattactatttccgttttccaggtaaataagccttggtgaagttcagtgattcatcaaagattgtacagcagcatattaatttcctaggcctgccaaaaccaagtaccgtagactgagtggcttaaaacaacagatttattttttcacagtgctggaggatagaagttcaaagtcaagtgttggcagggttggttacttctggagactctgagggagaggctgttccaagcctctctcccagcttgtggtggtagccagccattggcattcctgccttacagaccccagttcctggcttgcaaacctatcaccccaatctgtgcctccatcacatggccctgtccctctgtgtgttctctcctcttctcacaaagatttaatccagccggaccgcatcttaatttagctgatttcatctacaaagaccctrttgccaaataaggtcatattctgttgatctgggtggacgtgaattttagggtacactatacaagccactacaggctagcagtgacaacactgtgtcttattttcccccaagttcactgtgcttttctctcttcaccacatcgtggggtgacattcctaatgtgtttattgtctgtactcatagaattcatgtggcatagtggaaggagggtggaaagggcaggatccctgcctggggcccagctggccagggtttgatttccagctccattactctgtgcctttgaggaggataaggacccttagttgccacaccatgatatttatcattaaagaaaatataattatgagcctcataaatttgtcctgaagcttaagtacaggacaagcaataaatgcagatacaattatttttactcattttttcaagtatgtgagtcatctatttccccaacaatggctgaaggtcttcagtgcaggaatacaacagtacttcgtaacattttgaactcatcagtcacagatattgaagaccagaaaatattgcaggagttatcgagtcaacttttgccatatattcagaggagaatattggtggccccattgagttgctcaaataaagtaagtggtaaagtgtccttgacttgtttaaaaaaaacagagtcaattcttttatcttataaaagtgctcacattatataaagtaatattttgaaagtcatgttagaatgtgtatttttatatacatgcggttactggtatcactttagtagatgataggaaaagtacaaccactcccat

SEQ ID NO: 24872 - DNA, 762 bp, Homo sapiens
gttggcaggtgcgcagccccagttcccgcccacgcctctccctccacacctccccgcaagctgagggagccgtctccggccttggccagcccagaaaggggctcccacagtgcagcggtgggctgaagggctcctcaagcacggccacagtgggctccaaggccgaggaggcgcccagagtgagccagggctgcgagggctgccagcatgctgtcacctctcagctgcatctcttgaagagcaaaaaaactcttggtacgtgctatacaggatttgttattgtaattattattattatcaatgtatttaaatccacagatacctcccctggaggatcttcttctaacccgcctacaaccctytctctgattaggggcctgagcaaagcctgagaagggacgcgcaggacaaatttgcggggaaagagagaagattgggcaaaaatttggcatgagaacagcctttaacctgtcccttcaatacatttgctgcctcagaaaggaagaggccacaaggagctcctggtttctactacagcctccagagtctctaattccgtccccaaggatggtgtgggcagcatggttggggggcatccacggtcttcagcggtcccactctggagcctcccacaccacactgtgggcactgtggacattcagtaagtatgtgatgctgatgatcttgaaggttctcagaggctggctgattcttcctgtctgtgtattcacacttggtacttgttgattagttaaggatcaa

SEQ ID NO: 24873 - DNA, 762 bp, Homo sapiens
gttggcaggtgcgcagccccagttcccgcccacgcctctccctccacacctccccgcaagctgagggagccgtctccggccttggccagcccagaaaggggctcccacagtgcagcggtgggctgaagggctcctcaagcacggccacagtgggctccaaggccgaggaggcgcccagagtgagccagggctgcgagggctgccagcatgctgtcacctctcagctgcatctcttgaagagcaaaaaaactcttggtacgtgctatacaggatttgttattgtaattattattattatcaatgtatttaaatccacagatacctcccctggaggatcttcttctaacccgcctacaaccctctctctgaytaggggcctgagcaaagcctgagaagggacgcgcaggacaaatttgcggggaaagagagaagattgggcaaaaatttggcatgagaacagcctttaacctgtcccttcaatacatttgctgcctcagaaaggaagaggccacaaggagctcctggtttctactacagcctccagagtctctaattccgtccccaaggatggtgtgggcagcatggttggggggcatccacggtcttcagcggtcccactctggagcctcccacaccacactgtgggcactgtggacattcagtaagtatgtgatgctgatgatcttgaaggttctcagaggctggctgattcttcctgtctgtgtattcacacttggtacttgttgattagttaaggatcaa

SEQ ID NO: 24874 - DNA, 762 bp, Homo sapiens
gttggcaggtgcgcagccccagttcccgcccacgcctctccctccacacctccccgcaagctgagggagccgtctccggccttggccagcccagaaaggggctcccacagtgcagcggtgggctgaagggctcctcaagcacggccacagtgggctccaaggccgaggaggcgcccagagtgagccagggctgcgagggctgccagcatgctgtcacctctcagctgcatctcttgaagagcaaaaaaactcttggtacgtgctatacaggatttgttattgtaattattattattatcaatgtatttaaatccacagatacctcccctggaggatcttcttctaacccgcctacaaccctctctctgattaggggcctgagcaaagcctgagaagggacgcgcaggacaaatttgcggggaaagagagaagattgggcaaaaatttggcatgagaacagcckttaacctgtcccttcaatacatttgctgcctcagaaaggaagaggccacaaggagctcctggtttctactacagcctccagagtctctaattccgtccccaaggatggtgtgggcagcatggttggggggcatccacggtcttcagcggtcccactctggagcctcccacaccacactgtgggcactgtggacattcagtaagtatgtgatgctgatgatcttgaaggttctcagaggctggctgattcttcctgtctgtgtattcacacttggtacttgttgattagttaaggatcaa

SEQ ID NO: 24875 - DNA, 1096 bp, Homo sapiens
caacttagatattagatacactcccatacgagcattggagatgtaaacagaagaacccaagttcacaaaaaggaaggaactgtgaatgaggaaaggaaaggtgcaatccagagggtctgagggatgctattaaatgatgttgtatctggggacctaaggatatccctccctccaaatctatacatctatctatctatatctataaattgttatataatcattagggtttggtccaagcctcaatgtaataatctgataagctggtttgggaagcatgactagtaatggggattcttatttccctaagtatcaaataatctcagcctaaagtagactatgaggcctgctctgtataatcccccttctcccaattccccacaatactgccccaatacaaccacatattctagagctaactttaaatgtcagkgccagagaattccagaaggttttgtttaaaaaccatttattcaggccttactatatactaagcactcttctaaatgcttaaaacaccagagagttgcgtaagatccttgttttcaaggagtttacagattggaatagggcggggacacgtagcagacatataaacagataaagtgagcgtcacatggcaagagagagacttacagtctcacgcggtcgtgggagcacaaagaagaggtcccaaggccaggatgttgggagactgagggacagacatgtagggcacttaagaggctttctagagccagagatgaatctcccaagctgagcagacaaaggagagtgttgctggcagataatcatggggatgtcacagtaagtttggtgttcttggagcagaagcagcagttaggaagaaccaggattagggctgaagacatcaccctgggccatattccagggcagtctatgggaagagctttatctttgtctcttagtatttgttttctatctctgctgtaacaaatttactacaagcttaggatttaaaccacgtaaatttattatcttattcatctgtaagtcatatgctcagcacaggtctcacgggtctaaactcaagctctaggtaaggatttgtttccttgctcactggggctgttggcag

SEQ ID NO: 24876 - DNA, 566 bp, Homo sapiens
tgctccatgccaagctgggtgttatccagaaccccggagagcctcacatcgcagaagcagtgtgatgctgccagtcaagagagctgttgactgcatcattttgacttaaatcaagcttttgtttggctaaagtgttgtcaagagatttcaacaggcagattcagagccagatctagccagcgcatatgttttggcctacaattcaaattttttgtgtaaattttgaattggttgccgatatttaaaaatagggtatgtcacaaataaatcagtatttctaactcttcttggaaaaattaagtggaatatctagcaacactggactggcgttatctggcaacaactagctaaagctaaatactgactgcgttttagaaaacttaagatcctcctgttcatcagggtcaccagcactcttctatcacacaccacccatttgttacctgcctggctttagtgggctttaagagcttgcaaatcctactatgacaatgttctccacgaaggatgtgcttccaaatcccctgyagtgtattttatttatttatttttttcctattcaaaca

SEQ ID NO: 24877 - DNA, 575 bp, Homo sapiens
gctttccaagtgtttgcacaagtttatgcaccaaccactaatgaacatcccagttgatccacatcctcactgacacttggtakagtcagtctttttaaaattgtaaccagcctggtgagagtgtagtcaggtgttttttttttttattgttgtttttaaggtagaatttacatatgaggaaatgcacaaatcctaaggtacaattcagtgaattttgtcaaatctaaacttgtttgaaccttagtgttccaagtcgtataattgtgaattttcctatcaagagggcttgggggaattaaatcctttgtggctaaagagggaaaattgtatttaccttgtgctcccacccccttcttccagtgacaggcatgggtgagtagtcagggtctgtggactgctggtttatgttgttagtatattacctaccgcagagggcatttacctactgacctgaggggcaatggtgtggaaaaggaaaaaggcgaagcggtggcttttgagtgttagaaacgttgcatagtgacccagcctcagagagtctgcctgttctgccccaaggtctttctgggggtgcc

SEQ ID NO: 24878 - DNA, 575 bp, Homo sapiens
gctttccaagtgtttgcacaagtttatgcaccaaccactaatgaacatcccagttgatccacatcctcactgacacttggtagagtcagtctttttaaaattgtaaccagcctggtgagagtgtagtcaggtgttttttttttttattgttgtttttaaggtagaatttacatatgaggaaatgcacaaatcctaaggtacaattcagtgaattttgtcaaatctaaacttgtttgaaccttagtgttccaagtcktataattgtgaattttcctatcaagagggcttgggggaattaaatcctttgtggctaaagagggaaaattgtatttaccttgtgctcccacccccttcttccagtgacaggcatgggtgagtagtcagggtctgtggactgctggtttatgttgttagtatattacctaccgcagagggcatttacctactgacctgaggggcaatggtgtggaaaaggaaaaaggcgaagcggtggcttttgagtgttagaaacgttgcatagtgacccagcctcagagagtctgcctgttctgccccaaggtctttctgggggtgcc

SEQ ID NO: 24879 - DNA, 1017 bp, Homo sapiens
ttcactcttctcctttcgtccaatcatcaaacactgtcgttttttatttataatgtctttcacatccatcccttcctctatttattggtttcctattgctgctgtaacaaatgactccaaacttagtggcctaaaacaacacaaaatttattattttacagattctggaggctagaagtctgaaatgagtcttatcgggctaacatcaacatattgacaaggctggcttccctctggagactccaggagataatccactccttgccttttccagcttttagaagtctgccatatttaacagttcatggctttatatcaccttctcctaacttcgactctcctgattctttcatgtaaagaccctggtgattacattgggttaaccatgttcatccaagatagtctccttatctcaacatctttaatcatatttgcatttaaaaaaacatatgcacaggttctggggattaggacatagatatcttggcagagggggatagattattcagcccactgtactctataatatcacctcttcctcaaccctacttctggtccttatctgtaccactgaactagttcaacatttcctaaactggttttcctgaccccagcctctctcccaattccccatccattctacataccaataacaaatattcattaaaacttagttcttcatcctattccccatacccattccaaggccctgaacctagtttactttaggctggcattggtcactcttttgtttgtttgtttgtttgtttgttttttcagatggaatctcactctatcgcccaggctggattgcagtgacgccatctcggcccactgcaacttccgcctcccaggctcaagtgattcttctgcctcagcctcctaagtagctgggattacaggcatgtgccaccacacctggctaactttcatatatatatatatatatatwttttttttttttagtagagacagggtttcaccacgttggccaagctggtctcgaactcctgacct

SEQ ID NO: 24880 - DNA, 1017 bp, Homo sapiens
ttcactcttctcctttcgtccaatcatcaaacactgtcgttttttatttataatgtctttcacatccatcccttcctctatttattggtttcctattgctgctgtaacaaatgactccaaacttagtggcctaaaacaacacaaaatttattattttacagattctggaggctagaagtctgaaatgagtcttatcgggctaacatcaacatattgacaaggctggcttccctctggagactccaggagataatccactccttgccttttccagcttttagaagtctgccatatttaacagttcatggctttatatcaccttctcctaacttcgactctcctgattctttcatgtaaagaccctggtgattacattgggttaaccatgttcatccaagatagtctccttatctcaacatctttaatcatatttgcatttaaaaaaacatatgcacaggttctggggattaggacatagatatcttggcagagggggatagattattcagcccactgtactctataatatcacctcttcctcaaccctacttctggtccttatctgtaccactgaactagttcaacatttcctaaactggttttcctgaccccagcctctctcccaattccccatccattctacataccaataacaaatattcattaaaacttagttcttcatcctattccccatacccattccaaggccctgaacctagtttactttaggctggcattggtcactcttttgtttgtttgtttgtttgtttgttttttcagatggaatctcactctatcgcccaggctggattgcagtgacgccatctcggcccactgcaacttccgcctcccaggctcaagtgattcttctgcctcagcctcctaagtagctgggattacaggcatgtgccaccacacctggctaactttcatatatatatatatatatatttwttttttttttagtagagacagggtttcaccacgttggccaagctggtctcgaactcctgacct

SEQ ID NO: 24881 - DNA, 1017 bp, Homo sapiens
ttcactcttctcctttcgtccaatcatcaaacactgtcgttttttatttataatgtctttcacatccatcccttcctctatttattggtttcctattgctgctgtaacaaatgactccaaacttagtggcctaaaacaacacaaaatttattattttacagattctggaggctagaagtctgaaatgagtcttatcgggctaacatcaacatattgacaaggctggcttccctctggagactccaggagataatccactccttgccttttccagcttttagaagtctgccatatttaacagttcatggctttatatcaccttctcctaacttcgactctcctgattctttcatgtaaagaccctggtgattacattgggttaaccatgttcatccaagatagtctccttatctcaacatctttaatcatatttgcatttaaaaaaacatatgcacaggttctggggattaggacatagatatcttggcagagggggatagattattcagcccactgtactctataatatcacctcttcctcaaccctacttctggtccttatctgtaccactgaactagttcaacatttcctaaactggttttcctgaccccagcctctctcccaattccccatccattctacataccaataacaaatattcattaaaacttagttcttcatcctattccccatacccattccaaggccctgaacctagtttactttaggctggcattggtcactcttttgtttgtttgtttgtttgtttgttttttcagatggaatctcactctatcgcccaggctggattgcagtgacgccatctcggcccactgcaacttccgcctcccaggctcaagtgattcttctgcctcagcctcctaagtagctgggattacaggcatgtgccaccacacctggctaactttcatatatatatatatatatatttttwttttttttagtagagacagggtttcaccacgttggccaagctggtctcgaactcctgacct

SEQ ID NO: 24882 - DNA, 1017 bp, Homo sapiens
ttcactcttctcctttcgtccaatcatcaaacactgtcgttttttatttataatgtctttcacatccatcccttcctctatttattggtttcctattgctgctgtaacaaatgactccaaacttagtggcctaaaacaacacaaaatttattattttacagattctggaggctagaagtctgaaatgagtcttatcgggctaacatcaacatattgacaaggctggcttccctctggagactccaggagataatccactccttgccttttccagcttttagaagtctgccatatttaacagttcatggctttatatcaccttctcctaacttcgactctcctgattctttcatgtaaagaccctggtgattacattgggttaaccatgttcatccaagatagtctccttatctcaacatctttaatcatatttgcatttaaaaaaacatatgcacaggttctggggattaggacatagatatcttggcagagggggatagattattcagcccactgtactctataatatcacctcttcctcaaccctacttctggtccttatctgtaccactgaactagttcaacatttcctaaactggttttcctgaccccagcctctctcccaattccccatccattctacataccaataacaaatattcattaaaacttagttcttcatcctattccccatacccattccaaggccctgaacctagtttactttaggctggcattggtcactcttttgtttgtttgtttgtttgtttgttttttcagatggaatctcactctatcgcccaggctggattgcagtgacgccatctcggcccactgcaacttccgcctcccaggctcaagtgattcttctgcctcagcctcctaagtagctgggattacaggcatgtgccaccacacctggctaactttcatatatatatatatatatatttttttwttttttagtagagacagggtttcaccacgttggccaagctggtctcgaactcctgacct

SEQ ID NO: 24883 - DNA, 755 bp, Homo sapiens
cccaccacaattcaccacctggattggtactgaggcaagcaggtgcttgggaatggggtaggaagatggggaagaaggagaagaatgaaggggataagggctgagagtgatctcaaataccaacctatataaggagataggaaagaaaatagtcatttaaaatagcggcaacagtcggccgggagtggtggctaatgcctgtaatcccagcactttgggaggccaaggcgggtagatcacaaggtcaggagatcgagaccatcctggcgaacaaaatgaaaccccgtctttactaaaaatacaaaaaattagctgggtgtgttggcgggcacctgtagtcccagctactcgggaggctgaggcaggagaatggtgtgaacccgggaggcggagcttgcagtaagccgagatggcgccgctgcactccagcttgggccagagtgcgacgctgcgtctcaaaaaaaaaaaaaaaaaaaaaaaaaaatagtggcaacagtagaggaagggatgtyctaatgaccatgtagcattcattggcagttattcacatatgtaaatgagagagaaaatattctttgttctgtgacttataaaactgtcataactggtggaaaaaaatggaatatttgatcaaatgaaaaatgtatgcaagtataaatcaattgcttgattttcatgataattatgagagcctgaaacttaggtgaaactaaaaatgcttgctcaggagtgacattattaagataataggaata

SEQ ID NO: 24884 - DNA, 961 bp, Homo sapiens
tgccatggatgaggacactcacggcggcaactgtgtgtgtgtgtgtgctggatgagggtggggtatgggaagtcactggatcagggccctcctgcctctggcctggtgctgccaggaccctccccccatctcttacagtgtcctgactcaggagccctgggaagtactcagaggatccccagggaaccccaggaagtcaccccccaccctttcatgcctgttttggctgttgcagcaggtttgagagagtggatgagctcagtcaccctctttccttcctaccacatcagaaccattctcccagctggtgggagtccctattctctttacgttatgaggatgccaggatgctcacacaatgctgcaaaacacttgctttgtcacctggtccaagtccctttatctctctgagcctttttctcatctgtaaaagaggggaggccgggcgcggtggctcacgcctgtaatcccaacacttttggaggccaaggtaggcggatcacgakgtcaggaacggagaccatcctggctaacacggtgaaactccgcctctacaaaaaatacaaaaaattagccaggcatggtggcacacgcctgtagtcccagctactcaagaggctgaggcaggagaatcgcttgaacccaggagacggaggttgcagtgagccgagatcgcaccactgcactccagtctggcaacagagtgagattccatctccataaaaaaaaagtggggcgggagtgcggggaagcaatttctgtgcctccttccactatagggctgctgtgtcgaatgagagcaggtgaaggcgggcttgttacactggaaggatttccactctcttgtagaagaagtcaggacagaggaggcctggacagaggacccacgagaggggatggtaatagaaatgtcctccactccaggaggcaggagagctctgcagagtaatttcattcccgt

SEQ ID NO: 24885 - DNA, 961 bp, Homo sapiens
tgccatggatgaggacactcacggcggcaactgtgtgtgtgtgtgtgctggatgagggtggggtatgggaagtcactggatcagggccctcctgcctctggcctggtgctgccaggaccctccccccatctcttacagtgtcctgactcaggagccctgggaagtactcagaggatccccagggaaccccaggaagtcaccccccaccctttcatgcctgttttggctgttgcagcaggtttgagagagtggatgagctcagtcaccctctttccttcctaccacatcagaaccattctcccagctggtgggagtccctattctctttacgttatgaggatgccaggatgctcacacaatgctgcaaaacacttgctttgtcacctggtccaagtccctttatctctctgagcctttttctcatctgtaaaagaggggaggccgggcgcggtggctcacgcctgtaatcccaacacttttggaggccaaggtaggcggatcacgaggtcaggaacggagaccatcctggctaacacggtgaaactccgcctctacaaaaaatacaaaaaattagccaggcatggtggcacacgcctgtagtcccagctactcaagaggctgaggcaggagaatcgcttgaacccaggagacggaggttgcagtgagccgagatcgcaccactgcactccagtctggcaacagagtgagattccatctccataaaaaaaaagtggggcgggagtgcggggaagcaattyctgtgcctccttccactatagggctgctgtgtcgaatgagagcaggtgaaggcgggcttgttacactggaaggatttccactctcttgtagaagaagtcaggacagaggaggcctggacagaggacccacgagaggggatggtaatagaaatgtcctccactccaggaggcaggagagctctgcagagtaatttcattcccgt

SEQ ID NO: 24886 - DNA, 718 bp, Homo sapiens
cccaggcttgagggcaatagcgcgatcttggctcactgcaacctccacctcccaggttcaagtgattctcctgtgtccgcctcctgagtagctgggattacaggcacctgccaccacgcccagctaatttttgtaattttagtagagacggggttttgccatgttgcccaggctggtcttgaactcctgacctcaagtgatccacccacctcatcctcccaaagtgctgggatcacaggcaygaactactgcacctggccccaggcttgcttttacacaagttcaaccccagacaccttccaagaatggcttcgtagtcagcaagagaggaggcaccctatagcactcagctagagacaatatcacaccatatccagcaggagagagaaaggtcgatcttatgccataggctgacaaactttaaaacagctgtgtagaagggccctggtgacataggtttgaaaggggtcgctgcatttgtccagtacaacatttaaagtctgttctactgttgagactgattttctttccttactgtctggagcatcgtcttattcacaggcccgtttattcatcatgcggaaacagatgaccagggaattcaaatctaaatgataggtctatctctgtatctcagtattgaataataaaaccaatgatttcttcagggattccaaatcagtgtttgataaagatacaggacccgaggggaaagaag

SEQ ID NO: 24887 - DNA, 795 bp, Homo sapiens
gcttgtttcttcagtgcttggtgtgtttatttattttactttatattgaactgaaataaagtcaaaagttgccgaggtcctataatggtgatggtaaactctgaaaacaaaaggatgatatagtggaaatgccccagtagtgtctctgctctgagactatttgttcatggttaatatacagaaatcaaagcccttaccatccttcatcatcttctacttctgtttcaggaatgtcattttcaggtgtttcagcaattgcttgagtgagtttagatttaaactggttcagcagtgcaagggtctgaaataacaattagactgctaagttttctgataaagataaatataattttaaaagagatgcttaagtttggtagaaaaggaaatatcctacttggatgtaaaacaaaatgtttgattttgaacaaaaagaacaaaactacctttaggctgcaataatgacattaataaaccttgacatcattctgtttggatttgcactgacatttcccctcagagataggtgactattttctgatttgggaaacaaaagtttgcttacatagaagacagaagacccaacttttgaaaatacatgtttggcctggtgcattggttcatgtcccagcactctgggaggccaaagtgggaggatsttttgagcccaagagttcaagacctcaagaccagcaggggtaatgtagtgagactctatcactacaaaaagaaaagaaaaaaagtcagatgtggtggtgtgcatctgtagtcccagctactatgaagcctgaggcagga

SEQ ID NO: 24888 - DNA, 517 bp, Homo sapiens
tagcatattgataaggattaaatataaatacctttttacattgatatatttatacttaaaaaaaaacaaaatgaaatcattgtattttataacttgccttttctttaacaattactataggatttttcttttatgctgttctgttttcttttaataattatgaatggctccmtagaatctcatcaatgaaaccatagcttattaaggcatccactctatagatcattagactgcatttaactctatttttcttcttaattaataaaaccacaattaataactttgagtttaaatcttgggcatatttttaatttttgtttttaatatatatttctctaagtccaatcaaaaggtctacagataggaccactttaaggtctgtgacacctttctccattttgctccacagaaatattattctgttttacttgtcccttagtttatccatgaatggactttcatgatactggatgttatcatgaaaacattttgccaatattaataatgaaataatgta

SEQ ID NO: 24889 - DNA, 517 bp, Homo sapiens
tagcatattgataaggattaaatataaatacctttttacattgatatatttatacttaaaaaaaaacaaaatgaaatcattgtattttataacttgccttttctttaacaattactataggatttttcttttatgctgttctgttttcttttaataattatgaatggctccctagaatctcatcaatgaaaccatagcttattaaggcatccactctatagatcattagactgcatttaactctatttttcttcttaattaataaaaccacaattaataactttgagtttaaatcttgggcatatttttaatttttgtttttaatatatatttctctaagtccaatcaaaaggtctacagataggaccactttaaggtctgtgacacctttctccattttgctccacagaaatattattctgttttacttgtcccttagtttatccatgaatggactttcatgatactggatrttatcatgaaaacattttgccaatattaataatgaaataatgta

SEQ ID NO: 24890 - DNA, 537 bp, Homo sapiens
aaggtctgtcttgttttttctcttttttaacccttttggcacattcacaacctgatttctttacaagcctctcacaaattctttcaggccctcagtccatggtttttgaacctgtgtggtttcatcacatggcccaggaaacacaaaagggcagagaacaaaatagaatatgaacctacagacaattataggagggtacttaagtgcttacgtagcaaccaaaagctctccaaggggctctgggtccacgaaggatgacctcagataaatawagcatgtagccaaatactaagaactgagcaggcatcttggtgtcttttttgttttccttctcttatttgttcaatagatttcaaataacgtatgaatgattgattcagcctcatgaggctggctgtgatctaattccctgaggctgtctgcacagcaaaagagaaacaaaatcagagggatctggggatttttgcaaggctaaaataaaatggcatgtttgattactccctttgttttctcagttactaatatctgaactattta

SEQ ID NO: 24891 - DNA, 1084 bp, Homo sapiens
gatcccagggcctctcttcatggccctagacctaratgctctctccctcatcccaccctggtccctggtctacctttgttttgacttcctgcagagtcccccactcttggccatgcactgaccctaaggatgtaaacagcttctccattttcaacccttgatggttgatcttggccagttactcacttgatttagttcttttttcttttttttttttgagatggagtctctctctgtcacccaggctggagtgtagtggcgcaatctcggctcactgcaacctccgactccctggttcaagcgattctcctgcttcagcctcctgagtagctaggattaccggcacatgccaataccctcagctaatttttgtatttttagtggagatggggtttcaccatgttggccaggatggtttccatctcttgacctcgtgatccgcctgcttcggcctcccaaagtattgggattacaggcgtgagccactgtgcccggccgatctacttctacatgctgcttccaggtccctaatccggctctcatcagactcaattccccaccatctcctagggaagggatcagaggggtttagatcataccaggtttggctggtttggctgtgtcctcacccaaatctcatcttgaatcgtagctcccataattcccacatgttgtgggagggacttggtgggagataattgactcacaggggcagtttcccccataccgttctcacggtagtgaatgagtctcacgagatcagatgattttataaggggaaactcctttcacttggttctcattctctctttcctgctgccatataagaagtccctctgctcttcctttgtcttctgccatgcttgtgaggcctcctcagccatgtggaactgtgagtccattaaactctttttctttataaattaccccacctcgggtatgtctttattagcagtgtgagaacagactaatacaccaggattgcatgaactgcacttctcatgaagtttctctcacctcaagttcaaattaaatgtcacaatatccaactcctagctgttatatagaatcctgaaaagtaata

SEQ ID NO: 24892 - DNA, 1084 bp, Homo sapiens
gatcccagggcctctcttcatggccctagacctaaatgctctctccctcatcccaccctggtccctggtctacctttgttttgacttcctgcagagtcccccactcttggccatgcactgaccctwaggatgtaaacagcttctccattttcaacccttgatggttgatcttggccagttactcacttgatttagttcttttttcttttttttttttgagatggagtctctctctgtcacccaggctggagtgtagtggcgcaatctcggctcactgcaacctccgactccctggttcaagcgattctcctgcttcagcctcctgagtagctaggattaccggcacatgccaataccctcagctaatttttgtatttttagtggagatggggtttcaccatgttggccaggatggtttccatctcttgacctcgtgatccgcctgcttcggcctcccaaagtattgggattacaggcgtgagccactgtgcccggccgatctacttctacatgctgcttccaggtccctaatccggctctcatcagactcaattccccaccatctcctagggaagggatcagaggggtttagatcataccaggtttggctggtttggctgtgtcctcacccaaatctcatcttgaatcgtagctcccataattcccacatgttgtgggagggacttggtgggagataattgactcacaggggcagtttcccccataccgttctcacggtagtgaatgagtctcacgagatcagatgattttataaggggaaactcctttcacttggttctcattctctctttcctgctgccatataagaagtccctctgctcttcctttgtcttctgccatgcttgtgaggcctcctcagccatgtggaactgtgagtccattaaactctttttctttataaattaccccacctcgggtatgtctttattagcagtgtgagaacagactaatacaccaggattgcatgaactgcacttctcatgaagtttctctcacctcaagttcaaattaaatgtcacaatatccaactcctagctgttatatagaatcctgaaaagtaata

SEQ ID NO: 24893 - DNA, 1084 bp, Homo sapiens
gatcccagggcctctcttcatggccctagacctaaatgctctctccctcatcccaccctggtccctggtctacctttgttttgacttcctgcagagtcccccactcttggccatgcactgaccctaaggatgtaaacagcttctccattttcaacccttgatggttgatcttggccagttactcacttgatttagttcttttttcttttttttttttgagatggagtctctctctgtcacccaggctggagtgtagtggcgcaatctcggctcactgcaacctccgactccctggttcaagcgattctcctgcttcagcctcctgagtagctaggattaccggcacatgccaataccctcagctaatttttgtatttttagtggagatggggtttcaccatgttggccaggatggtttccatctcttgacctcgtgatccgcctgcttcggcctcccaaagtattgggattacaggcgtgagccactgtgcccggccgatctacttctacatgctgcttccaggtccctaatccggctctcatcagactcaattccccaccatctcctagggaagggatcagaggggtttagatcataccaggtttggctggtttggctgtgtcctcacccaaatctcatcttgaatcgtagctcccataattcccacatgttgtgggagggacttggtgggagataattgactcacaggggcagtttcccccataccgttctcacggtagtgaatgagtctcacgagatcagatgattttataaggggaaactcctttcacttggttctcattctctctttcctgctgccatataagaagtccctctgctcttcctttgtcttctgccatgcttgtgaggcctcctcagccatgtggaactgtgagtccattaaactctttttctttataaattaccccacctcgggtatgtctttattagcagtgtgagaacagactaatacaccaggattgcatgaactgcacttctcatgaagtttctctcacctcaagttcaaattaaaygtcacaatatccaactcctagctgttatatagaatcctgaaaagtaata

SEQ ID NO: 24894 - DNA, 963 bp, Homo sapiens
tcagcctccttagtagctgggactatagacacatgccactgcctggctcgggaataatgttttaataactaggtagcaacaagggaagaagagctctaatgaaaatatctctgggacactcagaggctgggccaggctgtaaagtagaaaaatttttgaaccttttccacgcatctgtcaggagcaacccaagccaatgttgttttgtcgcctccacagctacctaagggttgtgcgttgttctacctttctttttctttttcttcttgtcctgcttttatatttaagaaatgaaattgtattattttgggtaagttcaggaatcttaaggcatgccaaattacctgggccaggtgggtagtctcccatatatattatctaataagagtgagtatcattcyatcattattatttatatattgttattatatatgagtttaatttaaatcacttcagtaagcactgagacttttatgtgtccaatttgttttgggcaccagatatacaatttcatattatctcaaaggcattttgagcagggcttagatgtataaaagcagcttctcaaaacacagggtgcctcaaaaggtcaaggacctaaaaaacacagatggaatctggattctgaccaacagaatattttagctgtgtccagagacacatgggtaggcagaagagacaggctgctgtctgctaggaacgcctttttgttggtttcccctagttgaatcagcagccacatctgccatgttggggcaatctagctgttaaatgtatcacaggactgattaactggaaggacggagtggcactccaggtatgctcactagggagtataatttggaatttcttctatttgaaacattttcttgagaaaaatatttagagaagcttggccaaatagtatatggtccatccattgctctaggttagcactgctcaaaggtgttttgcatcagaatc

SEQ ID NO: 24895 - DNA, 963 bp, Homo sapiens
tcagcctccttagtagctgggactatagacacatgccactgcctggctcgggaataatgttttaataactaggtagcaacaagggaagaagagctctaatgaaaatatctctgggacactcagaggctgggccaggctgtaaagtagaaaaatttttgaaccttttccacgcatctgtcaggagcaacccaagccaatgttgttttgtcgcctccacagctacctaagggttgtgcgttgttctacctttctttttctttttcttcttgtcctgcttttatatttaagaaatgaaattgtattattttgggtaagttcaggaatcttaaggcatgccaaattacctgggccaggtgggtagtctcccatatatattatctaataagagtgagtatcattctatcattattatttatatattgktattatatatgagtttaatttaaatcacttcagtaagcactgagacttttatgtgtccaatttgttttgggcaccagatatacaatttcatattatctcaaaggcattttgagcagggcttagatgtataaaagcagcttctcaaaacacagggtgcctcaaaaggtcaaggacctaaaaaacacagatggaatctggattctgaccaacagaatattttagctgtgtccagagacacatgggtaggcagaagagacaggctgctgtctgctaggaacgcctttttgttggtttcccctagttgaatcagcagccacatctgccatgttggggcaatctagctgttaaatgtatcacaggactgattaactggaaggacggagtggcactccaggtatgctcactagggagtataatttggaatttcttctatttgaaacattttcttgagaaaaatatttagagaagcttggccaaatagtatatggtccatccattgctctaggttagcactgctcaaaggtgttttgcatcagaatc

SEQ ID NO: 24896 - DNA, 963 bp, Homo sapiens
tcagcctccttagtagctgggactatagacacatgccactgcctggctcgggaataatgttttaataactaggtagcaacaagggaagaagagctctaatgaaaatatctctgggacactcagaggctgggccaggctgtaaagtagaaaaatttttgaaccttttccacgcatctgtcaggagcaacccaagccaatgttgttttgtcgcctccacagctacctaagggttgtgcgttgttctacctttctttttctttttcttcttgtcctgcttttatatttaagaaatgaaattgtattattttgggtaagttcaggaatcttaaggcatgccaaattacctgggccaggtgggtagtctcccatatatattatctaataagagtgagtatcattctatcattattatttatatattgttattatatatgagtttaatttaaatcacttcagtaagcactgagacttttatgtgtccaatttgttttgggcaccagatatacaatttcatattatctcaaaggcattttgagcaggkcttagatgtataaaagcagcttctcaaaacacagggtgcctcaaaaggtcaaggacctaaaaaacacagatggaatctggattctgaccaacagaatattttagctgtgtccagagacacatgggtaggcagaagagacaggctgctgtctgctaggaacgcctttttgttggtttcccctagttgaatcagcagccacatctgccatgttggggcaatctagctgttaaatgtatcacaggactgattaactggaaggacggagtggcactccaggtatgctcactagggagtataatttggaatttcttctatttgaaacattttcttgagaaaaatatttagagaagcttggccaaatagtatatggtccatccattgctctaggttagcactgctcaaaggtgttttgcatcagaatc

SEQ ID NO: 24897 - DNA, 963 bp, Homo sapiens
tcagcctccttagtagctgggactatagacacatgccactgcctggctcgggaataatgttttaataactaggtagcaacaagggaagaagagctctaatgaaaatatctctgggacactcagaggctgggccaggctgtaaagtagaaaaatttttgaaccttttccacgcatctgtcaggagcaacccaagccaatgttgttttgtcgcctccacagctacctaagggttgtgcgttgttctacctttctttttctttttcttcttgtcctgcttttatatttaagaaatgaaattgtattattttgggtaagttcaggaatcttaaggcatgccaaattacctgggccaggtgggtagtctcccatatatattatctaataagagtgagtatcattctatcattattatttatatattgttattatatatgagtttaatttaaatcacttcagtaagcactgagacttttatgtgtccaatttgttttgggcaccagatatacaatttcatattatctcaaaggcattttgagcagggcttagatgtataaaagcagcttctcaaaacacagggtgcctcaaaaggtcaaggacctaaaaaacacagatggaatctggattctgaccaacagaatattttagctgtgtccagagacacatgggtaggcagaagagacaggctgctgtctgctaggaacgcctttttgttggtttcccctagttgaatcagcagccacatctgccatgttggggcaatctrgctgttaaatgtatcacaggactgattaactggaaggacggagtggcactccaggtatgctcactagggagtataatttggaatttcttctatttgaaacattttcttgagaaaaatatttagagaagcttggccaaatagtatatggtccatccattgctctaggttagcactgctcaaaggtgttttgcatcagaatc

SEQ ID NO: 24898 - DNA, 771 bp, Homo sapiens
aaaagcaggaggtaaagaaatagtcaaatcagttatcatctgagagcacagggggagggacaatgattgagatataaaccccaggcattcgagttgggagtggcaaccccctttgggtcccctctcattgtatgggagctgtgttttcactctatgaaatcttgcaactgcacgctcttctggtctgtgtttgttagggcacaagttgagcttctactcaccgtcccccactgctgtttgccgccatcacagacccactgctgatttccacccctccagatccagcagtgtgttcgctgcactcctgatccagcaagtcgcccattgccactcccgatatggctaaaggctcgccattgttcctgagcagctaagtgcccgggttcatcctaatcaagctgaacactagtcactggattccacggttctcttctgtgacccatggcttctaatagagctgtaacactcaccacatggcccamgtttccattccttggaatccatgaggccaagaaccccaggtcagagaataaaaggcttgctgccatcttgggagtggcctgccgccatcttgggagctctaagaacaaagacctgtcagtaacaaaatacatggtatctctagttttccttgtttaattgtactttagggtatgtccttggcaaaatttaaaactagcaacaataacaatatttgtactaaaatgccaaacttcaaatgttctaaagatgccctcaaattcctagctgtcatttttggcagttccttct

SEQ ID NO: 24899 - DNA, 1838 bp, Homo sapiens
tcctaatcttggagggtaaattgggattggctaactgacgaggtgcaggagagaacatgcacaggactggctccagccaccagtgaaagtgcagctgtagcacaggcaagacacatttatgccacacacattctacaggctcctagcgctaacttaattttgagggggaagactgaagaaatggggtagaaagtgaactgggtctatgaacttctgaccaagcactgattacaggaaaatagctttttttgtaatatttggccatgaacactctctcacccggrtgaattttaattaaaagcttttaatttctcatgatctgaagtcattttttcccctgcctggtggccctcatgcctgactctctgagaagaggaacagacggtaatgatgctgtaagagtcgttgactcttgacgttcattcatttttagactcttccttcccaacagatcctctttctagcccatcttcacacaacccagtagacagtgcaggaataaaaccacagtcctgctacactcctcagcacaggtccatcctgtttataataacaattaaaaattattttaagggagaaaagaaaaaagaaaggaaatctgacatagacttcctagaaaaatttgggaaatgagtaggaaagaaattttctccaataattttttctcccctaaaaaagaaatacttgggccgggagcagtggctcacgcttgtaattccagcactttgggaggctgaagtgggcagatcacctgaggtcaggagttcgagaccaggctggctaacatagcgaaaccccgtctctactgaaaatacaaaaattagctgggcgaggtggtggcacttgtaatcccagctacttgggaggctgaggcaggagaatcacttgaacctgggaagcagaggttgcagtgggccgagattgcgccactgccctccagcctgggcgagagagggagattccatctcaaaaagaaaaaaaaaaaaaaagaaaagaaaaaaagaaatacttgtacaaatattaagcatgttatttggaaactgtcttctggctgggggcagtggctcacacctgtaatctcagcactctgggaggccgagatgggaggatctcttgagcccaggagttcgagaccagcctgggcaacatagcaggatccccgtctctgcaaaaaacagaaaatattagccaagcatggtggtgcgtgcctgtagtcctaactacttgggaggctgaggtgggaagatcgtttaagcccaggaggttaaggctgcagtgagctgtgattgtgccactgcactccagcctgggctactgagcgagactgtctcaaaaaaaaagaaaatggttttatataatttgttccgtattttgctttacaaatctatgcaagctgtcttagggctcacatggacttactcactgatcttgggtatttctatgcctctgtaagattcaatttccccatttataaaatggagctaaggccagggatggtggcttccacctataattccagcactttgggaggctgaggcagcggggatcacttgaggccgggagttcgagaccagcctggccaacacggcaaaaccctgtttctgctaaaaatacaaaaaattagccaggcatggtggtgtgcacctgtaacccagctacttgggaggctcaagcaagagaattgcttgaatccaggaggcggaggttgcagtgagccgagatggtgccactgcactccagcctgggcgatagagtgagactctgtctcaaaaagaaaaatggaactaatattagcacttacctggcacatagtgtgtgtactctctcactctctttta

SEQ ID NO: 24900 - DNA, 1838 bp, Homo sapiens
tcctaatcttggagggtaaattgggattggctaactgacgaggtgcaggagagaacatgcacaggactggctccagccaccagtgaaagtgcagctgtagcacaggcaagacacatttatgccacacacattctacaggctcctagcgctaacttaattttgagggggaagactgaagaaatggggtagaaagtgaactgggtctatgaacttctgaccaagcactgattacaggaaaatagctttttttgtaatatttggccatgaacactctctcacccggatgaattttaattaaaagcttttaatttctcatgatctgaagtcattttttcccctgcctggtggccctcatgcctgactctctgagaagaggaacagacggtaatgatgctgtaagagtcgttgactcttgacgttcattcatttttagactcttccttcccaacagatcctctttctagcccatcttcacacaacccagtagacagtgcaggaataaaaccacagtcctgctacactcctcagcacaggtccatcctgtttataataacaattaaaaattattttaagggagaaaagaaaaaagaaaggaaatctgacatagacttcctagaaaaatttggkaaatgagtaggaaagaaattttctccaataattttttctcccctaaaaaagaaatacttgggccgggagcagtggctcacgcttgtaattccagcactttgggaggctgaagtgggcagatcacctgaggtcaggagttcgagaccaggctggctaacatagcgaaaccccgtctctactgaaaatacaaaaattagctgggcgaggtggtggcacttgtaatcccagctacttgggaggctgaggcaggagaatcacttgaacctgggaagcagaggttgcagtgggccgagattgcgccactgccctccagcctgggcgagagagggagattccatctcaaaaagaaaaaaaaaaaaaaagaaaagaaaaaaagaaatacttgtacaaatattaagcatgttatttggaaactgtcttctggctgggggcagtggctcacacctgtaatctcagcactctgggaggccgagatgggaggatctcttgagcccaggagttcgagaccagcctgggcaacatagcaggatccccgtctctgcaaaaaacagaaaatattagccaagcatggtggtgcgtgcctgtagtcctaactacttgggaggctgaggtgggaagatcgtttaagcccaggaggttaaggctgcagtgagctgtgattgtgccactgcactccagcctgggctactgagcgagactgtctcaaaaaaaaagaaaatggttttatataatttgttccgtattttgctttacaaatctatgcaagctgtcttagggctcacatggacttactcactgatcttgggtatttctatgcctctgtaagattcaatttccccatttataaaatggagctaaggccagggatggtggcttccacctataattccagcactttgggaggctgaggcagcggggatcacttgaggccgggagttcgagaccagcctggccaacacggcaaaaccctgtttctgctaaaaatacaaaaaattagccaggcatggtggtgtgcacctgtaacccagctacttgggaggctcaagcaagagaattgcttgaatccaggaggcggaggttgcagtgagccgagatggtgccactgcactccagcctgggcgatagagtgagactctgtctcaaaaagaaaaatggaactaatattagcacttacctggcacatagtgtgtgtactctctcactctctttta

SEQ ID NO: 24901 - DNA, 1838 bp, Homo sapiens
tcctaatcttggagggtaaattgggattggctaactgacgaggtgcaggagagaacatgcacaggactggctccagccaccagtgaaagtgcagctgtagcacaggcaagacacatttatgccacacacattctacaggctcctagcgctaacttaattttgagggggaagactgaagaaatggggtagaaagtgaactgggtctatgaacttctgaccaagcactgattacaggaaaatagctttttttgtaatatttggccatgaacactctctcacccggatgaattttaattaaaagcttttaatttctcatgatctgaagtcattttttcccctgcctggtggccctcatgcctgactctctgagaagaggaacagacggtaatgatgctgtaagagtcgttgactcttgacgttcattcatttttagactcttccttcccaacagatcctctttctagcccatcttcacacaacccagtagacagtgcaggaataaaaccacagtcctgctacactcctcagcacaggtccatcctgtttataataacaattaaaaattattttaagggagaaaagaaaaaagaaaggaaatctgacatagacttcctagaaaaatttgggaaatgagtaggaaagaaattttctccaataattttttctcccctaaaaaagaaatacttgggccgggagcagtggctcacgcttgtaattccagcactttgggaggctgaagtgggcagatcacctgaggtcaggagttcgagaccaggctggctaacatagcgaaaccccgtctctactgaaaatacaaaaattagctgggcgaggtggtggcacttgtaatcccagctacttgggwggctgaggcaggagaatcacttgaacctgggaagcagaggttgcagtgggccgagattgcgccactgccctccagcctgggcgagagagggagattccatctcaaaaagaaaaaaaaaaaaaaagaaaagaaaaaaagaaatacttgtacaaatattaagcatgttatttggaaactgtcttctggctgggggcagtggctcacacctgtaatctcagcactctgggaggccgagatgggaggatctcttgagcccaggagttcgagaccagcctgggcaacatagcaggatccccgtctctgcaaaaaacagaaaatattagccaagcatggtggtgcgtgcctgtagtcctaactacttgggaggctgaggtgggaagatcgtttaagcccaggaggttaaggctgcagtgagctgtgattgtgccactgcactccagcctgggctactgagcgagactgtctcaaaaaaaaagaaaatggttttatataatttgttccgtattttgctttacaaatctatgcaagctgtcttagggctcacatggacttactcactgatcttgggtatttctatgcctctgtaagattcaatttccccatttataaaatggagctaaggccagggatggtggcttccacctataattccagcactttgggaggctgaggcagcggggatcacttgaggccgggagttcgagaccagcctggccaacacggcaaaaccctgtttctgctaaaaatacaaaaaattagccaggcatggtggtgtgcacctgtaacccagctacttgggaggctcaagcaagagaattgcttgaatccaggaggcggaggttgcagtgagccgagatggtgccactgcactccagcctgggcgatagagtgagactctgtctcaaaaagaaaaatggaactaatattagcacttacctggcacatagtgtgtgtactctctcactctctttta

SEQ ID NO: 24902 - DNA, 577 bp, Homo sapiens
gaactcaggaggcagaggttgcaatgagccgagatcgcaccactgcactccagcctgggtggcagagcaagactccatctcaaraaaaaaaaaagttttgttttttttttttcccgtatctcagtcatggcatcaaaatccatcttctgtaggtgtatacctatgtccatagcagtatgactcacatagcaaaaaggtggaagcaacccagtgttcactgatggatgaacggatgaatgatatgtggtccatccatacaaaggaatatgattttcggccttaaaaaggaaggaaattctgacacatgaaccttaaagacattatactaaatgacatgtcacacataaaatgacaaatactatgacctcactaacgtgaggtctttggagttataaaatttatagagataggccaggcatggtggctcatgcctgtaatcccagcacttttggaggccaagaaaatgccagattggttatagcttggtgtttgccttatttgaacacggtttgaacagtgggccacatttgattggccaaaacttggtgattggtacgagtgtaggctactgtctgtt

SEQ ID NO: 24903 - DNA, 577 bp, Homo sapiens
gaactcaggaggcagaggttgcaatgagccgagatcgcaccactgcactccagcctgggtggcagagcaagactccatctcaaaaaaaaaaaaagttttkttttttttttttcccgtatctcagtcatggcatcaaaatccatcttctgtaggtgtatacctatgtccatagcagtatgactcacatagcaaaaaggtggaagcaacccagtgttcactgatggatgaacggatgaatgatatgtggtccatccatacaaaggaatatgattttcggccttaaaaaggaaggaaattctgacacatgaaccttaaagacattatactaaatgacatgtcacacataaaatgacaaatactatgacctcactaacgtgaggtctttggagttataaaatttatagagataggccaggcatggtggctcatgcctgtaatcccagcacttttggaggccaagaaaatgccagattggttatagcttggtgtttgccttatttgaacacggtttgaacagtgggccacatttgattggccaaaacttggtgattggtacgagtgtaggctactgtctgtt

SEQ ID NO: 24904 - DNA, 577 bp, Homo sapiens
gaactcaggaggcagaggttgcaatgagccgagatcgcaccactgcactccagcctgggtggcagagcaagactccatctcaaaaaaaaaaaaagttttgttttttttttttyccgtatctcagtcatggcatcaaaatccatcttctgtaggtgtatacctatgtccatagcagtatgactcacatagcaaaaaggtggaagcaacccagtgttcactgatggatgaacggatgaatgatatgtggtccatccatacaaaggaatatgattttcggccttaaaaaggaaggaaattctgacacatgaaccttaaagacattatactaaatgacatgtcacacataaaatgacaaatactatgacctcactaacgtgaggtctttggagttataaaatttatagagataggccaggcatggtggctcatgcctgtaatcccagcacttttggaggccaagaaaatgccagattggttatagcttggtgtttgccttatttgaacacggtttgaacagtgggccacatttgattggccaaaacttggtgattggtacgagtgtaggctactgtctgtt

SEQ ID NO: 24905 - DNA, 478 bp, Homo sapiens
gcctgtaatcccagcactttgggaggccgaggcgggaggattrtttgagtccaggagttcaggacccgcctgggcaatagagtgagaccttgtctctacacaaacaaattacacaattttttaaaagatggaaaagctcctctggatctcgcctgccccggaacttccctttggtagggaaatgagcatggttcccacggctctcctagaacctcaagactcttttgaagtctggattttccccagtgggtggtcgatggcggctggcagcttgggaccaggaagagagaggtgggagtcccaggggctcaggcgggtggaggtgggagcgtgcaggagggggtgcaggcggggtgggagccagaaaccaacagcgccaggcccagccttcctcaggagcaaaccacagtccttaaacactccccaaacacactgatgatgtaaatctggttttaaaataataacaataatgagaaat

SEQ ID NO: 24906 - DNA, 478 bp, Homo sapiens
gcctgtaatcccagcactttgggaggccgaggcgggaggattatttgagtccaggagttcaggacccgcctgggcaatagagtgagaccttgtctctacacmaacaaattacacaattttttaaaagatggaaaagctcctctggatctcgcctgccccggaacttccctttggtagggaaatgagcatggttcccacggctctcctagaacctcaagactcttttgaagtctggattttccccagtgggtggtcgatggcggctggcagcttgggaccaggaagagagaggtgggagtcccaggggctcaggcgggtggaggtgggagcgtgcaggagggggtgcaggcggggtgggagccagaaaccaacagcgccaggcccagccttcctcaggagcaaaccacagtccttaaacactccccaaacacactgatgatgtaaatctggttttaaaataataacaataatgagaaat

SEQ ID NO: 24907 - DNA, 607 bp, Homo sapiens
gcattgctcctccctcattagttaatgcccatagtccctgaatatgcataacttcttaagcaggaccctagtaaggaaatacacttttactcagaaatacccacaattcctatcaatctgccatcaacccaggtgtcttcaaagatacttccactgaaatgactctaattctactatgagagcctgtgaatcaatctggaacaagggtaagaagaaaaaayactttttctcacagtgagatcttcttcgatgcatccaactcacccgtgggaccctaagtcacttgtacagcaaagtcaaaatgggacaaattctggctctacttccaagaaagggacaaaaggagaaaatcgtttctttgtttttcacatgagcggggtgtcacataggctttcccactgcacagtgggcatttgggcaggggacatttgcaacattgaggtaggacagggagcaattctagtctgagaccactggtgccttttccatgagggtccacccgattgaaacactggttgggaaggtgacagccaagacagcaacacacagcattgtgtgaggagaagtggatgaacacaccaccctggttgggcatggctggaggagg

SEQ ID NO: 24908 - DNA, 553 bp, Homo sapiens
agaactaaataggattatatcaacatttgcactctatgtacctattctgaagaataacacaggaaagagattacttggaaggtatatttaaatacttaatttcctcaatcgagttacaagagaaatggactgagaattaggtctctgggcttgagtctatcagtgatggggattacttcacttttctggaatttcttttctcattttcttaaacatatgactatgaaatgtatggctgtccgccagagaatcctatcagacagaayccccgagatatttccatatatatatatatattcttacctctgggagattcttacctgccataattgggagaagatggggttgatcaagaagaggaggtctgtcatgtggcttttgacaccgcgcccctcgtccaccccatcctccaccacagttcccagccagtttagaaccgctggactagataaatcaccagggttctttccaactaaaacaatctctgattctatgactcattgaatcatgaaataatctaatagatgtgacctaatacaagggatctcttgcc

SEQ ID NO: 24909 - DNA, 553 bp, Homo sapiens
agaactaaataggattatatcaacatttgcactctatgtacctattctgaagaataacacaggaaagagattacttggaaggtatatttaaatacttaatttcctcaatcgagttacaagagaaatggactgagaattaggtctctgggcttgagtctatcagtgatggggattacttcacttttctggaatttcttttctcattttcttaaacatatgactatgaaatgtatggctgtccgccagagaatcctatcagacagaacccccgagatatttccatatatatatatatattcttacctctgggagattcttacctgccataattgggagaagatggggttgatcaagaagaggaggtctgtcatgtggcttttgacaccgcgcccctcgtccaycccatcctccaccacagttcccagccagtttagaaccgctggactagataaatcaccagggttctttccaactaaaacaatctctgattctatgactcattgaatcatgaaataatctaatagatgtgacctaatacaagggatctcttgcc

SEQ ID NO: 24910 - DNA, 618 bp, Homo sapiens
tgattgcttgttaggagtcatggaaagctaaaatgactgacaggcstttttagctgccctcctcctggtgcttctaggtgacccctctcagacatagtcttacaggagacatctcattgtttcaaaaggagacatcccattgtttagatggatccaaaaatccagttttgtcagcagagtcagaaatacgtatattcacaagcagtacttcatgccaataaaatgtacatgggacagacagggttcttacgggaattgaatgagataacatatatgacttatgtatggaaacttcaagtgtcagttacttgagatccaagtctactctttattctgtgctctgtgaaaatgtatttttcctttgcagtttgcatgatgataaaatttgaactttgtcaggtgagggtgctggagggaccctgcaggaggaagcagttgtgcttcctggttttgtgatagccctctggacaggctgcttcagcctgtgcagcttctgcagcacccagcacctacagcaaaggcagcttttccagcacaggctcctgcatcgctagctggccagaagtccaaggcagctcccatgcacggctttgctccacactctttcagagagctttt

SEQ ID NO: 24911 - DNA, 689 bp, Homo sapiens
taaagagacaatcaaaataggaagtacgtactctttgcaaataaattataataaggaaatagcacatcaaaacctgtaacccaaaagttgcacaaaggaaaagtaacatttagaaatgaacttgttagagcacatgaaaaaatgaaaataaataagctaaacatttagctgaggaacccaggaaaataacagaaacataaagtagaaaaatgcaatcaagaatggtacagcagaaattattaagataagaaacaaccaatcatagaatacatttgatagatgaaactaaaaacttgctatttgaaaggaccaataggctggacacggtggctcatgcctgtaatcccagtcctttgggaggccaaagcgggcagatcatttgcagtcagttcaagaccagcccggccaatatggtgaaacccygtctctactaaaattacaaaaaaattagttggtaatgatggtgagcacctgtaatcccagctactcaggagtctggggcaagagaatcgcttgaacccaggaggcggaggttgcagtgagctgagattgtgccactgcactccagcccgggcctcacagcgagactctgtctcaaaaaaaagaaaagaaaagaccaataatacaagcaaaacttccaaagaaagaaggcacatagaagcttaaaaaagaaggaagatataaacaca

SEQ ID NO: 24912 - DNA, 596 bp, Homo sapiens
aaattgttgatgtgtatttttttcacttctgcactgtttataacaatgaaaacttgcttaccatctaacaatctatgcaaaataaattaatcagaattttcaaaatggtagtcctcgaaggatatctagcacgcagacttgttttctatggccaaatcagtgatttaacacgaacagatagcctaaattaattcagctttttttctcacatgaagttacagaattttggtgcctcttggaagattagaatatctagtatcactgcatttggacrtgaaaaaaaaaaaaaaaaaaaaaaaacctatggcccggctcagtgactcacgcctgtaatcctagcattttgggaggctgaggcaggagggaggatcacttgagcctagaagtttgagacttgcctgggcaacataacaaaaccccgtatcaataaaaaatacaaaaattagcccagtgtggtggtgttcacctatagtcccagatacttgggaggctgaggtgggaggatcacttgagcctgggaggtggaggctgcagtgagccctgaccacagcactgcactccagcctgggtgatcgagtgagggcctgtctcaaaat

SEQ ID NO: 24913 - DNA, 508 bp, Homo sapiens
attgcaatcatggtggaaggtgaaggggaagcaggcacatttttacacacctggcaggagaaagagagagagcaaaggggaaagtgctacacactttctaacaagcagacctcatgagaactcactcactatcatgagaacagcaaggggggaaatctgccyccattattcaatcacctcccaccaggtcccttcttcaacattggggattacagttcaacatgagatttgggtggggacagagtgccaaaccatatcatagcttatttaggaaggtgcatagtattacttctaatgaaggtgttctatgtgtgcattgttgacattttctgtgactaagataagttatatttacatccactttaaaagtttactaggcttttgtgaacataagtagaggagtagaactctgggttcttggatgttcatttgtttttatgattcacactactttaaggagactcttggtcttgcctacagttatgcctggccttatcttcttagtgag

SEQ ID NO: 24914 - DNA, 532 bp, Homo sapiens
tcttttgttatttattgatgtggattttcccttttattttgatgtacttggagggtaaaggggtaatttgttatttttccttacttcaaagattcaaacaaaaatagattgtatctcttcagttatcattaaacatgtcttggctaaagtggtaagttgtttttttcttgttgtggttgttttaattttcatttctttgatttattactgaggttaattttttcaagtatttataaactattctatgtcctcatttgtgaatgtcatgtttgtgagccatttacatactggattctcagtgtcttattgtattatacaacttcatcatgtatcaaagacataatctttggtttgtatatatatatatatttgtactttggtttatatttatatatcttatatttatataattattatatatacatakaattatgtaattatataaatataagccttataaaatggcttatgttttgagaaacagagggcttacattttcatgcagtaaaatctatctatctctttcttttgt

SEQ ID NO: 24915 - DNA, 593 bp, Homo sapiens
tgtttttaggctatcagtttacaaaggtatttcactcctccttctaccgccaaatgtaatcattaaggtttcatgaactcttttgggagagaaaagttaatacttactcttgttttttgttgttgttgttgttgttattttggtttagtaatttaaatagctgctttgcaaaatgttctgtagaattttagatggtttattcctgaggtatataagatttatgtaccaaaacccctatatatttaattgttataaaaacctaaagaatcatttaagattattacaaaggactttttttttatcaatagacagacccacacctataaaataaagtagaaaactaagggcattatctgaataattcaggcaaaaataatatattttcattagaaacctcaacttttaggagagacctgaattatccaaataattgcctcaattctttttcttgatttttgyacttaaatataaactaagtaaagacaggaaaaaataattgttttcttaattataccttcccattttttgacattggtcaaatgatccaaagtgaaaagaaaaaaaagcacccttttcaataacaatgaaaaaaa

SEQ ID NO: 24916 - DNA, 796 bp, Homo sapiens
acccaggaggatggaaattgacaacgaagagacaataggtacacccccacattgccacctattcctggaygcagggtggaggtctggtggccacaggcagggacgcggaaatgcagctgaaggcggtcaatctaggtgaggagaacaaatgatggggagtacgagagaaatgttcacatatgggaagaaaaacgcaccagagtgcaccagtgtgtagcatttgcaatttctttcaataatgtttcctttgcactcacaacttggctgtttggtgcaagaagcctagctttcggcctgttttggctttcggcgtgcctttctcactaagcttaatcatttctagcttctgatttacactgagggacgtgcaactcctccttgcacttgaacacttacaggccatggtagggttattaactggcctatttccgatagtgctaggtctcagggtataggaaagggaagcccaaaaacaggagagagagaaagagagagacggttggtggagcagtcagaacacacacaacactgatggattcagctcgccgtcttctatgggtgctgttcatggtgccccaaaacaaccacagtggtaagatcaaggatcgctgctcacaggtcaccatgacagacagaatgataacagaaaagtttcaaatattgcaagaattaccaaaatgtaacttgaggacactcaatgcgcacatgctattcaaaatctggcgccaatagacttgctcgacgcagggttgccacaaaccctcagttggtaaaaaacacagtaactaaagcaaag

SEQ ID NO: 24917 - DNA, 643 bp, Homo sapiens
cctttaccacacacttggagaaatggtgcacattaggcctagactagaggaaagagtttaattttccatttggatccccatggagtgcttaggatcatactttttccaaggcaatttatcactaattcttccatccattatctgtccccaccccctcctcaagggcaggcacagggctaggtgctttacttgcatatacaggcactagagcagagtaacagagttagattttggcttgactattggctttgccacctaagagctgtgtgatttagaacaggcttctcaactctgagccatattttcctaattgtaaaaataggtcaataatgttttatctctcaccgaattggtgtagggattaaataagrttaaatgagaaaatgcctaaaacatagtcagcatctgataaatagtaggcatattaggtaccatcatttccatttcaggtatgagaaaactgaggcttaaaaagataagtgacttgtgcaagatcttaattctagtaatgaacagagataagatctcaccccaggagtatgagaaacatactcctcacagtagcatgcctctcctttaataaactcaccatctagggaggaaaatagtcccttaatcttggaattttctacaaccattataa

SEQ ID NO: 24918 - DNA, 536 bp, Homo sapiens
gctccatccatgtccctgcaaaggacatgatcttcttcctttttatggctgcatagtatttcatggtttatatgtaccacattttcttaaatatcaaatttaagttaagaattttaatctgtgtttttccctatgtgggtcagaaaataaaacagcatagttatttatttcagaataagccactgctttttcaaaatgcattgaatcttttaagaaatacacagatctcgtggtttggttttgcatctcccwgatgacgaatgagtcatgttcttgttggccatttatgtcttcctgggaaaaacgtctattgaggttcattgctgtctttgaattgtgttgtttatttttactatggagttgtatgagtttcttatatattttgtatattaatcccttatcaaacgtatggtttgcaaatattttctccaatttcaatatttacttcattttgctgattatttcctttaccgtgcagaagtttttattttgatgtagtctcacttctttatttttgcttttgttgcctgtgcttt

SEQ ID NO: 24919 - DNA, 747 bp, Homo sapiens
tgttatagttcacgacgtacagaaaaaccttcaggccgaacttaaaatatgtaaggaggcagctttaggctaaacttgatttaacactgtgagctatatatgtggggcatatagagggttaaggtttactaacctttagtttcctcttgccttcctgaagggccaaatactgtaatacgtgcagttccctccaataggaacgtacttcttcattctcttttcctggcaaacacattcttcaaggtccagttctgtgaagatccttctgcctgttttttaaaatttatttttatttgtttgtttatggtcacatacgtctcttcctggtctggactcatccaatccatttgtcacagtaaagcttctggggtaggggaggtggttattctaatgtacatccaatcaagccactctctgtttaaaaccttttgaaggcttcccatacctcccaggataaagactcacctcatcttctatctttaagggcttgcggatttcactgtccaaatctctccctctytcacactctgacccatctacactggcccatcttctctttaccttatgggctgagctcttttccaccccagggttctgtgtgttatttggtgaatcaattaatgaattaattcagcttcccgtcactaaccagatagcccacatctaagaatctaatgataaaacaggcaagtggagaagttttggatttggtttgcgctcaatagctgttgtttgccttcccaggat

SEQ ID NO: 24920 - DNA, 747 bp, Homo sapiens
tgttatagttcacgacgtacagaaaaaccttcaggccgaacttaaaatatgtaaggaggcagctttaggctaaacttgatttaacactgtgagctatatatgtggggcatatagagggttaaggtttactaacctttagtttcctcttgccttcctgaagggccaaatactgtaatacgtgcagttccctccaataggaacgtacttcttcattctcttttcctggcaaacacattcttcaaggtccagttctgtgaagatccttctgcctgttttttaaaatttatttttatttgtttgtttatggtcacatacgtctcttcctggtctggactcatccaatccatttgtcacagtaaagcttctggggtaggggaggtggttattctaatgtacatccaatcaagccactctctgtttaaaaccttttgaaggcttcccatacctcccaggataaagactcacctcatcttctatctttaagggcttgcggatttcactgtccaaatctctccctctttcacactctgacccatctacactggcccatcttctctttaccttaygggctgagctcttttccaccccagggttctgtgtgttatttggtgaatcaattaatgaattaattcagcttcccgtcactaaccagatagcccacatctaagaatctaatgataaaacaggcaagtggagaagttttggatttggtttgcgctcaatagctgttgtttgccttcccaggat

SEQ ID NO: 24921 - DNA, 747 bp, Homo sapiens
tgttatagttcacgacgtacagaaaaaccttcaggccgaacttaaaatatgtaaggaggcagctttaggctaaacttgatttaacactgtgagctatatatgtggggcatatagagggttaaggtttactaacctttagtttcctcttgccttcctgaagggccaaatactgtaatacgtgcagttccctccaataggaacgtacttcttcattctcttttcctggcaaacacattcttcaaggtccagttctgtgaagatccttctgcctgttttttaaaatttatttttatttgtttgtttatggtcacatacgtctcttcctggtctggactcatccaatccatttgtcacagtaaagcttctggggtaggggaggtggttattctaatgtacatccaatcaagccactctctgtttaaaaccttttgaaggcttcccatacctcccaggataaagactcacctcatcttctatctttaagggcttgcggatttcactgtccaaatctctccctctttcacactctgacccatctacactggcccatcttctctttaccttatgggctgagctcttttccaccccagggttctgtgtgttatttggtgaatcaattaatgaattaattcagcttcccgtcactaaccagatagcccacatctaagaatctaatgataaaacaggcaagtggagaagttttggatttggtttgcgctcaatwgctgttgtttgccttcccaggat

SEQ ID NO: 24922 - DNA, 633 bp, Homo sapiens
ttgttgttgttgttcttaatttagggttctacacgaatctacatggctgctcaggttgggcttttgtcttttcctgaaactcagctgttagtgcatataaaaaatagggaaactgttttaaatttagacagaattagagaagtaaaatcaagttttaattaatattgctaattgaaagcaggaaagagtgtaaataatctttaaaaattacaattggcttgggaatttacacatcagccacacatattgagttttttaaggttaaatttggtagagagtgacaggaaaatacaaataattgtggcttaagtgagagaaaagtttaattctctcttacaacaaatgtggaagcagatggtccagagaaatttggttcagtcctctgtggtgtcaggcacctggctctctcttttgagtcctttatgcatagccttcattcctaagtttgtttcatcttccaaggtggccactcttgatgaaaccattcatctgcattttaccaagtaggaagaaaacaagagaaggataagaatgctttgtgtccttttaagaatgtcacctagcatctgaaaacacagttctcataagtcattrgcagacacttagtgttacggtcaaaacttcatgcaaagg

SEQ ID NO: 24923 - DNA, 2863 bp, Homo sapiens
agactttgactccatatcagcaatattatgtcttattcctatgaaattggaactgagggaaaatgttttttcagggagattcgcgtttcagtaaaatccaaatttactcttcttttataagcagagtcactgtggacaagttatgcaggttgtgcacacagactatggacagtggggaactaatatctaagtggaaagagtatattttgataattaaaatgctcaaaaaagcctatcttttacaacttttattttaattctcaagtgaatgccttattctatttcatacagttgcactaagtgtgcctgttgcatagttttagttaggtgtaattacacaaatacatattttgaactagaatgatttgccaaaatatggatctgagaacattgattcttcagaaatattgagaggatcagataagaaaatgtgtttcgtagtaaaaatgtaggtccagtgatgttaacacgtttctttgctattgatgggagtttcaagaagctttattgtgctaatttgtgtttggaaataaatggatgagattcttgtttgcartggttgagcaggtatccattttcttgcaatgtattttataggacattgtagtataacactgatttaatgcagcgattctgaaacttatctaaagagaaaatatatttccctcctcaccaccatctctgaatttatttaattcagattctccagaataaagttctggcaacctgtgtttttaactagctgcctaggccactcataattaggcattttttttgaaacaccaatctatacaaatgctttgtccactaggaatctacaacaaaatcacttgaggagctttttaaaatatacatttattcgatccccctcgcatttatgaatcagagggaggtatggtccctctatagccatttcttatgctaactctcaattaagaactattgtttcagacctaactttcttattctttgtatgttactatttagttatacctcaaggtacttccatatggaagttttctttcttgagcccatttcttatcatgtatcaagctctccctgccttttctacttctctcaaggcaaaaagaaatagaactcttagcagttctttatctcagggcataactgatggtagaaaaaggaaagactttgaatttttggagcacaatccagccagcagataaaatatttgcaaataatgaaaagctgattgcttaagtgtgagacattttatagctcatatgctttcaaatgcatacagttggcatgaacagggtggccgattttaaaaaagagtaactggattaagtagattcccttgtgtaaaattctgtctgcttgatctgttttccagatgtttccgtgacaaatgttttcttaatgtgaagcccaaccataaaaagcacctggctagtatacagctctgccagacacaaatcatcctttttttttttttttaatacaaatacttaaagagaggaagccgaatttattttaaacacagcagggatcatcctacttcatcttcatatggaaatatgaagtgacaaaatgtttattgaaacaccaatcttaatataaagagcttcatccatgtctgcaaacaacacaatactagactctttctacaagtctgcagaacagtttggaagctataattgaagcgtttattttcaattttaatttttatgtacagtctctggctaagaacacaggagtaagcggcaatatagtgtggcagtcaacagctgaggtttttgagccagacaatctgggttcaaatccttctccaccacttaccagctatatagacttgggcagttcacttaaccttctattctttattatccttatctgtaaaataggaattataatagtacttacctcagaagattgttcaaaagattaacagtatttatataaataaacacttaaaatattttttagccaatagtaaatgcccaataatattagagttgataaagtggatgtctctattggttattttcgagattaaaagaaagaaaactccagtgattttgagactgatattttgctttgttaggggactaaaatttggttcacagaggcttatttggataaaagcagtagctagtcatggtaaatgataaactcccatcctccttaaatgtgctacttgattcataactacttactcatttccttaatttactgagatatattggagggaaaaacagctactatttcttatacagtttagttatgtaagtcaccatagagattaggtgttataatgtcattggcccaagaagggagaaaaataaaaggaggaaacacatgggggaaactagagggtgaaagaataaaagacacgaaggaagatcaattaaagaagcaagataaaaatgtgcagaggtgtaggttgagaaagggatatgctatcaattgaatatcctttgtgtcagctgtacaagtgccatggatatttctcacaaaaatgtaattggaacttttcttccattatcagctagcaatttaacaggatatttactttaagaagaaggtcccatatttcaaatactttgctcttttgcaactccagatgagcaagtcattctaaaaggcatttaagtaaacattaatagctggtgaaagctttgtggcatctcaaagatttgggctaaaagctatcttccatcaaacaggtctctttgttagttgccattcttgtcaaattaaaggaaagagatgagaaacatacatggctacacactaaatttctcccacccactttttctttttcttaaagtcaacctttagtttcgtggtggttatgaatttattggttttactttcaatatgaaatagacatgcatac

SEQ ID NO: 24924 - DNA, 2863 bp, Homo sapiens
agactttgactccatatcagcaatattatgtcttattcctatgaaattggaactgagggaaaatgttttttcagggagattcgcgtttcagtaaaatccaaatttactcttcttttataagcagagtcactgtggacaagttatgcaggttgtgcacacagactatggacagtggggaactaatatctaagtggaaagagtatattttgataattaaaatgctcaaaaaagcctatcttttacaacttttattttaattctcaagtgaatgccttattctatttcatacagttgcactaagtgtgcctgttgcatagttttagttaggtgtaattacacaaatacatattttgaactagaatgatttgccaaaatatggatctgagaacattgattcttcagaaatattgagaggatcagataagaaaatgtgtttcgtagtaaaaatgtaggtccagtgatgttaacacgtttctttgctattgatgggagtttcaagaagctttattgtgctaatttgtgtttggaaataaatggatgagattcttgtttgcagtggttgagcaggtatccattttcttgcaatgtattttataggacattgtagtataacactgatttaatgcagcgattctgaaacttatctaaagagaaaatatatttccctcctcaccaccatctctgaatttatttaattcagattctccagaataaagttctggcaacctgtgtttttaactagctgcctaggccactcataattaggcattttttttgaaacaccaatctatacaaatgctttgtccactaggaatctacaacaaaatcacttgaggagctttttaaaatatacatttattcgatcccyctcgcatttatgaatcagagggaggtatggtccctctatagccatttcttatgctaactctcaattaagaactattgtttcagacctaactttcttattctttgtatgttactatttagttatacctcaaggtacttccatatggaagttttctttcttgagcccatttcttatcatgtatcaagctctccctgccttttctacttctctcaaggcaaaaagaaatagaactcttagcagttctttatctcagggcataactgatggtagaaaaaggaaagactttgaatttttggagcacaatccagccagcagataaaatatttgcaaataatgaaaagctgattgcttaagtgtgagacattttatagctcatatgctttcaaatgcatacagttggcatgaacagggtggccgattttaaaaaagagtaactggattaagtagattcccttgtgtaaaattctgtctgcttgatctgttttccagatgtttccgtgacaaatgttttcttaatgtgaagcccaaccataaaaagcacctggctagtatacagctctgccagacacaaatcatcctttttttttttttttaatacaaatacttaaagagaggaagccgaatttattttaaacacagcagggatcatcctacttcatcttcatatggaaatatgaagtgacaaaatgtttattgaaacaccaatcttaatataaagagcttcatccatgtctgcaaacaacacaatactagactctttctacaagtctgcagaacagtttggaagctataattgaagcgtttattttcaattttaatttttatgtacagtctctggctaagaacacaggagtaagcggcaatatagtgtggcagtcaacagctgaggtttttgagccagacaatctgggttcaaatccttctccaccacttaccagctatatagacttgggcagttcacttaaccttctattctttattatccttatctgtaaaataggaattataatagtacttacctcagaagattgttcaaaagattaacagtatttatataaataaacacttaaaatattttttagccaatagtaaatgcccaataatattagagttgataaagtggatgtctctattggttattttcgagattaaaagaaagaaaactccagtgattttgagactgatattttgctttgttaggggactaaaatttggttcacagaggcttatttggataaaagcagtagctagtcatggtaaatgataaactcccatcctccttaaatgtgctacttgattcataactacttactcatttccttaatttactgagatatattggagggaaaaacagctactatttcttatacagtttagttatgtaagtcaccatagagattaggtgttataatgtcattggcccaagaagggagaaaaataaaaggaggaaacacatgggggaaactagagggtgaaagaataaaagacacgaaggaagatcaattaaagaagcaagataaaaatgtgcagaggtgtaggttgagaaagggatatgctatcaattgaatatcctttgtgtcagctgtacaagtgccatggatatttctcacaaaaatgtaattggaacttttcttccattatcagctagcaatttaacaggatatttactttaagaagaaggtcccatatttcaaatactttgctcttttgcaactccagatgagcaagtcattctaaaaggcatttaagtaaacattaatagctggtgaaagctttgtggcatctcaaagatttgggctaaaagctatcttccatcaaacaggtctctttgttagttgccattcttgtcaaattaaaggaaagagatgagaaacatacatggctacacactaaatttctcccacccactttttctttttcttaaagtcaacctttagtttcgtggtggttatgaatttattggttttactttcaatatgaaatagacatgcatac

SEQ ID NO: 24925 - DNA, 578 bp, Homo sapiens
ccccactcaaatctcattttgaattcccacatgctttgggagggacccggtgggaggtaattgaattatggggcaggtccttcctgcactgatcccatgatagtgaatgagtctcacgagatctgatggtttgataaggagaaacccattttgcttggctctcattctctctttgcctgctgccatatttctcatcctgttctcctgataatgagtaagtctcatgagatctgatggttattatwagggatagttttcctgcacaagctctctttgcttgctgccatccatgtaagacaggattttctccttttcgccttttgccatgattgtgaggcttccccagccatatggaactgtaactccaattaaatctgcttttatttttttaattccccatttttggatatgtctttatcagcagtgtgaaaactgactaatacagctactttaatctaaactcatctgccaagggccgtctctgtactggttgagaactcacagattctcaggtttgaagtctaatacctcaacttattagcgatgtcacatggaccaactcacttacctttatgtac

SEQ ID NO: 24926 - DNA, 898 bp, Homo sapiens
aggcagagggcagcttgagggaagagggctgtgtctgaagggcagcagggcagggactgcccactcccagcatggagagacaaagagaaggaccgcactgggggtgaggatgtcaaacggcgatagtaaatgactctctttcctcagcatatgatacaaatcactgtgcatcttccttcctyctcccctctctagaccgggagcccctgtggggaagggattttgtcttgttcatccttgacatctagcacagtgcctcttaggggcataatcagaatttattgaataaataagcaaatagatatataaacgaaggaacaaacccatttgcagctcatatgcacagccctgggccctggtcagggagcactgttgaatgaatgacatgcagcattcctacagaagttttatttcaatcagttccatcatctaccacctcaggtttcctttcagccactcagtcatgggccacacagcccacgtttgtctccacgctggccagaggctgtgctttgatagcacccactcaaatgtgcagtgacctcatcaggctcctcctgatggaggaataaggggagtagcaagtgacttcctttctcacagcagcctttctgtgagctctttcttgagagaaatcttgatccatggcaaaccgtctgtggtattctcggctgtagcccttggcgggagatgggaggagggaatgacagtgccaaggaggcagctgaaggatcatcaccctggaagccacagctctggcttgctttttccagtgggccataaagactgagggaggcaggcggaagcaggggccccagactaacaaactatagtttcaagtgtagtccccatgcaaagcccacctggcgaagtggttagacacagatgctggggctgg

SEQ ID NO: 24927 - DNA, 898 bp, Homo sapiens
aggcagagggcagcttgagggaagagggctgtgtctgaagggcagcagggcagggactgcccactcccagcatggagagacaaagagaaggaccgcactgggggtgaggatgtcaaacggcgatagtaaatgactctctttcctcagcatatgatacaaatcactgtgcatcttccttccttctcccctctctagaccgggagcccctgtggggaagggattttgtcttgttcatccttgacatctagcacagtgcctcttaggggcataatcagaatttattgaataaataagcaaatagatatataaacgaaggaacaaacccatttgcagctcatatgcacagccctgggccctggtcagggagcactgttgaatgaatgacatgcagcattcctacagaagttttatttcaatcagttccatcatctaccacctcaggtttcctttcagccactcagtcatgggccacacagcccacgtttgtctccacgctggccagaggctgtgctttgatagcacccactcaaatgtgcagtgacctcatcaggctcctcctgatggaggaataaggggagtagcaagtgacttcctttctcacagcagcctttctgtgagctctttcttgagagaaatcttgatccatggcaaaccgtctgtggtattctcggctgtagcccttggcgggagatgggaggagggaatgacagtgccaaggaggcagctgaaggatcatcaccctggaagccacagctctggcttgctttttccagtgggccataaagactgagggaggcaggcggaagcaggggccccagactaacaaactatagtttcaagtgtagtccccatgcaaagcccacctggygaagtggttagacacagatgctggggctgg

SEQ ID NO: 24928 - DNA, 644 bp, Homo sapiens
taagactgtgagcagtcccaaaaaatatttatgacaatttttttcccatttggaacatttgtttagcacagtgatagagacctgatgtggtgtttgcgcmgggcagattgaatgcactccaaaaggaaaccataaagggtcgagtcgataccacacagaaacacgaggtggtgggatgagtggtttttccacattttaatattttccaggatgacactgaaagccttacccttagagaaccctgagccacctaataattcataactccagactcttgagagggagaaatggaggtttataccattaaatagatgttctgggcctttcctaagagaggctggaaagaaattgagggcagtcatcggaatgtgaccagcacagcaaggtaagggacactgcacgactttgattccttgtggaacaatgtcttcttaatatcagtatttccagctccctgtttttaaaaaagtctctaaaaagcctatcttttttgggaggacaggagagaaacctgtcaaggaagtaatgagtcagcaccggggacctactatgtgccgttcacaacttgatactttcgtgaacggattgtctcagagaggaggaaatcatgactcagagaaattatgtaaatcactgaagatcca

SEQ ID NO: 24929 - DNA, 821 bp, Homo sapiens
tcctgttcttttccttcaagatgcgctgttcttatactggttaccattactaagaatataattagtgagaatataattgtttacttaatttctgacttgtccattacagtgtaaatttcatgaaagcagatgtcatgtccatcttgtttatgaacagtgcatggcccatagcagatgttcaagaaacatttgatacaaaataaasgaataaactatttttctgacctcaaatagtctgtcctcttcaacaaataatgtctcttcaaagttagcttttcatgttaaacctaagcctgaacccacaaagatcttgaacccaagacactccagcagttacttagcactaatatatagtttaactccgctgtgcttttgcgttatttgtcctgtgttaccccaccagatggtttgtttctcagcacagggcttacttctgtcacttcctctgtctccctgaggtgttctgtacactgggagtggtgttcagcaaacaccgaagccttgctctcgtatcacctacatgctgtaaagtggcattcagtgtgtacccaaggagaccttgttgtggcactgttccacctgcatcactaactcattaatcccggacttgtggaggagaaggctaaaggccttggctagtacagttatgtcccccaagctagagctcccctttttgttaccagttacatgctgctacatgcccagtgtggctttaagtgtgaccttcattggtgaccatagagatggtcacacagttgggcattttgctctcgaggaccagatcagcccatctgtccagggagcctgatgagtctccaggc

SEQ ID NO: 24930 - DNA, 1168 bp, Homo sapiens
ccacatttatgttctcagggacaactcaatcacattcgcatcttggccccccagcaggtgacccaactttggtctgtttttcctcccatgaaccttgcttcacctcctcccatgctttctattatttcattccagcactctatacaattaagatattgagatccttaaatgcatctaagaagggacaatcaaagtaatggctcccaggacactcatctatcttctaccctgcatacatatttagtcattaatatttatctactaaccagccaaagagatgctccatgtgtcagtgggtctgccatagggaaccaagtcatactgcctcacccactgtctctcacagactcaatgccatgttctctcccagtgggaaagtggaaagagatgcccgaagaccaaacctcccttggcttcagcttgtgaatgttagcagtggtatccagctgtgaaaccttctctcctctattttctgacttacaaccaaagaacagtgatttacatggggatagcctttcacaattaggcattttcaccaacattagcgcattcagttgtcacagtgaaaactaattcaggtgttaactgcctactttataagggacagagtgcagagagggagggatgtgattcagtgccagtgcaaggaccagaccccaggtgtctgactgccagcccaggctctgtccacctgctgacttctgccatggccctttgcatctcttctttctcttgctgcaggcttcctccagtccattgagtgctcattatggcctttgtggagtgaggaataaataaaggaggaatgaaataaatgtataaaattaatgaggaaagtataaaatgaatgaatraataaaagaggaataaaaggagatgaactgcaaagaagaaaagtttagctcctataggtaatagggtgtcagaattacttttgttggcttagctctcctatttctcagtttccacatttccttcacttcctatgttttaggcttttatttactataagttttccagtgctcctacaataaagcttatactactgaggccaatttcataggtggtttttatcaactagcaaaatatcttgtctgacatggtggctctatgttttatatctgctacttctaaaataatcgtcagtgtgtgccaagtaattatgtgt

SEQ ID NO: 24931 - DNA, 519 bp, Homo sapiens
ccccttggtgataagtgagttcttgctgagttagttcacatgagatctggttgtttaaaataatgtagcacctcccataacscccttggtctggcttttaccatgtgactcacctgcacccactcaccttctgccacgactggaatctttccaaccagaagctacagcctgcagaaccatgagccagtcaaactcttttctttataaattacccagtctcaggtgtttctttatagtgattcaagaacacactaacacagtgtaggatttaaatatatttctgtatttctaacaagctcccatgtagtgatgtccctccatggctcatgctttgtgtagcaaatcccccaaatctgaaagtattaaagattttaatttttttcaagttactatatctcaggcagcatctttttctttttaaactcaaaatgcttatggataggggacacatgatattgaatacagactacagaataacactggattttggctgcaactgaacaattcccatacatgaaa

SEQ ID NO: 24932 - DNA, 519 bp, Homo sapiens
ccccttggtgataagtgagttcttgctgagttagttcacatgagatctggttgtttaaaataatgtagcacctcccataacgcccttggtctggcttttaccatgtgactcacctgcacccactcaccttctgccacgactggaatctttccaaccagaagctacagcctgcagaaccatgagccagtcaaactcttttctttataaattacccagtctcrggtgtttctttatagtgattcaagaacacactaacacagtgtaggatttaaatatatttctgtatttctaacaagctcccatgtagtgatgtccctccatggctcatgctttgtgtagcaaatcccccaaatctgaaagtattaaagattttaatttttttcaagttactatatctcaggcagcatctttttctttttaaactcaaaatgcttatggataggggacacatgatattgaatacagactacagaataacactggattttggctgcaactgaacaattcccatacatgaaa

SEQ ID NO: 24933 - DNA, 503 bp, Homo sapiens
catagtgcctaagctcttgtcattctccaagattaaagaaacgatactcagacctgtcaaaatataatcacaaagcttatcaggaaaatcatctgaaaataagtcatgcatattgtrtgatatgagaaggatatactacatagcaggagatgctgcatagattttatgcggtagacatacattcctgctgtagtgtcagttcttttagagattagccaaaaatataagaaggctgctatgtaattgcaaggaaaacactttttatcattagtttagtctttaggtaaatgctttaaaaataaatttcaatatctttagcccaataagataaaggtctgtatactatacccctacaaagtaaacacaactagataaaaagtaaaatacaggcgaaaccaatcttgtatttgtatgcaagatagcagttacatagcttttccagggctgaggaactgagtgttgtctctgagagttatgtttatgtccacaggccactgtggact

SEQ ID NO: 24934 - DNA, 503 bp, Homo sapiens
catagtgcctaagctcttgtcattctccaagattaaagaaacgatactcagacctgtcaaaatataatcacaaagcttatcaggaaaatcatctgaaaataagtcatgcatattgtatgatatgagaaggatatactrcatagcaggagatgctgcatagattttatgcggtagacatacattcctgctgtagtgtcagttcttttagagattagccaaaaatataagaaggctgctatgtaattgcaaggaaaacactttttatcattagtttagtctttaggtaaatgctttaaaaataaatttcaatatctttagcccaataagataaaggtctgtatactatacccctacaaagtaaacacaactagataaaaagtaaaatacaggcgaaaccaatcttgtatttgtatgcaagatagcagttacatagcttttccagggctgaggaactgagtgttgtctctgagagttatgtttatgtccacaggccactgtggact

SEQ ID NO: 24935 - DNA, 503 bp, Homo sapiens
catagtgcctaagctcttgtcattctccaagattaaagaaacgatactcagacctgtcaaaatataatcacaaagcttatcaggaaaatcatctgaaaataagtcatgcatattgtatgatatgagaaggatatactacatagcaggagatgctgcatagattttatgcggtagacatacattcctgctgtagtgtcagttcttttagagattagccaaaaatataagaaggctgctatgtaattgcaaggaaaacactttttatcattagtttagyctttaggtaaatgctttaaaaataaatttcaatatctttagcccaataagataaaggtctgtatactatacccctacaaagtaaacacaactagataaaaagtaaaatacaggcgaaaccaatcttgtatttgtatgcaagatagcagttacatagcttttccagggctgaggaactgagtgttgtctctgagagttatgtttatgtccacaggccactgtggact

SEQ ID NO: 24936 - DNA, 503 bp, Homo sapiens
catagtgcctaagctcttgtcattctccaagattaaagaaacgatactcagacctgtcaaaatataatcacaaagcttatcaggaaaatcatctgaaaataagtcatgcatattgtatgatatgagaaggatatactacatagcaggagatgctgcatagattttatgcggtagacatacattcctgctgtagtgtcagttcttttagagattagccaaaaatataagaaggctgctatgtaattgcaaggaaaacactttttatcattagtttagtctttaggtaaatgctttaaaaataaatttcaatatctttagcccaataagataaaggtctgtatactatacccctacaaagtaaacacaactagataaaaagtaaaatacaggcgaaaccaatcttgtatttgtatgcaagatagcagttacatagcttttccagggctgaggaactgagtgttgtctctgagagttatgttyatgtccacaggccactgtggact

SEQ ID NO: 24937 - DNA, 575 bp, Homo sapiens
  misc_feature (1)...(575): n = A,T,C or G
atcagcttttgtacacaaaagctctgggcactcttttatactctttttgtcactcatttaaaagtaatcttttgtaaagaatgtcactcattctcttctaatacaaagtgaagcacagttacaatgcattttaaacaaaattaatatggactcaataaaacaccaytaagcattaatttcctctagaatgaagacaaaagttggataatatctacatgttgtaaatgtgtgcattccagcaaatataaaactataagtagaatcagaaaattaacatatatctattcacaaagtganaggaaaggaaaacagtgacaaatactgtattatgtcattctatgtttaatccattttacacacaggagaactgaggcttttgacaggtaagtanttgtctanaggtcacacagctagntagtggggtaacgtaggactgaatcgtagcttatcagacatatanaatctactctggtctcgtcacccacatgcctatcagactctcagaanntatatatgtgtcaancaggtaattgcagtgccanttggataattantagcaattgtccgtatttata

SEQ ID NO: 24938 - DNA, 1828 bp, Homo sapiens
gggaacaataatgtagtctgccgcaaacatattaaagtgtaactggatatggttgctgcagaattttgaacctttgttttaattgtgatttttactctttcccccctatctagtgcccttttgtaatacagtaattatcatgatttttgtctgaactgaaatcttctgagattagattgtctacgaaaatacagtcgatcctccttgttttcagcttttgtatttgtgaactcacctactattttttgtaacccccaaatcagtactcacagcactttcatagtcatgtgtttgcgcagagtgtcaaagaatttgagtttgaacaggatgatattctgccttctttttcagctctcatacaatagtcaggtatcctttttgtggtctatttaatgccatgcttttcctgtttttgtactgtttgttggttgttttgccatttaaattaacccccaagcatagtgctgaagtgctgcttagcattcacaagtccaagaagtctgtgatgtgtcttacagagaaaatacatgcattaaataaactccattcaggcgtgagtgctgtagtgccgttggctgtgagttcaatgttaatgaatgaacaatgtatattatttatttattcttcatttaattaattattattattattttttttgagatagagtctcactctgttgctcaggctggagtgcagtggtgcagtcttggctcactgcaacctctgcctcctgggttcaagcgattcccctgccttmgcctcccaagtagctaagactacaggcatgcgccaccatgcctggctaattttttttttttttttttgtagttttagtagagacggggtttcaccacgttggccaggctggtctcgaactccagacctcaaatgatctgcccgccttggcttcccaaagtgctgggattacaggcgttagccactgtgcctggccaacaatatatattaaataagcacacatacaacaaaagtaggtgttggtaagcttacaaaagtgtgaccagtagcttgctgaaacctaactttttatttgttcatggaactttctagaccgtaactacactgaataatgagaatctgctgtaatctttttaggtgctgtagatgagccattggattaaattattacagtatgtttcagactgctgtatgttgaaccctagtgaaatgcctctcaaaccttcataaggatcacaatctcatgtcctttttttttgttattaaatgcccagtatgtgttagcgatttaaacaaaattcaaatatttttttttttttttttttgagacagagtctcgctctgtcacctaagctggagagtgcagtggtatgatctcggctcactacaacctctgcctcccgggttcaggcgattctcctgcctcagcatcctgagtagctgggattacaggcacccgccaccacgctgggctaatttttgtatttttagtagagacggggtttcgccaggttgtccaggctggtctggaactcctgacctcatgcgatctgcctgccttggcctcctgaagtgctgggattataggcgtgagccaccatgcccggcgttgacttcttaataataaccatactgactggtgtgagatggtatgccattgtggttttgatttgcatttctctaatgatcagtgatattgagctttttctcatatgcttgttggccgcatgtgtgtcttcttttgaagtgtctgtttatgtcctgtgcccactttctaatgagatttttttttttcttgtaaatttgtttaagttccttatcagtgttggacattagatctttgtcacatgca

SEQ ID NO: 24939 - DNA, 812 bp, Homo sapiens
ggatcccactataaaccaggtcagatgacttttatattcagacctttgttcaactgtgaattatgcagattgttaacacccattcttcacattggattcatgtaaacctagtacgtgggttgctgttacttgttaaagatgagaaaatggtgatgactagaaataatagcactagttacaaacacaggccctaaagcccatagtcttaactctcagaaagaagagaggagtctaaggagagaatttagagaatttttgtacttaggtgggaaaataactacatcttcatttcattcacctctaactgaaatttagcatttctttgaagtttgaatgtaagcaaaaaaccaaagtactattaacagtaactgtatcattgatggaaatcacaggtatttttatatcacattacaattattacaaacaccacaaaataatgtcatttaaacttattgccacttcaaaattataataattactaaacttgttgccagtcttgtttgatrcattaataaagatgtccacatattactataacataaattcttttaaaaatattttggaccaggcacggtagctcatgcctgtaatcccagcactttgggggccgaggtgggtggatcactcgaggctgagattttgagaccagcctggccaacatggcaaaaccccgtctctacagaaaatataaaaatttgctgggcgtggtggcaagtgcctgtaatctcagatacttggaaggttgaggcagaagaatagcttgaacccaggagtcagaggttgcagtgagccaagaccaccccactgcactt

SEQ ID NO: 24940 - DNA, 501 bp, Homo sapiens
tcctactggaaggctttgagctgtgagcacattttgtgtttgttaaaaaatgcaggtaataggctgggcatggtgtcttatgcctgcaatcccagcagtttgggaggtgggtggatcatctgaggtcaggagattgagaccagcctggccaacatggtgaaaccccatctctactaaaaatacaaaaattagctgggtttggtggcaggtgtctgtaatcccagctactcgggaggctgaggcaggagaattggttgaacctgggaggcggaggttgcagtgagctgagatcatatcactgcactctagcctgggtgacagggtgagactctgtctcaaaaaaaaaaaaaaaaaaagtggataatagaagggtaagagctttagcacctcgctgattattccttctcgagagtaaggaacattgaacgaggagtaatattctcactgggttattgaagataacttcctctggtcctgatgtttttrtgcctccaaaaatca

SEQ ID NO: 24941 - DNA, 1059 bp, Homo sapiens
tgtggattatagatacaatccctttaatatctacctccatcactaaccacagaaactacctgagtttcaatgttaagactatttggaccattgaagatttccatgcgggaagacagctaaaagcagtgtgcatttctgagagtaaataacaatggctttgatagaaaaaaaaaaaggaagaacatttttcttctcagtgcaactctactattttccttcctccttctcataatgttcagctaggattctaatgaattttaaaaacaattaatggatcaagcaataatggaacctctcgtcatgtttatatcttttgcatttggagaacatattgggaaagttgagaacaaatgcctccctgacaaaatacagggacacagatgcagaacatattgcagacatcacccccacccccatcgagagagagagagagagagagagagagaacaggagaaaaagacaaacatgatagaaattgtatgaagttggaaggtagaaatccagagaagaaaaggtagcatatccgtggaaaaacaaaatattggtgtgagtcaaaaataaatctgagaggccatttccttaattttgctctctagctttgtgctccttggcctaagaacaggtctttccaaattcattgctatgtggatgttgttgtatcctgcctccttattactaactttgggtcttggcatgtctgttagaccagctttagacttctgacttttttatgtcagcaatgtccttcatactgtccagatctctgaatttgttcacagtttctcatggctgatattcttgtggggtgcctggtcccttctctgattctcagagtcccaaatcttatctttgttagggtgaagaggaagtcagaaagatactttgtgacttctctgtagtgctgagatgccagaaaatataatagtttccagccaagsgaggttactaggtagatacatcagaaaagacacatagtcaatctagagaagtgcagccagatgaagacttagatggatattaagagtgactgtgggcttgaatcgttttcctcttcatggg

SEQ ID NO: 24942 - DNA, 853 bp, Homo sapiens
cgagtagctgggactacaggcacatgccaccatgcccagctaatttttgtatttttagtagagatggagtttcaccatgttggccaggatggtctcgatctcttgaccttgtgatccacccacctcggcctcccaaagtgctaggattacaggtgtgagccaccgcatccggatgttatctatgttattaatcatcttagcatggcttgaaatgttgctctaaaaccaagataaaaggacccatattaccatgttccatcaagctggatgccagccaggcacttgtgagtacttcagctataggcatgacgttttcgttcttcgtcattatcccacaatgccccttctcagcgtgaagcagtcagaaagattgaggaccagattctctgtgactggagaaaggataaatggctagagagtcagttttgagctctgcagatcacacggcggtatctatcacaacaactcaactctgctgttgtagcctgaaagccgccatagatagcacataaacacaggagcctggctgtgttccaataaaactttcatgtacactgaaatttgaatttcatataattttcacgtgttaccgaatattattattcttttggggttttttctagtcatttaaaaataaccactcttctsagctttctggccataaaaaatgggcagtgagctggattgagccttcaggtgtagtctgctccctggtttaaataaactaagtctaggggtggctagtcaagccctctgggtttgaatcccacaatcccacttattagtgctggggtcctgggcaagttacctcttggagtttcactttccttatatgtaaaatgggagtaatagt

SEQ ID NO: 24943 - DNA, 515 bp, Homo sapiens
tgtaacagtattttactactttttgagggttggagtggaaataatcaccattcacttattctgaaatgacgtatggctaaaactggtcttgagattkcctatccatttgaaaacccagagaaatgcagtctgtttcatgttgaagagagcaccataagggaagaattgtatctgaagctttccaaaatatttctcattataacaactaataaaaatagatgcaaacattgtatgtataactatttatagcacctatcacattgcaattagtaatatgcttattcttcaatatcttaggagagattatcatttctttagagtgagggccatattttattcatcattatatatttagcaactgtttaataataataatgatcaaaattaattatggtttcaaagagattaagcaattggcatcacatcgtatcactagaaaataaaaatacttgttcaaatccatatcttttacattgcagaacccacgtccttaccttttatattataatatggct

SEQ ID NO: 24944 - DNA, 755 bp, Homo sapiens
gatcctgtttcaatgacatgtctttaattcagtcctagcataaataaaaataattcttatactggaatagatataaagtaaatctggatttctctataaaaatatgaaaaaaatatgaaacacattttattaaacttattaattaaaccactaaaaaacagttttggctgatggcctccatggcagcctgtgtggttctgggcctagcctcattcttcyctcaaagtgggggctgccttgcctattcctccatcccccgttacttagcaacattggtggcaccccataagtggtgacacagccacatcaatttgcacagttctggagagtgagaagtccaagatcaaggtaacggcatttgatgtctggtgaaggccttctggttgcatcgtcacatggccaaagggatgaaaactatcctcacatggcagaaggtggaagggcaaaaaaggacctaagctaggccttctagctcttttataaggcactaaaccattcatgaggggtctgcttacccaaactctgccacaactctcaatgccaccacaatgaggattaagctttaacaagaactttggaggggacacattaaaatcatagcactgggggagcagctgctgaatagaagcagctctgctctgcagctcccaccaagaagggtcaaaactgtgagtaagctctgcgtcttcaattgaggaacgaagattctctcactgggagtgactcggtggttggtgtgaatcccggagaatgca

SEQ ID NO: 24945 - DNA, 1263 bp, Homo sapiens
ggaatgattgactcatggggtatcagacatatcaagtaagctaaaagcaagattagtaaacaatgatttcatttcatgttttattcaagttaaatcaaatttatcataattgaaatagttttactgatttcagtcattgaaatgactccctgatcacagtcaaattaaaaatattctatacagtatgcacatttatgaaactcccaaaggatccaacttacacttaatttctagacttcgctccactgattataacttgtatatttccttcatcttcatgtgaaataagttaggagtggaattatttagagtttatcacaatttttaggcatacttagaacttgtcttaatctattgcatttgtttttttgtatctgacatcccacataacattgatggctctcagaattttttttttttaagtattttccatctggtgtacttaggctttgacacagacccatagaaatttcctggtgaataacaatatatatgactttagttgctccaaagatcatgattattattccagtttctccttcttgtggaataacaaggaaaattcagcaaaattattacttctaaatgtgttycataaaccattgttaaatcaccatgtctcaacagcctgtcttctttcaaagtttacacaccatttatttaaaacacacccgaaacactctcatctactactgtccaggatagttgctgaactgctaaaaaaaactttagcacaacattcatgtctccatcccagtctctgtcttttctttgtttacatcaacagaagaattgatcattttaaagtatgtttgatatacattgacttcttccccacttatgagtatttcatctatttcttttcaactatccttagattgaaataacacaaaatatttttagatagaaccagtctacttctaatatttaaaataacgtatgctataatttcatttcttctacactaagcacaccgtaggctcttctaaaaaaaaacccactggttgctaatattccacaaaattaagtgaaaattttctgactgatatggagacttatctacaaactgacctaaatttatctttctaatctgtgtcccaataatataaataatctaggaatttatttataattcccagactgtagtggccattttatagccaatgcttgcatattgtttttggctgacatgttctcctctaccaaaaaaggacttactcttgtctatgttctaatattctttaagaaaatatttaaatatga

SEQ ID NO: 24946 - DNA, 1263 bp, Homo sapiens
ggaatgattgactcatggggtatcagacatatcaagtaagctaaaagcaagattagtaaacaatgatttcatttcatgttttattcaagttaaatcaaatttatcataattgaaatagttttactgatttcagtcattgaaatgactccctgatcacagtcaaattaaaaatattctatacagtatgcacatttatgaaactcccaaaggatccaacttacacttaatttctagacttcgctccactgattataacttgtatatttccttcatcttcatgtgaaataagttaggagtggaattatttagagtttatcacaatttttaggcatacttagaacttgtcttaatctattgcatttgtttttttgtatctgacatcccacataacattgatggctctcagaattttttttttttaagtattttccatctggtgtacttaggctttgacacagacccatagaaatttcctggtgaataacaatatatatgactttagttgctccaaagatcatgattattattccagtttctccttcttgtggaataacaaggaaaattcagcaaaattattacttctaaatgtgtttcataaaccattgttaaatcaccatgtctcaacagcctgtcttctttcaaagtttacacaccatttatttaaaacacacccgaaacactctcatctactactgtccaggatagttgctgamctgctaaaaaaaactttagcacaacattcatgtctccatcccagtctctgtcttttctttgtttacatcaacagaagaattgatcattttaaagtatgtttgatatacattgacttcttccccacttatgagtatttcatctatttcttttcaactatccttagattgaaataacacaaaatatttttagatagaaccagtctacttctaatatttaaaataacgtatgctataatttcatttcttctacactaagcacaccgtaggctcttctaaaaaaaaacccactggttgctaatattccacaaaattaagtgaaaattttctgactgatatggagacttatctacaaactgacctaaatttatctttctaatctgtgtcccaataatataaataatctaggaatttatttataattcccagactgtagtggccattttatagccaatgcttgcatattgtttttggctgacatgttctcctctaccaaaaaaggacttactcttgtctatgttctaatattctttaagaaaatatttaaatatga

SEQ ID NO: 24947 - DNA, 1263 bp, Homo sapiens
ggaatgattgactcatggggtatcagacatatcaagtaagctaaaagcaagattagtaaacaatgatttcatttcatgttttattcaagttaaatcaaatttatcataattgaaatagttttactgatttcagtcattgaaatgactccctgatcacagtcaaattaaaaatattctatacagtatgcacatttatgaaactcccaaaggatccaacttacacttaatttctagacttcgctccactgattataacttgtatatttccttcatcttcatgtgaaataagttaggagtggaattatttagagtttatcacaatttttaggcatacttagaacttgtcttaatctattgcatttgtttttttgtatctgacatcccacataacattgatggctctcagaattttttttttttaagtattttccatctggtgtacttaggctttgacacagacccatagaaatttcctggtgaataacaatatatatgactttagttgctccaaagatcatgattattattccagtttctccttcttgtggaataacaaggaaaattcagcaaaattattacttctaaatgtgtttcataaaccattgttaaatcaccatgtctcaacagcctgtcttctttcaaagtttacacaccatttatttaaaacacacccgaaacactctcatctactactgtccaggatagttgctgaactgctaaaaaaaactttagcacaacattcatgtctccatcccagtctctgtcttttctttgtttacatcaacagaagaattgatcattttaaagtatgtttgatatacattgacttcttccccacttatgagtatttcatctatttcttttcaactatccttagattgaaataacacaaaatatttttagatagaaccagtctacttctaatatttaaaataacgtatgctataatttcatttcttctacactaagcacaccrtaggctcttctaaaaaaaaacccactggttgctaatattccacaaaattaagtgaaaattttctgactgatatggagacttatctacaaactgacctaaatttatctttctaatctgtgtcccaataatataaataatctaggaatttatttataattcccagactgtagtggccattttatagccaatgcttgcatattgtttttggctgacatgttctcctctaccaaaaaaggacttactcttgtctatgttctaatattctttaagaaaatatttaaatatga

SEQ ID NO: 24948 - DNA, 512 bp, Homo sapiens
agatgagacctaattgctgagaagaagcagaggcagaagctccaaatcagtgactgacaccctgaagacacactgtaaattgcagygggaaagaaagggatgagtaattagcactacacaaatttcaatatcttggcttttcttataattagcagacaagcaatttaaaaaccacagccctacacagaatcattatcattgttttccaaaagtaagataaacaaacctagcatgggatcattgatgttcacttcattcacttcccctacttttactgtaagaattagtcaaatggcgagagaaggaaaatctagaaaataaaacatgcctttcatattctgattcttatgtttaagaacctgagagagtatatctcattcaagatctttaaagcatttctaaaatacaagttctatttcgcactaccattccataaacaagatgaatttttccataaaccgtattacttatgagtttttttttttaaaggaacttctatggtaaatatcaga

SEQ ID NO: 24949 - DNA, 512 bp, Homo sapiens
agatgagacctaattgctgagaagaagcagaggcagaagctccaaatcagtgactgacaccctgaagacacactgtaaattgcagcgggaaagaaagggatgagtaattagcactacacaaatttcaatatcttggcttttcttataattagcagacaagcaatttaaaaaccacagccctacacagaatcattatcattgttttccaaaagtaagataaacaaacctagcatgggatsattgatgttcacttcattcacttcccctacttttactgtaagaattagtcaaatggcgagagaaggaaaatctagaaaataaaacatgcctttcatattctgattcttatgtttaagaacctgagagagtatatctcattcaagatctttaaagcatttctaaaatacaagttctatttcgcactaccattccataaacaagatgaatttttccataaaccgtattacttatgagtttttttttttaaaggaacttctatggtaaatatcaga

SEQ ID NO: 24950 - DNA, 512 bp, Homo sapiens
agatgagacctaattgctgagaagaagcagaggcagaagctccaaatcagtgactgacaccctgaagacacactgtaaattgcagcgggaaagaaagggatgagtaattagcactacacaaatttcaatatcttggcttttcttataattagcagacaagcaatttaaaaaccacagccctacacagaatcattatcattgttttccaaaagtaagataaacaaacctagcatgggatcrttgatgttcacttcattcacttcccctacttttactgtaagaattagtcaaatggcgagagaaggaaaatctagaaaataaaacatgcctttcatattctgattcttatgtttaagaacctgagagagtatatctcattcaagatctttaaagcatttctaaaatacaagttctatttcgcactaccattccataaacaagatgaatttttccataaaccgtattacttatgagtttttttttttaaaggaacttctatggtaaatatcaga

SEQ ID NO: 24951 - DNA, 512 bp, Homo sapiens
agatgagacctaattgctgagaagaagcagaggcagaagctccaaatcagtgactgacaccctgaagacacactgtaaattgcagcgggaaagaaagggatgagtaattagcactacacaaatttcaatatcttggcttttcttataattagcagacaagcaatttaaaaaccacagccctacacagaatcattatcattgttttccaaaagtaagataaacaaacctagcatgggatcattgatgttcacttcattcacttcccctacttttactrtaagaattagtcaaatggcgagagaaggaaaatctagaaaataaaacatgcctttcatattctgattcttatgtttaagaacctgagagagtatatctcattcaagatctttaaagcatttctaaaatacaagttctatttcgcactaccattccataaacaagatgaatttttccataaaccgtattacttatgagtttttttttttaaaggaacttctatggtaaatatcaga

SEQ ID NO: 24952 - DNA, 512 bp, Homo sapiens
agatgagacctaattgctgagaagaagcagaggcagaagctccaaatcagtgactgacaccctgaagacacactgtaaattgcagcgggaaagaaagggatgagtaattagcactacacaaatttcaatatcttggcttttcttataattagcagacaagcaatttaaaaaccacagccctacacagaatcattatcattgttttccaaaagtaagataaacaaacctagcatgggatcattgatgttcacttcattcacttcccctacttttactgtaagaattagtcaaatggcgagagaaggaaaatctagaaaataaaacatgcctttcatattctgattcttatgtttaagaacctgagagagtatatctcattcaagatctttaaagcatttctaaaatacaagttctatttcgcactaccattccataaacaaratgaatttttccataaaccgtattacttatgagtttttttttttaaaggaacttctatggtaaatatcaga

SEQ ID NO: 24953 - DNA, 506 bp, Homo sapiens
tggatctgaacaaggaccacagtgagtggtrggagcttaggggagtctcacagtggagagagtggcaataagatttaagttggcaggacatcatctctaggaggaagttaaagacatgggagcaagaggaaatcagccaggagacagtttagagtgagaagaggatcaagtattgcataagaacaagggacaagtgggaaaaccggaacgcggagaagaggctgagaggaacgaaggaggaaacagggaagaacggtgggaggaaagcaaaaaagaagatgccaggaagccaatgagcgtcagcaactccaaatgctgcaaaacccgaaataagtgaaaagtaaaattgctcattagctttgattgtgtcatcactgcagaatgaaataaggtaatttgggtgatgacttccaggtgattacactgctggtcttcctctgccctctactgcacatacaggctacgtctagcggttgccttctctgtttacttctgaagatttatgt

SEQ ID NO: 24954 - DNA, 506 bp, Homo sapiens
tggatctgaacaaggaccacagtgagtggtgggagcttaggggagtctcacagtggagagagtggcaataagatttaagttggcaggacatcatctctaggaggaagttaaagacatgggagcaagaggaaatcagccaggagacagtttagagtgagaagaggatcaagtattgcataagaacaagggacaagtgggaaaaccggaacgcggagaagaggctgagaggaacgaaggaggaaacagggaagaacggtgggaggaaagcaaaaaagaagatgccaggaagccaatgagcgtcagcaactccaaatgctgcaaaacccgaaataagtgaaaagtaaaattgctcattagctttgattgtgtcatcactgcagaatgaaataaggtaatttgggtgatgacttccaggtgattacactgctggtcttcctctgccctctactgcmcatacaggctacgtctagcggttgccttctctgtttacttctgaagatttatgt

SEQ ID NO: 24955 - DNA, 546 bp, Homo sapiens
  misc_feature (1)...(546): n = A,T,C or G
cattcattttgaggatgaacccctctgtacaggatagacatattctatcaggtatttatttcctaaatgctattgtgtgccaggcactgtggtggacaataagaatactaaagaaaataaagmagagcccctgcccccagggaagctcacagtccactagggaaacaaattctgaacaaaactgcaatagagagggataaagctgtgtcagccatgcactgggtgccctggaggcagagtgaggggggccagaagcccctgcactgcttactacccaccaagtcctataatcttccttccagtgagtaacaactcttgaaaaatatccctaaagaaccctgctactaccattgccattgacacatctctgaacttactgagttctgctctataatgacagggttagagagagacaggatggtcatgtgtttccggggtttagaatttgattagcaacaatctaaatccatggaaaagacttgcttataaccagtttatttttacatgtgcatttctttttttaaaaaaataaggtcattaagagnc

SEQ ID NO: 24956 - DNA, 546 bp, Homo sapiens
  misc_feature (1)...(546): n = A,T,C or G
cattcattttgaggatgaacccctctgtacaggatagacatattctatcaggtatttatttcctaaatgctattgtgtgccaggcactgtggtggacaataagaatactaaagaaaataaagcagagcccctgcccccagggaagctcacagtccactagggaaacaaattctgaacaaaactgcaatagagagggataaagctgtgtcagccatgcactgggtgccctggaggcagagtgaggggggccagaagcccctgcactgcttactacccaccaagtcctataatcttccttccagtgagtaacaactcttgaaaaatatccctaaagaaccctgctactaccattgccattgacacatctctgaacttactgagttctgctctataatgacagggttagagagagacaggatggtcatgtgtttcyggggtttagaatttgattagcaacaatctaaatccatggaaaagacttgcttataaccagtttatttttacatgtgcatttctttttttaaaaaaataaggtcattaagagnc

SEQ ID NO: 24957 - DNA, 2804 bp, Homo sapiens
atttccacaggaaccattcatggtctaggtctcccaggcttcagactggcagcttccacagaatgagcgaaaccctgcaggacagggccaaatctgatggcccaggtatcagtactggattaagaatacaccacttaaagatccaaaggagcaaagttgttaagatactattttattgggtggaatcaggacaagggctaccagtttctactgaacaggaaaagggcaaggaaatgatgctgagtacattgatatacaggttaaagaggatggtgttgcaaaaatgtatgatctgcgtggcctgaccaggtaagaggccaagaaacaaatgggcacagatgccctgtgagatgctgaagatgctgccgtgctgcctgcctgagtagcagagagaacgtgccaaagaggagttgccttttctagagaactgtttagtttgcaactaatacatgcttaatgggggttgatcagtctagcagatattttcttttcgtttcttttttgattaagtaaatttttaatttcagaagagttttagatttacagaaaagttacaaagatattataatacagagaacccctgtgtattccttacccattttcccctgttgttaacatcttacaattgtatatttgtcacaactgagaaaccgatattgatgcattatgcctcactttatgtgaattgcactagcgtttccttcatagccattttttcccaggatcccactactttacatttagaggcattttatgtttattttcaatctaccttaatttttaaagagaaaaatatttgctcacatttattaaaggagtactcaaataaatccccaaaatgtattaatattattttaaactgtagtacactttctccaggcagatcaagctaaattctcttgtgtatgagagtgtacttagagtgcacagaggcgcagtagccaaaccacatggttcaaatcacagtgcaccgctttctatctgggcagcctkggaaaaatacttaagtatttaatccctctgggctttaattttcacatctataaaatggaaagtgatagtacattacctcatggatgtgatatgtacattaaaattaataatacatataaatcactgagaagagtgcctgggtacatagtgagcatggaattaaccttagttgttattactgttactatcgctatttgattccagagtatcctatgtatttcttttcttgacactcatcacacttttaagtatgtctcatatttgtcttcacttccagatggcaattttcatgagttcaaagacattcctacccaactcatagtggatgttcgggaaacagtctcttaattgtccatcctgactgcagagccatcaaacaatgacatgcaatgtgaaagcttgaaggaagagaaagtgaatgaggtgaagatagacagacaagcagataaatgggatatagagacacagaaatatagtcagggaagtacaaaggtcaaatgagaacaattttttaaattgcaaaataaaaactatatttatatgtacaacatgatgttttgaaatacgtatatattgtggaatggctatatcaagctaatcaacatatgcattacctcacatacctatcatttttttgtggtgaacacacttcaaattgattctcttattaatttttaagtatgtaaaacattgttattaactatagtctttatgctgtagatctcttgagttcattctctttaaattttgtttcccagccattgatatatgacactctgtctccactcttaaactcattttctcttcgtgtgttacataaaactgaaagggaatgtatttttctgaaattaacaatttaaaagttcagcaggaggacactgccctttcaagcactggtaatgaagaatggcagaaagaattctggatggaattctcagctacagctttctggtaaaactggcattagtgatgcacaggagatgaacacgtattatattgaaatggcatcaatattccagtttcttgccaaatgccttgaatagctgattgtgcttcatgtacaaatgtacacttgggctctgtgaatcccaggcacagatgtctgtaaagccacatgtatttctgccataaagtccactttaaaatgtgctccactcttatccagacctccagtcaaggaagttgttaaatccattttttttcttttttcctgtacgttgtttttgcctttgaaatattgctaagcagttgtcccacagggtggaggtggaattagcagctgcagcatttcttgtgccaccgtcatctctttggtatgtggcttcctttcactctcatgctggggaagatcccacccatcctttgcattcctcctgagcaagttgtgtcaaggaaagtcgagagaggaagcgattcccatcctatgggtgtcatcaaataggaaggttttaattagtttctcaggatgttctcagtttctgcactgagcagcccttcccttctttggcattaaagcacttggattcttcaagaaacacacaattttgctctgttaggcactaaactctgtgtattcaaatgtaataaggagtcatgaagcctgtctttcctagcacttaccatggttgtaatcttacatttatttgtataattagttgagccatgactgtctcttcactatgctcaggattctaggaaggcagtgacatgtctaattttgcaatccattgtatctgcaggcactcaataaatggtttcaagataaaataacgaacatatgattgaaaaaacttctcctacagcaaacaaaa

SEQ ID NO: 24958 - DNA, 883 bp, Homo sapiens
cagcccgaagccagagggtaaaggagccccatgctgatcacgcaggcccgcgcccagcacagggaacagagggagacagacgggagcagaggggctgtgctgggccaaatggccggcaatgtgccgagcggtgctcagcacttgggagcactcagaaatgagccgagcaaacacagccccgcacacacgcacttgtttgtcgtcgcgggagtgcatccccttctctgcctcacaaatactgggcacctctccagatgcggcctgggttctttcctggaaagccgtttgcagcttctctctacttagaatgccatccacattcacctagcacggttctcatcacacactttgcttccttgactgttttctacccctagactaaaagttccttcaagtcaggaattgccttatttgtcgttatgtcctgggcacctaacaaaatagctttttgcttaatatttgttgaaaaagtacagaatcaaaygtattatgccaatactctgcgaactccaaccaatccatacccctactttcatattctcctcatttttatcccttctaccacagactaaggagggaacagaatagtacattttaaaaataattatatagagtgaagacttggactcctttgctccatcaagttgtagcagagatgtccaaatgccttcccacccccactggctccgtgattcagtggacatgtgaccagttctgctccatggactatggccagagctggcccatgtcacctccagccacatgagtctgacttgtctatgttctgttgtccttgccacgggcacctggggacctcatgttctagaaggtgcagctacgagcttcaggacactccgtcagcctgggccttgagtgactgcat

SEQ ID NO: 24959 - DNA, 562 bp, Homo sapiens
tggcmtgtgacgtataatcttttccacacagtgtgcatgggtttgcagctgcagctgttatttgcagagcctggcactatttatgcctctgcttcgtgttctcttcagagcccttgttctcaaacagtcacccaccactgattgccaaataccaggttgagctgtctgccactgctgtttttcctagccactcacatctttgccttgtctttgaaggcatacttcagtgtgccttggaaaaagttttgtccctaacctcgtttctgtagtgactcttcaactcatcatgcagtgtttgccagatcttcttgctatcatctgttccctacatttgtccagcccactccaatgaagtaacagcattttatttaatattatatatggaataactatgtcatcccttcagatagtacgttatactgtacaaagtgttttcaaatatattattattttagttggattcttacaaatttgtaatgttactggggagtggtaagtttatttgttgttaacttttattgcatcatagccagatgctgtggcaggtaatttctatgtaata

SEQ ID NO: 24960 - DNA, 628 bp, Homo sapiens
ctgctttagagttcattctggggctgggggcgtggaaggatagagcatgcttattatgaaaggtcagcatgcggtgattacagcttttctaaatctgggtcatgggtttataaaaggcttatgatccatcaaaagacctctctgagtccacagaatgaaaagaatgtagaaaaactattgttcagggaaatgctttgcttgttattaagatgtggtcatttcaattattaacttattttgtaatgcagtcacccaactagaattctctacttcaaagtgtatgtctttggaatgttacataatcttttcaaaatagtatgtcttcctttctgaaaaattcatttctccaatgaattaggaagctgagtcacttccttaatcaggacaggcccctcccccaggagtgctgttcggctccattttaactaccctggcaggtggcggcctggtttttagttccttgaaatctacaaatatacccttcactttggaagaggctcttagctcaaaatgcatttctttagaaagattcactgagaagaagtaggggaaaaaaaaaaamaacaccacaaagccatgtacttaaacagtctctttcaagcaccacttagtggcgtggagctgaact

SEQ ID NO: 24961 - DNA, 958 bp, Homo sapiens
atgctgcagggtgacagacggcccatcgcagggcccacagggctcatgtcccatcccctcggggtccggagctctggatggtcccagcccagctatctcccactgcagacgcccaggctcagcgccttctccacgcagctgtgggtagctggcccctctgcaggaaattcaagtgaatggcgatggcactttcggttttcatctctggaaagcgctttyggggcgggaaggtgggagggacgttgatgtgaggcgtggtcctgagttctcctgagggcaggtgagggcagtacagggcagggaatgtggggctggggcaagggctgctgccaactcttgaccagaggggacacagagcaggtggaggagggtctcacccagaccagaccccaggcaggtcaacaagcttgggggtccctgctgaggtggggacacagtggaggtgcagggagccaagaatgagaggaccttcccataggcagggacgcagccacgtgcagggggcctggcctagctggggacacagccaggagcagggagcagggggcactcactcaagggaagacatctacaggtgcaggcaggagggagcttcacctaggctgggtcaaagaacaggtgcaggggccatgaggggcctcccaggcggacacacagtgcaggttcagtgggggtctcaccccagtggggacacagtgcaggtgcaataagcctggggccctcactgagatggggacacagcatccatgcagggaggcggaaatgggggcccttgttcaggcagggacctggagggggtgcaggatctgggagaccctgactcaagaggggccaggtgcagggagcaggtattggggtccggtacccaagagcgcaggtaggaggagcggagctcggatggaggctctgaagagctgggccagtctccagcgcccagggctggccgagcgtggccagt

SEQ ID NO: 24962 - DNA, 958 bp, Homo sapiens
atgctgcagggtgacagacggcccatcgcagggcccacagggctcatgtcccatcccctcggggtccggagctctggatggtcccagcccagctatctcccactgcagacgcccaggctcagcgccttctccacgcagctgtgggtagctggcccctctgcaggaaattcaagtgaatggcgatggcactttcggttttcatctctggaaagcgctttcggggcgggaaggtgggagggacgttgatgtgaggcgtggtcctgagttctcctgagggcaggtgagggcagtacagggcagggaatgtggggctggggcaagggctgctgccaactcttgaccagaggggacacagagcaggtggaggagggtctcacccagaccrgaccccaggcaggtcaacaagcttgggggtccctgctgaggtggggacacagtggaggtgcagggagccaagaatgagaggaccttcccataggcagggacgcagccacgtgcagggggcctggcctagctggggacacagccaggagcagggagcagggggcactcactcaagggaagacatctacaggtgcaggcaggagggagcttcacctaggctgggtcaaagaacaggtgcaggggccatgaggggcctcccaggcggacacacagtgcaggttcagtgggggtctcaccccagtggggacacagtgcaggtgcaataagcctggggccctcactgagatggggacacagcatccatgcagggaggcggaaatgggggcccttgttcaggcagggacctggagggggtgcaggatctgggagaccctgactcaagaggggccaggtgcagggagcaggtattggggtccggtacccaagagcgcaggtaggaggagcggagctcggatggaggctctgaagagctgggccagtctccagcgcccagggctggccgagcgtggccagt

SEQ ID NO: 24963 - DNA, 958 bp, Homo sapiens
atgctgcagggtgacagacggcccatcgcagggcccacagggctcatgtcccatcccctcggggtccggagctctggatggtcccagcccagctatctcccactgcagacgcccaggctcagcgccttctccacgcagctgtgggtagctggcccctctgcaggaaattcaagtgaatggcgatggcactttcggttttcatctctggaaagcgctttcggggcgggaaggtgggagggacgttgatgtgaggcgtggtcctgagttctcctgagggcaggtgagggcagtacagggcagggaatgtggggctggggcaagggctgctgccaactcttgaccagaggggacacagagcaggtggaggagggtctcacccagaccagaccccaggcaggtcaacaagcttgggggtccctgctgaggtggggacacagtggaggtgcagggagccaagaatgagaggaccttcccataggcagggacgcagccacgtgcagggggcctggcctagctggggacacagccaggagcagggagcagggggcactcactcaagggaagacatctacaggtgcaggcaggagggagcttcacctaggctgggtcaaagaacaggtgcaggggccatsaggggcctcccaggcggacacacagtgcaggttcagtgggggtctcaccccagtggggacacagtgcaggtgcaataagcctggggccctcactgagatggggacacagcatccatgcagggaggcggaaatgggggcccttgttcaggcagggacctggagggggtgcaggatctgggagaccctgactcaagaggggccaggtgcagggagcaggtattggggtccggtacccaagagcgcaggtaggaggagcggagctcggatggaggctctgaagagctgggccagtctccagcgcccagggctggccgagcgtggccagt

SEQ ID NO: 24964 - DNA, 958 bp, Homo sapiens
atgctgcagggtgacagacggcccatcgcagggcccacagggctcatgtcccatcccctcggggtccggagctctggatggtcccagcccagctatctcccactgcagacgcccaggctcagcgccttctccacgcagctgtgggtagctggcccctctgcaggaaattcaagtgaatggcgatggcactttcggttttcatctctggaaagcgctttcggggcgggaaggtgggagggacgttgatgtgaggcgtggtcctgagttctcctgagggcaggtgagggcagtacagggcagggaatgtggggctggggcaagggctgctgccaactcttgaccagaggggacacagagcaggtggaggagggtctcacccagaccagaccccaggcaggtcaacaagcttgggggtccctgctgaggtggggacacagtggaggtgcagggagccaagaatgagaggaccttcccataggcagggacgcagccacgtgcagggggcctggcctagctggggacacagccaggagcagggagcagggggcactcactcaagggaagacatctacaggtgcaggcaggagggagcttcacctaggctgggtcaaagaacaggtgcaggggccatgaggggcctcccaggcggacacacagtgcaggttcagtgggggtctcaccccagtggggacacagtgcaggtgcaataagcctggggccctcactgagatgggracacagcatccatgcagggaggcggaaatgggggcccttgttcaggcagggacctggagggggtgcaggatctgggagaccctgactcaagaggggccaggtgcagggagcaggtattggggtccggtacccaagagcgcaggtaggaggagcggagctcggatggaggctctgaagagctgggccagtctccagcgcccagggctggccgagcgtggccagt

SEQ ID NO: 24965 - DNA, 958 bp, Homo sapiens
atgctgcagggtgacagacggcccatcgcagggcccacagggctcatgtcccatcccctcggggtccggagctctggatggtcccagcccagctatctcccactgcagacgcccaggctcagcgccttctccacgcagctgtgggtagctggcccctctgcaggaaattcaagtgaatggcgatggcactttcggttttcatctctggaaagcgctttcggggcgggaaggtgggagggacgttgatgtgaggcgtggtcctgagttctcctgagggcaggtgagggcagtacagggcagggaatgtggggctggggcaagggctgctgccaactcttgaccagaggggacacagagcaggtggaggagggtctcacccagaccagaccccaggcaggtcaacaagcttgggggtccctgctgaggtggggacacagtggaggtgcagggagccaagaatgagaggaccttcccataggcagggacgcagccacgtgcagggggcctggcctagctggggacacagccaggagcagggagcagggggcactcactcaagggaagacatctacaggtgcaggcaggagggagcttcacctaggctgggtcaaagaacaggtgcaggggccatgaggggcctcccaggcggacacacagtgcaggttcagtgggggtctcaccccagtggggacacagtgcaggtgcaataagcctggggccctcactgagatggggacacagcatccatgcagggaggcggaaatgggggcccttgttcaggcagggacctggagggggtgcaggatctgggagaccctgactcaagaggggccaggtgcagggagcaggtattggggtccggkacccaagagcgcaggtaggaggagcggagctcggatggaggctctgaagagctgggccagtctccagcgcccagggctggccgagcgtggccagt

SEQ ID NO: 24966 - DNA, 479 bp, Homo sapiens
gcagccccgcagtgcacactggagcatcacatgctcctcctgcaggtggctgtgactcccaagcagctgtgctgccccccagtaggcaccaggccctgggccctctccagcttttgctctgcacacaaagccacatggacaccaccgtgcgggcctcatcctctgaggctgcctcacctcctgcaggaggctcagcttctccagctcccactggtggtccagaatgagactgtcactccggggcctccagcctgccaggttctcctcgccccggacataggccacagatgtgtccaggactcgtcggcgccggcgctgcatccctgcatgrggcacgtggacattccacccctacctgatgggtggctgctcctcccacccatcctagaggtccgcccatctgtgaagctgtctcccctctggagtggagatgggcttcccctggtccttggtccaccctggggcccaaagagccatgt

SEQ ID NO: 24967 - DNA, 541 bp, Homo sapiens
tgaaggtggccacgggtgcccggtagcctcggcagccctgctgtcagggccctgacattccggctcattctcccccacccccaagaatcaggagcgtgttcagcacgcaagcacggctggtcctggtgttcggtgtgtggcyccccaaggtgctgacagcctccaagaagagccacccagcaggtcctgtgggaagctgtgtccagagcccccttccagccaccgcccacttatccagctcctccttcagtgccttgtgggcagtcagtcccatggcacaggttccgtggtcctcagggaagaaggtcaccggcggcgggggggggggggggggaacggtgtggccccaggatcacccacaggaggccccaggtgggcaccctgggcctgcccctcctcccatccgctgcaggctggccctcaagtccctcatagtggtgtcagtgtcccctgcaggaaccatggcctccacagagtcttcatctagggtgagcaggaggggactgagcgcagggagccagccaggagtgtggctgggcct

SEQ ID NO: 24968 - DNA, 541 bp, Homo sapiens
cccctgccaaatccacacccgtggcctggcactcaaggcctggctccctggtagctttccttatcaccgttaggcactctttcccctgctgccccaggagcccagttctcccgcctggagaaggagctgctccgccttaaaggcccctcctctccatcatcctagcagcccagctgccatcactctcctgcctggagttttccagacctctcgggacgttgccggcaccctgtagcccctgtggccctgcctccttcccattcccaacacccaagccagggctgccctggctgagcacccccggccctcagtacaaatcccaggccccactgcacctgcatccggctccccatcggctctatgctcactatgagcagctcccaggggctctgagcggcccccatgccccagctgtaaayccatcaagggtctcccactgcccagaaatcgctcctacaccctgcctggcactggagttcccggtgcacaaggcagtcctggcccacaactggtgttcagaagagggagaatgagccatgct

SEQ ID NO: 24969 - DNA, 615 bp, Homo sapiens
cacactccctttctccagtgggagctttgggcttcgcaggaaatctctggtctttcactatttgccaactcgcccctgaattccttctcacgatggtgtcaagagcctggacgctggccggggtggaggtctcactggggttggggtgtcccgtagccccccgcatcgaggacatctccctgctttctcctctcgtccttcccccatagcagagcggctgggcccagggctgctgcccaccagaggacggggtacagcctgtggcaggagcaccggccacctcactccctccctctgggtggggcagcaggacccatagcagagggcccttatctcctttgggtggaagtttccagaccggctctgttctttgggaaggaaatggctggaggtgccatgcctccaggtcccagttctgccaccaaggtctcagtgattgacctggctttgggcggcgagcggaccatggtcctgacggtcgcgaactcagggcccgtgggactgggtgccctgtgcctagttcacaagcctacagcctcaggctccagcacyatcctcagcatcccatcgggtctcaggcctccgtggctgtgggctccctcccgggcatgtcca

SEQ ID NO: 24970 - DNA, 998 bp, Homo sapiens
gaccttcgactccgggtgggaaccgtgacctctggtgagcactgtggcccggggtgggcagaggacgcctgttccacgctccaacaggctttgctgtgtcattgtaaggtgacccaggacatcagggagggccctgtgaatccccttccatcccccactgggtgccggcagcacaattgccacctcagtcttgcatgtggggtcatggggaactccatggttggcacagtgacaagaaccagacccgtcgagcagctaaagaccaccagaagcagagtggatggaagaacaaagcctcagagatgggaccctcctgcccctgaaccttgagaatggcccagcctcaggccagaccctaaatgacagggttaggcaggtgggcgggttggaatgtgtgtcccagaagtgacggccagggtgggcgagtggcacccttgcagcctccgacctgccccctggctcagcctccaggggcactgggtaggcggcctccccattatgcatttcccctcataggatccagaaacgggagggtacagcctggaggtgagccagcgttgccaagacctcgacactggcagcactgcccagctggtgaaaggtggtctggctgaggctgcgccggcccagacccagagagctgccagttcagagacagcagtgcaggcctggacccgagacctcatgccccagtggtttttgcctgcttcactctaccctctcctctggcctggagaacaaaagctgaaccaaagctttaccccacggcttaggagccagaggccggagccatatctgtgggcagccacgtttcctttagccagtgggrttgaaacctgaagcgagacaccctgcttcaaatgcctggatcccgtctggccctgaagacattggagttctgggatttcgcctatgtgccagcagcctctgctccccagtaagctctgagcagaagtctaggcaagcccaggaggtcaggagggaaatgcaggagcccc

SEQ ID NO: 24971 - DNA, 750 bp, Homo sapiens
tggagaatgagctcagacggattcctcatattctaatccgacaccactggagaccttgactcctccttccagagcgggaacccccttgtccagcrtcgcggataccgggccccacagtctccctgcatctgcattgaccctccacggagctcacagcagggagggtctgcgtggtccacctctaccccacgcacaggcaaacctgagaaggaacgtttaatcaccattcacagcccttgcttctttctagagaaataaaacaaacttacaccagaatatgaaaacaacgtgaaacacacaaaagttaagtgtgagcccgtgcactgtgacaggtgtcagcagcgtgagtctcgccagcgtcaggagctggaacgtcttcatcatccccgagtcctctggtcctccctgcccttccgcagcgggagggtccactcttgtgggttcccagtcctccctgaacttccccagagggagggtccactcttgtgggttcctggtcctccctgaacttccccagcaggagggtccactctcgtgggttcccggtcctccccgcccttccccagcgggagggtccactcttgtgggttatgtgattctagcttcccgctttctgtccggagcctgcagaggaatgggaccacgagctacacgtgggttggacctgcctgttttgagagagggccctgtccctggggttcatgtcccttgaacatggttgagaattttgttccttttcattgctgactt

SEQ ID NO: 24972 - DNA, 803 bp, Homo sapiens
tcatcagaaaaacggccaagctgtggctcttcatgacatggcttcaagtcagcaatgaaaaggaacaaaactctcaaccatgttcaagggatatgaaccctcagggacagggccctctctcaaaacaggcaggtccaacccacgtgtagctcgtggtcycattcctctgcaggctccggacagaaagcgggaagctagaatcacataacccacaagagtggaccctcccgctggggaagggcggggaggaccgggaacccacgagagtggaccctcctgctggggaagttcagggaggaccaggaacccacaagagtggaccctccctctggggaagttcagggaggactgggaacccacaagagtggaccctcccgctgcggaagggcagggaggaccagaggactcggggatgatgaagacgttccagctcctgacgctggcgagactcacgctgctgacacctgtcacagtgcacgggctcacacttaacttttgtgtgtttcacgttgttttcatattctggtgtaagtttgttttatttctctagaaagaagcaagggctgtgaatggtgattaaacgttccttctcaggtttgcctgtgcgtggggtagaggtggaccacgcagaccctccctgctgtgagctccgtggagggtcaatgcagatgcagggagactgtggggcccggtatccgtgacgctggacaagggggttcccgttctggaaggaggagtcaaggtctccagtggtgtcggattagaatatgaggaatccgtctgagctcattctccacaggatc

SEQ ID NO: 24973 - DNA, 803 bp, Homo sapiens
tcatcagaaaaacggccaagctgtggctcttcatgacatggcttcaagtcagcaatgaaaaggaacaaaactctcaaccatgttcaagggatatgaaccctcagggacagggccctctctcaaaacaggcaggtccaacccacgtgtagctcgtggtcccattcctctgcaggctccggacagaaagcgggaagctagaatcacakaacccacaagagtggaccctcccgctggggaagggcggggaggaccgggaacccacgagagtggaccctcctgctggggaagttcagggaggaccaggaacccacaagagtggaccctccctctggggaagttcagggaggactgggaacccacaagagtggaccctcccgctgcggaagggcagggaggaccagaggactcggggatgatgaagacgttccagctcctgacgctggcgagactcacgctgctgacacctgtcacagtgcacgggctcacacttaacttttgtgtgtttcacgttgttttcatattctggtgtaagtttgttttatttctctagaaagaagcaagggctgtgaatggtgattaaacgttccttctcaggtttgcctgtgcgtggggtagaggtggaccacgcagaccctccctgctgtgagctccgtggagggtcaatgcagatgcagggagactgtggggcccggtatccgtgacgctggacaagggggttcccgttctggaaggaggagtcaaggtctccagtggtgtcggattagaatatgaggaatccgtctgagctcattctccacaggatc

SEQ ID NO: 24974 - DNA, 803 bp, Homo sapiens
tcatcagaaaaacggccaagctgtggctcttcatgacatggcttcaagtcagcaatgaaaaggaacaaaactctcaaccatgttcaagggatatgaaccctcagggacagggccctctctcaaaacaggcaggtccaacccacgtgtagctcgtggtcccattcctctgcaggctccggacagaaagcgggaagctagaatcacataacccacaagagtggaccctcccgctggggaagggcggggaggaccgggaacccacgagagtggaccctcctgctggggaagttcagggaggaccaggaacccacaagagtggaccctccctctggggaagttcagggaggactgggaacccacaagagtggaccctcccgctgcggaagggcagggaggaccagaggactcggggatgatgaagacgttccagctcctgacgctggcgagactcacgctgctgacacctgtcacagtgcacgggctcacacttaacttttgtgtgtttcacgttgttttcatattctggtgtaagtttgttttatttctctagaaagaagcaagggctgtgaatggtgattaaacgttccttctcaggtttgcctgtgcgtggggtagaggtggaccacgcagaccctccctgctgtgagctccgtggagggtcaatgcagatgcagggagactgtggggcccggtatccgygacgctggacaagggggttcccgttctggaaggaggagtcaaggtctccagtggtgtcggattagaatatgaggaatccgtctgagctcattctccacaggatc

SEQ ID NO: 24975 - DNA, 803 bp, Homo sapiens
tcatcagaaaaacggccaagctgtggctcttcatgacatggcttcaagtcagcaatgaaaaggaacaaaactctcaaccatgttcaagggatatgaaccctcagggacagggccctctctcaaaacaggcaggtccaacccacgtgtagctcgtggtcccattcctctgcaggctccggacagaaagcgggaagctagaatcacataacccacaagagtggaccctcccgctggggaagggcggggaggaccgggaacccacgagagtggaccctcctgctggggaagttcagggaggaccaggaacccacaagagtggaccctccctctggggaagttcagggaggactgggaacccacaagagtggaccctcccgctgcggaagggcagggaggaccagaggactcggggatgatgaagacgttccagctcctgacgctggcgagactcacgctgctgacacctgtcacagtgcacgggctcacacttaacttttgtgtgtttcacgttgttttcatattctggtgtaagtttgttttatttctctagaaagaagcaagggctgtgaatggtgattaaacgttccttctcaggtttgcctgtgcgtggggtagaggtggaccacgcagaccctccctgctgtgagctccgtggagggtcaatgcagatgcagggagactgtggggcccggtatccgtgaygctggacaagggggttcccgttctggaaggaggagtcaaggtctccagtggtgtcggattagaatatgaggaatccgtctgagctcattctccacaggatc

SEQ ID NO: 24976 - DNA, 803 bp, Homo sapiens
tcatcagaaaaacggccaagctgtggctcttcatgacatggcttcaagtcagcaatgaaaaggaacaaaactctcaaccatgttcaagggatatgaaccctcagggacagggccctctctcaaaacaggcaggtccaacccacgtgtagctcgtggtcccattcctctgcaggctccggacagaaagcgggaagctagaatcacataacccacaagagtggaccctcccgctggggaagggcggggaggaccgggaacccacgagagtggaccctcctgctggggaagttcagggaggaccaggaacccacaagagtggaccctccctctggggaagttcagggaggactgggaacccacaagagtggaccctcccgctgcggaagggcagggaggaccagaggactcggggatgatgaagacgttccagctcctgacgctggcgagactcacgctgctgacacctgtcacagtgcacgggctcacacttaacttttgtgtgtttcacgttgttttcatattctggtgtaagtttgttttatttctctagaaagaagcaagggctgtgaatggtgattaaacgttccttctcaggtttgcctgtgcgtggggtagaggtggaccacgcagaccctccctgctgtgagctccgtggagggtcaatgcagatgcagggagactgtggggcccggtatccgtgacgctggacaagggggttcccgytctggaaggaggagtcaaggtctccagtggtgtcggattagaatatgaggaatccgtctgagctcattctccacaggatc

SEQ ID NO: 24977 - DNA, 1397 bp, Homo sapiens
caacctgtgttttaacaatcttccaagtgactctaatgtacactcatgtttgagaaccattaaactaggccatctcccacactctctgtctgcattttttaaatggggaaaataaaatacagaaaataactacaatccttatgtcttgaatattgtgattctctgggttttctcagatcacacaaatagtaacaaatccaagatgagaagatgtaactcctaacttatgtaaaactaaggttagaatgataaaattttagaggccaaagagactttgaaattgaatcgatgtattttatgctctcatgtacttctaaatagttattactcttaggatttcttatttgmtgtctgattcttctactgaattgaatctccatgaagcaatagactatacttttttgatcattattagttatacaatgcctttacagtaatttcaatgtagtagctgtttaataaatatctactgacctaatgattattgactatatagacataaacatacattatatagatccagaaactgataataacaccgaatttcaattacatcctctttctaatctggtaaatttttaacaaaatccatcttctctgctgatccatatacatacataaattgacaggtttagaaagagttactggaatgtggagagggatgtttacatattcagaaggatgttctgatgtgtctcaaaatagaaaatccatgacatatttgatttacctttgacgcacagaaacacctggacaaaaaagagaatattatctttccataataaaagaaaaattcagaataaaaatacgaaattttttaaatttctaaatatggacctctaatttataagtccaataacctagggaatttacaaaaatatattccctctttaagtaacaagtaaatcaattataattcatcttgacactaatatgaatgtctgtatacatttattcattatacgttaatttctcctttgggttaactgaaagctatatacaaaaaaaaataaaacctgagaccttataagagtgcctagaataatgttttgcttatatgaagacataaagataatgtttctaccaaaaagcaaagcatcagagtttagacaagaggaaaaatgtgggcaaggctgtatgggctagacgtctgtattcaaattacacctctgttatgtaccagttgtactcttgggcatatctcttccttttctgttcagtaaaatgttgaataataatagtactttccttgtaaggataatagggtttaatgcattaatacacataaagtacttagacataaatgttagctattattatagagaatagagtactaaattaggacctaaatcaggttctatatatttctctaacaatatgctcttaatattaaaagc

SEQ ID NO: 24978 - DNA, 546 bp, Homo sapiens
tggctttttgacatggctgtcactggatttaggctttctgtcctccccgggaagttgtctcggagactggtcctcatatgacctcatattgtccctcctcccagcttccatggccatcttctccctcatggcctttgctctttccgtttccaaagcgatggctttctccagcagggtcaggttccccttggtcatgtcgaacacctcttcagacctgtccgagttcacagaggtggtatcgtcgtcccgctcatgacacccatcctccttcgcacagctggcaaacactctcgaccgggggctcaactgctcctccagccgcatgaggttcagcatgtccgagtagtttctgtccggcgtccttcckgggaagtcctcttctggccggacatgctgacggatgttcatgttctgctgcggattcctctcctgcgggttggtctcactgagcttcctggccaggtcgaagcactgattcctcaaacactccagactgctcagacacacctcctcatcgctctcctccaccatcttttccatgagtcc

SEQ ID NO: 24979 - DNA, 807 bp, Homo sapiens
aaatgccaatataggagaaaaactgcacaaagccttcagaaaagaagatatcaaatgatttatatccagacatatacaaaccttgagatacatagaaaagatacaacttcttagaaaactcagaaagtcaaagaggaggtattacacgcaagtgacctcaaaatgttggaaatgatgcttgattttgttaattcagggaaagataaaaccacaatgtgataaatatcttatccatttaattagcaaaagtttcaattttctgaaaattcaagcattgaagagaatctagctcaacagagagtacttagataatgatattggctgtgcaaattaatactaactctggaaaatttttttccttgagacagagtcttgctctgtcccccaggctgagcaggtaggagtgcattggcacaatctcagctcactgcaacctctgcctcccaggttcaaagaattctcctgcctcagcctcccaagtagctgggactacaggcaagcaccaccacacccagctagttttgtatttttagtagaaacagggtttcaccatgttggccaggctggtcttgaactcctaacaacttcaagtgatctgcctkcctcggcctcccaaagtgctgggattataagtgaagcaccatccccagctgaaaactatttttacatcatctctcagctacattcacatgcctatgcttcagcacttcttcccctgactggatatcataggtaaacacttgcagtcatgcctccaaacacacgtattatatggtgtccttgttggtaaatagtcacccctggaag

SEQ ID NO: 24980 - DNA, 1004 bp, Homo sapiens
tttttcccttggggtcacccgaagtcttaccccgttctgtgtttacagtgtgaaccttattcttataaggaatattttttgtttcttattgtggattgtctgtacttccatcagatgtgactcagcttcagtttttctgattacctgtgttattttccaacatgttgcaagtgataagatcagtattatcaggtccctaatagcataacaggttcgtgtgaattagatatattaaaatgagaagatttttaagtcattttttagtcaattacgtgtatagaaacatagttatacttatctcagaaagattccaattcaaaggataggaaattagaaaaacatgtaatgtttcttctgagaacaaatatattcaaattttaatgacaaagatattaggattatttttctagtaatttgatatacctgataaattaaaataagaaatcatcaaccttcaagcaccttawaatatataatctttgatttaacttttttggacaaattaaaaaataattctctaactcaaagcaggcagaagtatctaatatttatgcttccatcattagtatttttaaagtacaagagacaaaagcatttttaatctcatgtatatcatacatcaatattttttaagtcatcagcatcactatgctaaggaaatattttatataaagaaaattattttcataaaataaagaaaccatctttctagagaaaatccacataatcctatgcccaaatataaatataacatttacagtactgactacagcatccatcttattctagtttaacatacttcagtgtgcattttatcatgtgcttacctcatcctttttataaagtatctcttatcagctcaaccatttcctaatgttatgcactaatggtaataacattgtaacaggtccgagaatgctgtggcccaaactactctgattcctgtgtggcactcacacctgccctgcatcatttctagagcatctatgaccagttaaagactg

SEQ ID NO: 24981 - DNA, 551 bp, Homo sapiens
taaaaataacttgtctgaataattagaactgtttttaaactgcttctccccagaatcattatctctctccctggttttagacactgtacacctacagaactactaaaacgcactgcttcaagtgcaaactcttaaagcagccttttcagcctttggattctcacaccaaaccaagtgaagttgaatgctaacattacataagtcaagaaaaaatgagttcaagactgagctcaaaagaagcacggcttttgtttgctctttcagaatcgctcactcaagaaagcctgggaagtaagaaaactaaaccaagacagacaagcagatgtgtcaatcatctgctttggtagttggagsaggatttgacaaattaatgtctgcagatgaaatctggcccatcacctgtttttgtggcgtctgcaagctaaaaacagcttttatatttttaagtgattgataaagatgaaaagaagaataatattctgtgacacattaaaactacatgaaacttgaattttagtatccacaagtaaagtttcattggaacatagcta

SEQ ID NO: 24982 - DNA, 1112 bp, Homo sapiens
caataaaccatttgtaatcaagaacaaaatagctcaggagaattttacgacccccttatcaaactatactggtacacagtttcattataacaacatacaaaatgtgtatagatttaattcaggattcaaataggatttttacacaacctagctaaagctctttcctatttgtgcctttgtaataaataatttatataattttttttctcactctgccacccaggctggagtgcagtggcgctatctcggctcactgcaaactctgcctcccgggttcaagcgattctcctgcttcagcctcccgagtagctgggattacaggcatgcaccaccatgcctggctgatttttgtatttttagtagagacggggtttcaccatattggccaggctggtctcraactcctgacctcatgatccacccatctcggcctcccaaagtgctgggattacaggcgtgagccaccactcctggcctagttttatttgcaagttactttttcattatttatgtattcatcatctatctatataactatattttcacattattaccttttctggtacttatttaaaggaggcttggctaagtattaatattaagaaaagactcagggttttatttggctaattatgaatgaccatttactgaggatactatcatttaaactttttcattaggtaggaggtaagattcaatgactttgaatcttaagagggatatttacatgtaattataatctttcactttttctaagctattgctagtcctttgccatctcaaggctgagtttctaaagtctcttttagtggttcctgaggtcaaatgtaagattaggattaatggtagaaattaattaggttcaagatttttaaatagttttagcaggtggtagtatacaaagaaggtaaaactggaagttgtcaggaaaaaatgtatcatttgaaaacaattttctaaactgcagccaggaagtccctggaatttactgcaagttacactatttagagaaaaaaaaaagatgaaaaaattagatttgatgtaaaatgttcaagaatagtttctactgatttattatgtgaattccaatgatccttacagcagcatataat

SEQ ID NO: 24983 - DNA, 600 bp, Homo sapiens
cagtctgatgactgcagcctctgactcctccctgcatattatattccagccatgcaggccttatttctttgcttcaagcatgccaagttcactcccacctggaggactggacattagttgctgcttcgacattgaattgatctttccctaatccttacatgtctgactccttttcatctcaactaaactgtttaccttcatagaggtattttccctagttaaaaaaaaaatggtgttggagtatttatttaattaattaattaattaaatttttttagggttgaggtctcactctgttgcctaaagtggggtaaggtggcaggatcacagctctctgagggcccagttttgtcttcattggctcactaatataaactcagcaaagaatgctgtggctggcacgcaggaaaagcccaaatatgtgatcaaagcatgagaaaatgaagagtgtggtcacttggattgcctacttcaagtcctggccataacacacacaggaaggatgtgacctgggcatgctgggtgaatggctggccccctctctgtgcctgcgggaaacagtagcccctacrtaacccagagaaaccagatttttctgaa

SEQ ID NO: 24984 - DNA, 1066 bp, Homo sapiens
tagttttgaatcacaggctctttcttcagttagatgccagatgaagcaggtggcttgttcttgagagcctgttgtaggaaaaatatgcatctctgtgccctcggaagactagtggctcattctgaaaagcagatgggaactgagacagactgagggagctgtgggttcccaccacccatcttgccctacttcaggggacacactcactcagttaaayggcggatggacatgtggctaccacccaccttaagctgctgtgagtgcgttctggctttccctggtggactgagaaaaatgcagtacccttagtatcgacatgacgtttatggacacagggagaaaaagaagaaatcagaaggcccatgtgacacctggctctgccagctttatggaaacagaccgcaagctgatctctcagggagtggtctcaagttcaggccccctgctttctcctggcttgcatcagatcatatcactattctcatattttttctaggccactgggtgaattttttatttttaccaaatgtgggctctaatgtaagctgctccagtccttgcgttttcagggtgctgcctgccaaaatagttatttattccttttggggagagctattcctgtgcatggtcagggtggtgaactcctgttgactctgaccaaaattctctttggcctccatttggaagtcgtctatgggcctttaattgtaccctctgggaagggagaaagagcacttgaaacaggcatgaattctgtacatatttctaaggctgggctgttttaaaaatgttgtctgtctgtctgtcttcttttttttttgcctttgaacttggatgtgaattttcgtgaagtacagtgtgtcaagggaagggcaatgagaaaatatgcaggggtatttacttaaaaactactcagtgaatctgtcatggtgtgttcattggtttcagtatggtaataccatattatgaaatgaaaggtgtcttactctatgttaaattggctgctttgtaaaatctcagccttgttgtgcatggtattatgcagtccatgcctgtctctgaccat

SEQ ID NO: 24985 - DNA, 1066 bp, Homo sapiens
tagttttgaatcacaggctctttcttcagttagatgccagatgaagcaggtggcttgttcttgagagcctgttgtaggaaaaatatgcatctctgtgccctcggaagactagtggctcattctgaaaagcagatgggaactgagacagactgagggagctgtgggttcccaccacccatcttgccctacttcaggggacacactcactcagttaaatggcrgatggacatgtggctaccacccaccttaagctgctgtgagtgcgttctggctttccctggtggactgagaaaaatgcagtacccttagtatcgacatgacgtttatggacacagggagaaaaagaagaaatcagaaggcccatgtgacacctggctctgccagctttatggaaacagaccgcaagctgatctctcagggagtggtctcaagttcaggccccctgctttctcctggcttgcatcagatcatatcactattctcatattttttctaggccactgggtgaattttttatttttaccaaatgtgggctctaatgtaagctgctccagtccttgcgttttcagggtgctgcctgccaaaatagttatttattccttttggggagagctattcctgtgcatggtcagggtggtgaactcctgttgactctgaccaaaattctctttggcctccatttggaagtcgtctatgggcctttaattgtaccctctgggaagggagaaagagcacttgaaacaggcatgaattctgtacatatttctaaggctgggctgttttaaaaatgttgtctgtctgtctgtcttcttttttttttgcctttgaacttggatgtgaattttcgtgaagtacagtgtgtcaagggaagggcaatgagaaaatatgcaggggtatttacttaaaaactactcagtgaatctgtcatggtgtgttcattggtttcagtatggtaataccatattatgaaatgaaaggtgtcttactctatgttaaattggctgctttgtaaaatctcagccttgttgtgcatggtattatgcagtccatgcctgtctctgaccat

SEQ ID NO: 24986 - DNA, 1066 bp, Homo sapiens
tagttttgaatcacaggctctttcttcagttagatgccagatgaagcaggtggcttgttcttgagagcctgttgtaggaaaaatatgcatctctgtgccctcggaagactagtggctcattctgaaaagcagatgggaactgagacagactgagggagctgtgggttcccaccacccatcttgccctacttcaggggacacactcactcagttaaatggcggatggacatgtggctaccacccaccttaagctgctgtgagtgcgttctggctttccctggtggactgagaaaaatgcagtacccttagtatcgacatgacgtttatggacacagggagaaaaagaagaaatcagaaggcccatgtgacacctggctctgccagctttatggaaacagaccgcaagctgatctctcagggagtggtctcaagttcaggccccctgctttctcctggcttgcatcagatcatatcactattctcatattttttctaggccactgggtgaattttttatttttaccaaatgtgggctctaatgtaagctgctccagtccttgcgttttcagggtgctgcctgccaaaatagttatttattccttttggggagagctattcctgtgcatggtcagggtggtgaactcctgttgactctgaccaaaattctctttggcctccatttggaagtcgtctatgggcctttaattgtaccctctgggaagggagaaagagcacttgaaacaggmatgaattctgtacatatttctaaggctgggctgttttaaaaatgttgtctgtctgtctgtcttcttttttttttgcctttgaacttggatgtgaattttcgtgaagtacagtgtgtcaagggaagggcaatgagaaaatatgcaggggtatttacttaaaaactactcagtgaatctgtcatggtgtgttcattggtttcagtatggtaataccatattatgaaatgaaaggtgtcttactctatgttaaattggctgctttgtaaaatctcagccttgttgtgcatggtattatgcagtccatgcctgtctctgaccat

SEQ ID NO: 24987 - DNA, 688 bp, Homo sapiens
gtctcccagtactcactttataaagacctgtgggaaacattcatctcaaacatcagtatctagaaaatctgtgattcttctgaacaacaaggctattttcctcttgtggacaccgagagtcttgtcactgaacttgtccccttttagctctgactaccagaaacaatttttaccaaataagagccctcatctagcacatacacaacttagtatacgaatctgactccaaggtttacttttatattttcccttacatcaattaacctaacattttaaaatcatcggttttttaaaattaagatacaattcaaatgctataaatttgcccttttaaaatgtgttattcagtggtttttaatatattcacaaatttcacaaattgtgaaacagtcaccaccatctaagtccagaatatttccattagcagccctccccattcaccactgcttgacaacttctagcaactctgaagttactttgtgtttctatggatttgccctttctggacattttgtatggatgatctcatagaatatggggccttttgtgtctggcttctttcacttagcgtartattttcaaaggtcatccatgtcgtaccatatatcaatatttcattcctttttatggatgaaaaatattctgttgtaaggatatatcatattttacttgtctattcatcaattaa

SEQ ID NO: 24988 - DNA, 1888 bp, Homo sapiens
caaatgacacctcttccttccggaagatgggtagggctcagcaatctgcgttttaacagtttttaacaggtgctgctgctgccacagcctatagaactcaaatcaggcaactgaaatcttggaagtaaggaggcataggcataggggctacagcaaatttgagcacacaggcctcagctaaaagtggcrggtgctatttgctattaccaggaaagcaagcacagggcgggaagagcttttgagttttcaagggaggcaagaaatcaaagtctttctcagttttaaaattctaaatgggcaaatcaaaacagagctgcagcatctgtcaaggccactgtgcatttgtacatttgtcactctttgcagaaactaagtcccatgtcagtttaggataacaggatttgtttctcaagtgagcagggtgaaaacaatcagaagagatgaaaagaaacttagagggtactctgacttcctcttaaattccttcccaggcatgagtaagtccccataagccccctaaacatcctggggaggaaggctggcctacattctgagtcatggcagcaaagacacacattttcacaataccaaaaggtcaaaacatcactatttagaaggtgctgttatttagaaagattctttatttctcccccagaagagtgagttcaaggctgggtgcagtggttcacacctgttatctcggcacttggggacgctgaggtgggaggatcccttgagcccaggagtttgagacaacccccagcaacatagtgagacctcatttctaccaaaaaattaaaaattggctgagagtggtggtgcacacctatagtctcagctactgggaaggctgaggcagaaggatggctggagcctgggaggtcgaggctgccgtaagccatgatcgcactactgctctccagcctgagtaacagagcaagaccttgtcttaaaaataaaaataaaacacaatttctttaatttaaaaacctaaaaattttactgggatattttactcaagaaattcatgcataggtgacctctagcaaccattattattaccctccctctgatctatcctgaagaaagccaaggaaaagagttgagttggtctttgcctcatctctcttgtgtccacccttgcatactctttctgctcaaatcagtccggagccacatatattagagtccatactttcaaggaacttgcagtctaactggctgaagatacgtagtaaatacaaagaaggtcataagatgaataccttagaggaagcagcagaggagtaaggaaccacattggagtgggggcatgtcaagacaatacagcaaagagtcatttgcagctgggtcttcctggagagctaagattttggcacttggggctaggatagccaaagagcactgcaagagaaagtgcagcagcagcaatgatatggaatctacaatgctcaggactggttcacaaactgctgcgcattggaatcagctggagggctttacaaaggttggctcccaggcccagacactgtgatttaattgacccagagtatgatctgggcatcaggacttttaaaagcttcccgggtgattctaatgtgcagtgaagtttgggaacccttgatctgggtgagtctgaggacagcagtgcacagttagctcggcctgtgtgaggggtcttggagccctaagttaccctaaacattgtccttccatagtgaccagtatcctttctttgagaaaaccagtcaattaggtgaattccccagaaggggctagactggccttcttcttcagtgtggccctcagatacaggcctcagcatcacctggatggagggcgtcattagtatcagggctccagaaaaaaagaattgattaatttcttg

SEQ ID NO: 24989 - DNA, 1888 bp, Homo sapiens
caaatgacacctcttccttccggaagatgggtagggctcagcaatctgcgttttaacagtttttaacaggtgctgctgctgccacagcctatagaactcaaatcaggcaactgaaatcttggaagtaaggaggcataggcataggggctacagcaaatttgagcacacaggcctcagctaaaagtggcaggtgctatttgctattaccaggaaagcaagcacagggcgggaagagcttttgagttttcaagggaggcaagaaatcaaagtctttctcagttttaaaattctaaatgggcaaatcaaaacagagctgcagcatctgtcaaggccactgtgcatttgtacatttgtcactctttgcagaaactaagtcccatgtcagtttaggataacaggatttgtttctcaagtgagcagggtgaaaacaatcagaagagatgaaaagaaacttagagggtactctgacttcctcttaaattccttcccaggcatgagtaagtccccataagccccctaaacatcctggggaggaaggctggcctacattctgagtcatggcagcaaagacacacattttcacaataccaaaaggtcaaaacatcactatttagaaggtgctgttatttagaaagattctttatttctcccccagaagagtgagttcaaggctgggtgcagtggttcacacctgttatctcggcacttggggacgctgaggtgggaggatcccttgagcccaggagtttgagacaacccccagcaacatagtgagacctcatttctaccaaaaaattaaaaattggctgagagtggtggtgcacacctatagtctcagctactgggaaggctgaggcagraggatggctggagcctgggaggtcgaggctgccgtaagccatgatcgcactactgctctccagcctgagtaacagagcaagaccttgtcttaaaaataaaaataaaacacaatttctttaatttaaaaacctaaaaattttactgggatattttactcaagaaattcatgcataggtgacctctagcaaccattattattaccctccctctgatctatcctgaagaaagccaaggaaaagagttgagttggtctttgcctcatctctcttgtgtccacccttgcatactctttctgctcaaatcagtccggagccacatatattagagtccatactttcaaggaacttgcagtctaactggctgaagatacgtagtaaatacaaagaaggtcataagatgaataccttagaggaagcagcagaggagtaaggaaccacattggagtgggggcatgtcaagacaatacagcaaagagtcatttgcagctgggtcttcctggagagctaagattttggcacttggggctaggatagccaaagagcactgcaagagaaagtgcagcagcagcaatgatatggaatctacaatgctcaggactggttcacaaactgctgcgcattggaatcagctggagggctttacaaaggttggctcccaggcccagacactgtgatttaattgacccagagtatgatctgggcatcaggacttttaaaagcttcccgggtgattctaatgtgcagtgaagtttgggaacccttgatctgggtgagtctgaggacagcagtgcacagttagctcggcctgtgtgaggggtcttggagccctaagttaccctaaacattgtccttccatagtgaccagtatcctttctttgagaaaaccagtcaattaggtgaattccccagaaggggctagactggccttcttcttcagtgtggccctcagatacaggcctcagcatcacctggatggagggcgtcattagtatcagggctccagaaaaaaagaattgattaatttcttg

SEQ ID NO: 24990 - DNA, 794 bp, Homo sapiens
agggcaagtgcctttgggcacggcaggtgcaaaaattccatgtaaggcctatggcagtgtctagcagggagtatccacaatcctcaaagcccccagagggcatgtgttacagtgctcttttagttttgccatccacaacagcttaggtgttagacaactcagtgggccctctggcttttcacgtgaggtggtggttctccaccagtgagggcagagggtcaggataacagcctttagtgtccatacctgtgacactgagctcttattgggtgtccaggaaaaaataaggtcacacaaaagaattgaagggttgtcaatgtggaagattttattgctgatgaaaatgactctcagcgggaaggggagctggagagggaaggaagaaggaaggtgatcttctcccagcatccagctgtcygcggctggactcctctccaaagcaacaccggcaagccaaccctctgaagtcaagctgcttgtctctgacgtcaaactgtagtttctgacgtctagcagcttctcctcttctctgcctctctttctttgctggtggagcctggggattttacggttacaggcttgggggtggggtgggccacgggtggttttagaaaagtcagcgttcaagcaggaaaacaagaatgcctgttctcactttgggctgcggttccagacttgagcatggcgtcctcaccagggaactgccctcttctgcccagaattttcctgcctcctgtctctatcaataacactttgttctctattgagaactaaggcttacctaataaactaac

SEQ ID NO: 24991 - DNA, 985 bp, Homo sapiens
ggccatgtaaggtgagtcacatggggcttgagaaaaaacagatgcttgggaaagaatgaacaggacacactgaaaacactgtacggtctagactaaatgcttcagtggtctcaagataaacaaagtaggccaagggtgaaatgtgtgcgctcagtcagctttccccataagagttccagctcctatcttcaggaaacagctaagacgcatttatgctaccacaggcaaacttggcatgcactttactcactttcttgcagcctgattggtatacttaattttataggatgacacattcacatcacaaggattttctcagattccagggtttgatcttaggacatatggaaaggaacactccacagacatttccttcctgcagaaagtgctaactgaggtgccttccactgctgaggaaggatgggtgttatgttgctctgccctarctatttgctttcctcagatgttacctggggtggaacagtgttgatttgcagcatgtttaccaggaatagatttgcaaatgctaaggaagaactagctggctctaggagaagcatgagctcagagctttggatgcgatatgcagatggtgtcagagaatgtaatcattcatgcagacttgacaaatcatcagtacaaatatctcatttgacagactatgaaaacaatgctccaaaactagtgcttgcgaaatcagttgtcaatactgctccctgcccaccaaattgtatgaatccaccaagactcgggtactgtcagaacaagggctttgttcagctgggctcatcaatattgttcccttcctatcaaatcatatggattcacccagcctctagtactgttcagaaaagggccttgttcagctgggttcatcaacctatgcataagatgttgccagaacattgtcttagacttcccagggagcttcctgacttggctttgtttccaatcatcctgtttctgaccctcactttgatgcttt

SEQ ID NO: 24992 - DNA, 985 bp, Homo sapiens
ggccatgtaaggtgagtcacatggggcttgagaaaaaacagatgcttgggaaagaatgaacaggacacactgaaaacactgtacggtctagactaaatgcttcagtggtctcaagataaacaaagtaggccaagggtgaaatgtgtgcgctcagtcagctttccccataagagttccagctcctatcttcaggaaacagctaagacgcatttatgctaccacaggcaaacttggcatgcactttactcactttcttgcagcctgattggtatacttaattttataggatgacacattcacatcacaaggattttctcagattccagggtttgatcttaggacatatggaaaggaacactccacagacatttccttcctgcagaaagtgctaactgaggtgccttccactgctgaggaaggatgggtgttatgttgctctgccctagctatttgctttcctcagatgttacctggggtggaacagtgttgatttgcagcatgtttaccaggaatagatttgcaaatgctaaggaagaactagctggctctaggagaagcatgagctcagagctttggatgcgatatgcagatggtgtcagagaatgtaatcattcatgcagacttgacaaatcatcagtacaaatatctcatttgacagactatgaaaacaatgctccaaaactagtgcttgcgaaatcasttgtcaatactgctccctgcccaccaaattgtatgaatccaccaagactcgggtactgtcagaacaagggctttgttcagctgggctcatcaatattgttcccttcctatcaaatcatatggattcacccagcctctagtactgttcagaaaagggccttgttcagctgggttcatcaacctatgcataagatgttgccagaacattgtcttagacttcccagggagcttcctgacttggctttgtttccaatcatcctgtttctgaccctcactttgatgcttt

SEQ ID NO: 24993 - DNA, 985 bp, Homo sapiens
ggccatgtaaggtgagtcacatggggcttgagaaaaaacagatgcttgggaaagaatgaacaggacacactgaaaacactgtacggtctagactaaatgcttcagtggtctcaagataaacaaagtaggccaagggtgaaatgtgtgcgctcagtcagctttccccataagagttccagctcctatcttcaggaaacagctaagacgcatttatgctaccacaggcaaacttggcatgcactttactcactttcttgcagcctgattggtatacttaattttataggatgacacattcacatcacaaggattttctcagattccagggtttgatcttaggacatatggaaaggaacactccacagacatttccttcctgcagaaagtgctaactgaggtgccttccactgctgaggaaggatgggtgttatgttgctctgccctagctatttgctttcctcagatgttacctggggtggaacagtgttgatttgcagcatgtttaccaggaatagatttgcaaatgctaaggaagaactagctggctctaggagaagcatgagctcagagctttggatgcgatatgcagatggtgtcagagaatgtaatcattcatgcagacttgacaaatcatcagtacaaatatctcatttgacagactatgaaaacaatgctccaaaactagtgcttgcgaaatcagytgtcaatactgctccctgcccaccaaattgtatgaatccaccaagactcgggtactgtcagaacaagggctttgttcagctgggctcatcaatattgttcccttcctatcaaatcatatggattcacccagcctctagtactgttcagaaaagggccttgttcagctgggttcatcaacctatgcataagatgttgccagaacattgtcttagacttcccagggagcttcctgacttggctttgtttccaatcatcctgtttctgaccctcactttgatgcttt

SEQ ID NO: 24994 - DNA, 650 bp, Homo sapiens
ctgctgttattaaaaatgtatacaaagggccacatgtcatttgctttacctgctggggcccatgagcatctgagtttgtggcccctcacctttagcgtctcctcagctggtagtagagggtgctacttgagagcaggaaggaaacacaaacaggaagtctagcccctgcttcgggaaactccaaaacaggacctgccaatgccacactgagtctatcagatactaggtatgacctaaggcagtggccatcctctctgtgcctcagttacctaatacatgggatcaggataattatggcacctaccacatgagtgaggctgakatgattaaatcaggaaacaatggcaataaaaatagtaaaagcaggataggaggactgagagcttaccatgcctgcaacatgtccagcactgttccaagtgcctcagagggatgactcacctgctcctcacagctaccctatagtcgtgagtaatattattacccccatgctacagacgaggaagctgaggctcagaggagtcatgcaacttgttcaaagtcacccagttcaaaattaagggagcagggatatgaacctacacaatctgtttccacagcaaatactcctaactaccaccttatcctgcttgcttgtgcacaaaaggaaa

SEQ ID NO: 24995 - DNA, 611 bp, Homo sapiens
caccctggtgtgtaacctgagcatggggagggtttcaagctccctggtgactccaatgtgtagccagcattgatcatcacagctctagaaaaaagctctactgagatgaaaatctttgggaatcaaagcgatgtctgcctacacagaagcctcccatcttgggtccacagactgaggctgatgaggatgctgctcccaagcctgccttccctagccctgcccagcctgcttgacaagtccaatccctgctccccattgtccagcctctaagtgctctccagattcagactgttgaggtgagaagggggtggttctcttatcagctctgcaatcttgcccagaggtgtggccctgagctgggagactggaaacctgagtacttaccctagctctgctgagtggtcttgggcaaggtaatttctgtctctcagtgacagcttcaatgaactgttgccctgggggaaaaaagctggtgtttccaaattgtstgatttttcagaaaaagctggaaatctacggtttaatgagaaatcacttctgcttctttttttttttttttgagatggagtctcactctgtcgcccagactggtgtgcaatggtgcaatctcg

SEQ ID NO: 24996 - DNA, 595 bp, Homo sapiens
ttctgttcctcagtttttcaaaatatcaaacatactgttttaaaaataacagtgatatatgtcattgtgtacttgagtgtcatgctccrttataccattttatttacttttttattgtgttaaaaacctacatagcattaaatttactgttttatgtacacagttcagtagcgttaaatgtattcacattgttgtgcaacagatctttggaactttttattttgcaaagttgaaactctacgcccatcaatcaataattccttctccctgcctcagccctcagcaatcatctttctactttctatgattctgactattttagatatttcatgtctaaatggaatcatgcagtacttttttgtccttttgtgattggcttattttgcttagcataatgtcctcgacgttcatccatattacaacacatgtaagaggatgtccttcctgttttaaagctgcataatattccactgtatgtctctactgcattttgcttatctattcatctgtcgatggacatctgggttgctttcacgtatcagctattgtgaataaaactacaaagaacataggtgtgtgaatatgtctttgagat

SEQ ID NO: 24997 - DNA, 595 bp, Homo sapiens
ttctgttcctcagtttttcaaaatatcaaacatactgttttaaaaataacagtgatatatgtcattgtgtacttgagtgtcatgctccattataccattttatttacttttttattgtgttaaaaacctacatagcattaaatttactgttttatgtacacagttcagtagcgttaaatgtattcacattgttgtgcaacagatctttggaactttttattttgcaaagttgaaactctacgcccatcwatcaataattccttctccctgcctcagccctcagcaatcatctttctactttctatgattctgactattttagatatttcatgtctaaatggaatcatgcagtacttttttgtccttttgtgattggcttattttgcttagcataatgtcctcgacgttcatccatattacaacacatgtaagaggatgtccttcctgttttaaagctgcataatattccactgtatgtctctactgcattttgcttatctattcatctgtcgatggacatctgggttgctttcacgtatcagctattgtgaataaaactacaaagaacataggtgtgtgaatatgtctttgagat

SEQ ID NO: 24998 - DNA, 578 bp, Homo sapiens
ccacattatttaacagtgccatcccctacaaggaaaaccattagcaactgcgctcatgaagtcttcacttaccagagctatcaatatattaacyatatgtttattatgtagatcaggaaccattaaaatgctcaatgttatttttcaactatctagagaatacattttaaaacatacagcatcataaatgtgaaaaatataactatctcgatttacttttctatgttttatatagtaatatttgttcattttaaagcatcttaaacattattttaatgattaaaaatacatgttatattctataatatgtatataccataatttttaactaatatcctattactaggcatttaggttgtttccaggttttgttaccataaattatcttatagtgaaagaaggtacagataagtgtacattttcatttcttctctcatttttttctcttctgatataatagaaatctcagaataaaatgtccaggacttgtatatgatagaattaaaatataggtgactttctctttccatgtttaactgcatttatccctataaacaggaaaaatattattcatccat

SEQ ID NO: 24999 - DNA, 544 bp, Homo sapiens
acttcccttgcttggcctttccttacaccgggccctcttaattcatttatgtcactgtcaggcttctggaagcatttgaatttgagtgttatgtcttcttgtttcagatgtcaagtatattcattgtcacaaacacaaaatccttgagagggaaaataagtcaacttgcttattcagcatttaccaggctccaggcacctaatatgttggatatattcaattcccacatcgcccttcacaaaggaggcattattacttccattcyatacccgaggaaacaggctcagagaggggaagtcatatcttcaaggtcacacacctaggaagtggtggaacaaggatttatatccaattccgactcccaaacccctgttgattcctctaagccaagtggtttccctggaaggcaggcaacctggattttcccaatggaagagctttgacccaaaatcagggtgccccctgccagccagtgctttctgtggcttggttgctcatcaccatcttctggaaaccatcacctgggcttcaccctccacccagg

SEQ ID NO: 25000 - DNA, 1022 bp, Homo sapiens
gtacatggatcttttcaggtgggtacttcccggttagctttgccaaactggttggartggtctcaatctctagaagagtggttctcacattctagcgagtatcaaaaccacctggaggacttgttccaacaaaatctctgagtcccattcccagatcttctaattcacttggtccaacgagggcacaagagtctacatttctaacgagttcccaggtgatactgatgctgttggtccaggggccacactttgagagtcacttctctagaaaaaaagatctaacaatgaattgatacccagccaaggagagacaagcctccaaagatgacagagctgctgggcctcggggcctgctccaggggtctgggccatgtgcgtggtctggactccatggaaggtttcaccagctgtggtgttgagctgtaatcattgtttttcttccagaagtgtgctcagtagactgtggcactcacggcgtctgcatcgggggagcctgccgctgtgaagagggctggacaggcgcagcgtgtgaccagcgcgtgtgccacccccgctgcattgagcacgggacctgtaaagatggcaaatgtgaatgccgagagggctggaatggtgaacactgcaccattggtaggcaaacggcaggcaccgaaacaggcacatattgctttattttcataaattgtagatctatagtgatggtcgcgcatggcaactggctgttccttcagggacacaagtgctctcccacatttcctgctgcccctccaaatctcccaggggatagggaaggagaaaaatgaggtccctaattgggaagggcttttccttctttccaggattccgagttgaaaggaaagggaccagagcagataagaaaacccctccaaacttgcaatctcagggagggagaaatgcacatgcatgggaaactgtcggtgtctgggggttgcaagcacctcaaatcactgtggtctgcaactctcccctttttaaatcctctctcagctggctggatcact

SEQ ID NO: 25001 - DNA, 1022 bp, Homo sapiens
gtacatggatcttttcaggtgggtacttcccggttagctttgccaaactggttggagtggtctcaatctctagaagagtggttctcacattctagcgagtatcaaaaccacctggaggacttgttccaacaaaatctctgagtcccattcccagatcttctaattcacttggtccaacsagggcacaagagtctacatttctaacgagttcccaggtgatactgatgctgttggtccaggggccacactttgagagtcacttctctagaaaaaaagatctaacaatgaattgatacccagccaaggagagacaagcctccaaagatgacagagctgctgggcctcggggcctgctccaggggtctgggccatgtgcgtggtctggactccatggaaggtttcaccagctgtggtgttgagctgtaatcattgtttttcttccagaagtgtgctcagtagactgtggcactcacggcgtctgcatcgggggagcctgccgctgtgaagagggctggacaggcgcagcgtgtgaccagcgcgtgtgccacccccgctgcattgagcacgggacctgtaaagatggcaaatgtgaatgccgagagggctggaatggtgaacactgcaccattggtaggcaaacggcaggcaccgaaacaggcacatattgctttattttcataaattgtagatctatagtgatggtcgcgcatggcaactggctgttccttcagggacacaagtgctctcccacatttcctgctgcccctccaaatctcccaggggatagggaaggagaaaaatgaggtccctaattgggaagggcttttccttctttccaggattccgagttgaaaggaaagggaccagagcagataagaaaacccctccaaacttgcaatctcagggagggagaaatgcacatgcatgggaaactgtcggtgtctgggggttgcaagcacctcaaatcactgtggtctgcaactctcccctttttaaatcctctctcagctggctggatcact

SEQ ID NO: 25002 - DNA, 1022 bp, Homo sapiens
gtacatggatcttttcaggtgggtacttcccggttagctttgccaaactggttggagtggtctcaatctctagaagagtggttctcacattctagcgagtatcaaaaccacctggaggacttgttccaacaaaatctctgagtcccattcccagatcttctaattcacttggtccaacgagggcacaagagtctacatttctaacragttcccaggtgatactgatgctgttggtccaggggccacactttgagagtcacttctctagaaaaaaagatctaacaatgaattgatacccagccaaggagagacaagcctccaaagatgacagagctgctgggcctcggggcctgctccaggggtctgggccatgtgcgtggtctggactccatggaaggtttcaccagctgtggtgttgagctgtaatcattgtttttcttccagaagtgtgctcagtagactgtggcactcacggcgtctgcatcgggggagcctgccgctgtgaagagggctggacaggcgcagcgtgtgaccagcgcgtgtgccacccccgctgcattgagcacgggacctgtaaagatggcaaatgtgaatgccgagagggctggaatggtgaacactgcaccattggtaggcaaacggcaggcaccgaaacaggcacatattgctttattttcataaattgtagatctatagtgatggtcgcgcatggcaactggctgttccttcagggacacaagtgctctcccacatttcctgctgcccctccaaatctcccaggggatagggaaggagaaaaatgaggtccctaattgggaagggcttttccttctttccaggattccgagttgaaaggaaagggaccagagcagataagaaaacccctccaaacttgcaatctcagggagggagaaatgcacatgcatgggaaactgtcggtgtctgggggttgcaagcacctcaaatcactgtggtctgcaactctcccctttttaaatcctctctcagctggctggatcact

SEQ ID NO: 25003 - DNA, 1022 bp, Homo sapiens
gtacatggatcttttcaggtgggtacttcccggttagctttgccaaactggttggagtggtctcaatctctagaagagtggttctcacattctagcgagtatcaaaaccacctggaggacttgttccaacaaaatctctgagtcccattcccagatcttctaattcacttggtccaacgagggcacaagagtctacatttctaacgagttcccaggtgatactgatgctgttggtccaggggccacactttgagagtcacttctctagaaaaaaagatctaacaatgaattgatacccagccaaggagagacaagcctccaaagatgacagagctgctgggcctcggggcctgctccrggggtctgggccatgtgcgtggtctggactccatggaaggtttcaccagctgtggtgttgagctgtaatcattgtttttcttccagaagtgtgctcagtagactgtggcactcacggcgtctgcatcgggggagcctgccgctgtgaagagggctggacaggcgcagcgtgtgaccagcgcgtgtgccacccccgctgcattgagcacgggacctgtaaagatggcaaatgtgaatgccgagagggctggaatggtgaacactgcaccattggtaggcaaacggcaggcaccgaaacaggcacatattgctttattttcataaattgtagatctatagtgatggtcgcgcatggcaactggctgttccttcagggacacaagtgctctcccacatttcctgctgcccctccaaatctcccaggggatagggaaggagaaaaatgaggtccctaattgggaagggcttttccttctttccaggattccgagttgaaaggaaagggaccagagcagataagaaaacccctccaaacttgcaatctcagggagggagaaatgcacatgcatgggaaactgtcggtgtctgggggttgcaagcacctcaaatcactgtggtctgcaactctcccctttttaaatcctctctcagctggctggatcact

SEQ ID NO: 25004 - DNA, 879 bp, Homo sapiens
atgtcttctatattcacttacacgtatgccagttgacagtattttaacrttcaactttccctactgttagctatgtcagtaaataggtactttccctccatttagaggcctgttttggacccgtttattggctatgatgaggactctatggattcagagacatcatccatggcctcatttagaacagacagaacaccagctactcctgatgatgacttggatgaagtaagcttttctacttctctagcctagggtgatattgtcaccaaatctttgatttaagggggaagaaaaaggatttcacttttcatctcctttatataaacagcacaaagtgatctcataatagtaaacaattttgaggctgcactttattatctcttgaaaaatagcttcacttatagcaggtaaaccttttagaaatttctctccagttcaactctctaatttgaagacttctttcaaaataaaagttactttccaatattctttatctagggaaggtaggaacccaagaggccttagcaggcttttggatgtggtctgacactgttgagtgaagtgtgttctgtggaccatcctcatcagaatgatctagagggctcagttacaatgaaaagtcctggactctaccatgcaactcctgactcaggatcttaggagtgaaacaccccagtctgcattgtttcccaaaattccctgctgattatgttatgtcctgaagtttaagatgtaatgcaataaaacagattttatgatttatctgggggaaaaaacaagttgctggagatgaacatactgaaaagaaataagaaaattctagggtatcatttcctcaaatttaggtccaaaatctggatatgactttttcttatttgg

SEQ ID NO: 25005 - DNA, 879 bp, Homo sapiens
atgtcttctatattcacttacacgtatgccagttgacagtattttaacgttcaactttccctactgttagctrtgtcagtaaataggtactttccctccatttagaggcctgttttggacccgtttattggctatgatgaggactctatggattcagagacatcatccatggcctcatttagaacagacagaacaccagctactcctgatgatgacttggatgaagtaagcttttctacttctctagcctagggtgatattgtcaccaaatctttgatttaagggggaagaaaaaggatttcacttttcatctcctttatataaacagcacaaagtgatctcataatagtaaacaattttgaggctgcactttattatctcttgaaaaatagcttcacttatagcaggtaaaccttttagaaatttctctccagttcaactctctaatttgaagacttctttcaaaataaaagttactttccaatattctttatctagggaaggtaggaacccaagaggccttagcaggcttttggatgtggtctgacactgttgagtgaagtgtgttctgtggaccatcctcatcagaatgatctagagggctcagttacaatgaaaagtcctggactctaccatgcaactcctgactcaggatcttaggagtgaaacaccccagtctgcattgtttcccaaaattccctgctgattatgttatgtcctgaagtttaagatgtaatgcaataaaacagattttatgatttatctgggggaaaaaacaagttgctggagatgaacatactgaaaagaaataagaaaattctagggtatcatttcctcaaatttaggtccaaaatctggatatgactttttcttatttgg

SEQ ID NO: 25006 - DNA, 879 bp, Homo sapiens
atgtcttctatattcacttacacgtatgccagttgacagtattttaacgttcaactttccctactgttagctatgtcagtaaataggtactttccctccatttagaggcctgttttggacccgtttattggctatgatgaggactctatggattcagagacatcatccatggcctcatttagaacagacagaacaccagctactcctgatgatgacttggatgaagtaagcttttctacttctctagcctagggtgatattgtcaccaaatctttgatttaagggggaagaaaaaggatttcacttttcatctcctttatataaacagcacaaagtgatctcataatagtaaacaattttgaggctgcactttattatctcttgaaaaatagcttcacttatagcaggtaaaccttttagaaatttctctccagttcaactctctaatttgaagacttctttcaaaataaaagttactttccaatattctttatctagggaaggtaggaacccaagaggccttagcaggcttttggatgtggtctgacactgttgagtgaagtgtgttctgtggaccatcctcatcagaatgatctagagggctcagttacaatgaaaagtcctggacyctaccatgcaactcctgactcaggatcttaggagtgaaacaccccagtctgcattgtttcccaaaattccctgctgattatgttatgtcctgaagtttaagatgtaatgcaataaaacagattttatgatttatctgggggaaaaaacaagttgctggagatgaacatactgaaaagaaataagaaaattctagggtatcatttcctcaaatttaggtccaaaatctggatatgactttttcttatttgg

SEQ ID NO: 25007 - DNA, 879 bp, Homo sapiens
atgtcttctatattcacttacacgtatgccagttgacagtattttaacgttcaactttccctactgttagctatgtcagtaaataggtactttccctccatttagaggcctgttttggacccgtttattggctatgatgaggactctatggattcagagacatcatccatggcctcatttagaacagacagaacaccagctactcctgatgatgacttggatgaagtaagcttttctacttctctagcctagggtgatattgtcaccaaatctttgatttaagggggaagaaaaaggatttcacttttcatctcctttatataaacagcacaaagtgatctcataatagtaaacaattttgaggctgcactttattatctcttgaaaaatagcttcacttatagcaggtaaaccttttagaaatttctctccagttcaactctctaatttgaagacttctttcaaaataaaagttactttccaatattctttatctagggaaggtaggaacccaagaggccttagcaggcttttggatgtggtctgacactgttgagtgaagtgtgttctgtggaccatcctcatcagaatgatctagagggctcagttacaatgaaaagtcctggactctaccatgcaactcctgactcaggatcttaggagtgaaacaccccagtctgcattgtttcccaaaattccctgctgattatgttatgtcctgaagtttragatgtaatgcaataaaacagattttatgatttatctgggggaaaaaacaagttgctggagatgaacatactgaaaagaaataagaaaattctagggtatcatttcctcaaatttaggtccaaaatctggatatgactttttcttatttgg

SEQ ID NO: 25008 - DNA, 659 bp, Homo sapiens
ttgccatgtgcatatatttctggctcaatattgagtcccctgaattgtttatggctgtcgtatttgcacataaaatttggagagaggcaggcatcagataccccagagctgatgccagtagggagaggtggatgggcaccagagatggagagggaaggggcacagattaaaatgaaaatttaggctgggagcggtggctcacgcttgtaatcccagcactttgggaggccgaagcaggtggatcgcctgaggtcaggmgtttgagaccagcctggccaacatggtgaaaccccatctctactaaaaatacaaaaattagctgggtgtggtggcccatgcttataatcccagctactccagaggctgaggcaggataattgcttgagcccaggaggtggagtttgcagtgagccgagatcgtgccactgcactacagcctgagcgacaaagcaacactccatctcaaaaaaataaaaactaaaataaaataagataaaataaaataaaataaaataaaaatttaggccaggtgcggtggctcaccctgtaatcccagcactatgggaggctgaggtgggtggatcacttgagctcagcagttcaagaccaacctgggcaacatgatgaaaccccatctctacaaacaatacaaaaattag

SEQ ID NO: 25009 - DNA, 1152 bp, Homo sapiens
ctgctggcctcaactcttctccctggggagtgtttcttccccagcaccagctgggaagctggkaggggtggggtgcatttgtgtgaagtgaagctcagttgcatgaaaaaggtatggtgcggcaaaagaaataaaccatttgacaataaaacatagtaggcgcaagggaggcttcttcctgcctgcagaggggaaggttctgcatctcaatcgcaaacgcacaggatgttccaagcctaagggaacaagtgcaaacagactcatgcccacaacaaaacctggcggaccctgcaaatcaactactgtggcaggtaaagctctgccctagggcggctgcagagcctcccaggggccagctgatcacttcctttgttcagcttgcaaagatggagtagccacccattcccccactacacacacacacacacacacacacacacacaccatccaattcactatagacaaagcacaaccgcactgcttcgtgctaaactaaaaaacgttagtttttatttattctatttttgtaaatgaccatcccagcctgccatatgtgcctactatttgggggcatcattacagcgcatcaccacggaatcccagccttgctgggcgccggtgaagacgcggcttctgtacctgataatggcacgtcccctctccaccccgccctaggcacaccctagcgcatctgacacccgccagtcgcggtgtctccgtcttgcacacaatgggttgaacactgcatgcatacagcgtgcgcccgcgacagtaaactaaaatctgctctaaaaactcggccttttctttgatgtgagggagaaaagaaatgaaaaatgtaaagtgcatcgaaggcacacacacacacacacacacacacacacacacacacacacacacataaagttgatcattcccactgcagccacgttagctgtccagtcccataaacgatacattgaaacatgagtcggactgaacgcaggcaagaaggggacacggcgaggacaggtggtccagacaccctgccaccctcgcggcgcaggggtcagagccgtggggctggagctgggagaggggcgcggtcgggctgccaagtacccctggggaaaggtgtcatctctccaaacccagcacggccaaaaggatcct

SEQ ID NO: 25010 - DNA, 543 bp, Homo sapiens
aactcaaggacaaggacagtatcttttcaagagtttcattccttcttcagttcccagtctagggctacacacaatggcaagcattttgctcacaatagagggcttaaattcacagtccttaggagttggaaggaactttacaacttttattctttcaacaaatcttgcatacatatgtttgctagatgctcttgctaggcatagagattagtgaaaacaacattttacagaggagggtgggaaacccagaaaaggacagcctgatgacagcgaggagaataccacctctctgcacccagatagttcctaagtcctcacagagccagatggtgtgtgcctgaagatccccagagaggaggtattgggaaatcacagctgcctcaccaagtcaaaccagtcaggccccatcaagagccacaggaagccagtttcygggtggcagagagagcctgagtcagctctcacctgcatggatcacatcagggtgagcaggggctgtcaagggatggaaggagtggccctgagagtgctaaaagaaggtaa

SEQ ID NO: 25011 - DNA, 2048 bp, Homo sapiens
tgtggggctctggtttgccaaagagctcaactttgggattcaggcacatctgaaataataggatgacctccgtatttctcacctgtcactgcccttgaggggaggaaccgtgtgtattttatttgtcacattaagtgcctaacacaatcccaggcggagtggcactcagtcactaaattgtccctgaagcttcatctctctcagggatctcacaggaaggatgggaggctgtttcaagaaggcattcctgggttcacaagccacatgctctctgatagtcccatcagtcccatgagtaaccaagcccagtaggtgagacagctttgccccatcacccactgctgtcccgggtcacccagagccctcttcctgggcctctgccccctcactggctgcaggagcccaggctctcaatttgatgcactctgaccactttctcaggtcaaaaatatgttcattgcttaaaattcaccaatagactggatctgttcccccaacctcctccaccaccccccacctctgcttctttttctgtgggtcacgctgcgttcacaaagacctttggagactgggagcctgttgtacatgaagggtggagtgtcagttgtacgtgggagatgttaggggcaagggtacattgccaggaggtggtgtttatccagacttctctctgccaaggggcttcccactttgtctatgattaggactggtgcaggaaaaaagacacttcttgttcagaaggtcccctgagaatttccccagagggaaggctgctgtcccaggaagcttctcaggaaagggactccagactttgcattcttggccccgcctgacatgcaggcttcgccctgtttcggggctgatgagaaagcacggccccaggcactggggcttcatattaaattcttaatagccatggtgggtttgatcccacactcccgagagaattagtcactacaggttcaagtgaggaatttatggacaggcctcaacaatctgcttctaatttggggatggaaactttgatttaagaatcccaaaaggcaatatagtatgcacagaggaaggagcgcaaggtggggaggccttgattccggtcattgaacayactttattcatttctgtgtctggcactgtcctagtcgaggccccttcctgtgagtcgaaagctatgttaccttgggcaagttcctccccatttctaggcttcagcttcctgactggcagaaggatggaatgcagctcccttctggcttttgttgggggtggagcggtggggggctttgatgccatgagtctgggtctatgaaggacaaatggcatctccagctgtggctgctcccagggagggctcccctatggaaagttggctttggtggcacagcagttcctggaagcccgtgcatgcctgagatgcattcattaccccctgtctggaaaccctgcctgccctcctgctgctggggaggcatggaaggggttaaagttgctgtgcaaggaaggaatagactcactccttcccctcccttgtcaggtcttctcccccttttgttctcagggatttgctcagcttgctggggttaggtaagcctccactctgggctgggagccgccactctgctgtgtggagagaacagaactgcagcaacttgccctggctcttcccccaggcaagaaatctgaagctaccacaaggggtggggaaatcttggaacctgagacagtggccaagctggagctagaagtgtctttaggtatcactgagcccaactaactccttttgcaggtggggaaactgaggcccagaaaagagacatttgttgggttcgcagctagttaggtggattcaaatgcaggttttctcaatttctgggcctgctctcttcacagggtataaagctctaacacaacaatggaggtaaagtgtggaaccagtggtctcttgggggtccctcaggctactttgtcacatggctccatggctcctggacaatacatgagttgaccagttgtcagtcatctcaggatgtggtgtcagggaaacacca

SEQ ID NO: 25012 - DNA, 544 bp, Homo sapiens
taattttataacagtgtgaaaaatacaaagtacatgcaacatttgcccagtcccatacatataccatttagcatttgtaatctactatamtggctgaaaatgtatctggtcattgttcccaacttccctgagaagtaggatttcttcatcatttttcacaaacttgcacaaaatgagtttatgctcaactgggattaaaatatattcttaatttttagtcccatttaccccacagatctatactgtagctcagaaaattaaaatttaaatattattatagtattcagataattgctaaaattgtgatccaaagtactatagtcaggaaaataaataagggcatcaaatttcaagtggaaaagaacaccaatggagatgacaaaaaatatttacaacccattcctcttactttccagcacagcattttctgaatttgattagcagccatgagtcacgacaggaaaagaacaaaagcaataaaataatgggaaactgggagaatggtatctaagacttcagtgggtaaattcccactaacttcatt

SEQ ID NO: 25013 - DNA, 1696 bp, Homo sapiens
aaggccagagatcccctcggcaaactgctagtgtaaatccaagagtcctaaagccaaagaacttggagtctgatgttcaaggtcaggaagcatccagcactggagaaaaatgaaggcaagtcaggttctcccaccttcttccgcctgctttattctagccaagttggcagttgattagatggtgcycacccacattgagggtgggtctgcctttcccagtccattgagtcaaatgttaatcgcctttggccaatacactcacagacacccagaaagaatactttgcatccttcaatccaatcaatttgacaatattaaccatctgatggtgtaagtggatctatgggcccctgcctaagtcacatattgagccctgcaggtgacaagaccccagagttttcccacagcacagtgtggtgaggaatacggtagtcatggcccagtgtggctgaggggcctagtgagtgtttcccttccctcaaaaacagaattggcccagcaaagagactcaccagactagaaaagacagggacttgtgttgacagatgggatcatgcagatcttaaggtcagctaggatgatggccatcttaaaagataccgttgtcctaagacctctggcccggatgcattctacatgaacctcattaactaagcctctgcccacacctacctcctcttgaatgttatctcaagcagaaaacttagttgcctgaggccaagtgtctgccactgggaggacaataacaacaaataaaaatgaagatagagaaaaataaagtaatatttcttgtgtacttcagtttgcaaactggaacccatatgctaattgtagaaaaatgactttataaatcctggactcattgaatcctttctctgtatgctgttgatgctgcattcaaagaagtacaatcccaacagctaaaaatgataaaacatgaaattctgagctttcatgtgcattacttggaaattgtttaaaaggatcccatttgtaaccccgagaatactcttcctatgctctcttctctcttccacaattctctcacaccctgtattgctttagagcctctcattcacaactctacctccccaaacctttttctcctacagttcacactatattttgcttcctaaattcatgaatctggctgggcacgctgtcctgtattcctaatactttgggaagttgaggcaagaggatcccttgaggccgggagttctagactagcctggccaacatagcaagaccccaccactacaaaaaaaattagccaggcatgatgaggcaccactacagtcctagccacttggaaggctgaggtgagaggatcatttgagcacaggagttcaaagctgcagtgagctaagaaggtgccactgcatgggtgatagagcaagaccccatctcttataaacaaacaaacaaacaattttttttatcccctagttctttaatagatcatttatgttttcttttctcctgtcctttccccttttttcctattctttcttcctccttcccgaggtatggaaggattgtgaatctactcagtcaatcttaaaaggggcaatggggagagggaaaacaaggaaccctcacaggctaatttttaaaccacatctcttaagaaaatatggagaagcaaagagaggaaaatgtaaattacctgaaattctaccactgtaaatatgtt

SEQ ID NO: 25014 - DNA, 878 bp, Homo sapiens
atccttatcctcttaaactaaaatgaaatatatgagcttggacataaaatttacttgtgctacattattcattctgagaaagcaaatcagatgaacaatttaacataatctaattctgaaccataaagatatggattagtcagtgatgagcaggtctacttctcatgatgtcattccaaagtcattattaaattttacacatgttattctttcttcaaatcaatcacaaaacaagtcatcccgagactgaggtcaaattccattctaactaaaagatctccaaatctgaagtaatggtctacttactaagtaatactcaaagaccaaattccagaaaaaccctcctcctgtacctccccccaacttaaaaaaaaaaaaaatcagtcttctccttttagctcactgtaatggaatgtgacctgtacttaagggcttttccattcctttttttctgcttacagaatatgaagcagacctattctctctcacaagggcaatatgcttttaaaagaaaaaaargtgaaatgtacgaagttaataatgtattaattagaacaaacaaaagtaaaataatttactagatttctcacatgtgagttgtcctcctattagaacaatgcatgacacttagaatgagtgtattttttactttttttttttttgaggcagagtttcactcttgttgcccaggctggagtgtaatggcgcaatctcggctcactgcaacctccacctcctgggttcgagcagttctcctgcctcagtctcgtaactgggattacaggtgtgcgccaccatgcctcgctaatttttgtatttttagtagagatggggtttcaccatgttggccaggctggtctcaaacccctaacctcagg

SEQ ID NO: 25015 - DNA, 619 bp, Homo sapiens
ctttgccaagcagtctacatggttgcatccagtaaaaagggacagctttatcttattagtgtraagatactctataggctagtggtgggattacaccatgcagagtgtgaatcctggcaagtagttgaaccgtatgatctgatacttgatcatcctgaacctgagtctcttcacctgtaaatagtctaataataatacccacctaggctcattctgagggttaacaagattgataagctataatatacaaaatttttatcataatgactggcatgtggctacaaataaataataaccgctaccaggaaaactctaaaaaaaaagacccaaagggtgtactaagctatttagaagtcaagtaaaatgccttgaaggcagatttaactttataaagataatgatcagcaaacttattctataaagggccagatagtaaatatgtaaggctttgtgagccataatctctcttctctatcccatatacttaaaaaaaaaaataaccctttaaaagtagaaaaatcatgcttagctggtgggcaataaaaaaaacaggctgcagactagatttggatcatgtactatagttttctcactcctagaactcaaagagaatagtagt

SEQ ID NO: 25016 - DNA, 580 bp, Homo sapiens
ggtcactcctgtactgtatctagtacacttgaactttataaggctaatgaaaatatctgtgtcctaaaaataaaatgtactggctccaaaatgaaaataaaattacaaaatccaagttaattaagtttgattaaatatctactgaataacaaaactaacatgatatcagctagtcaactgctatccaagtcagctgttatgcagttatatataaatcagatatttatacatcttgtaactattagatttctgtwttggcctaatatggaggagtggggttttttcaaaaagaagcagcctaaaaacaatgaggacctaaagtgtccctcttcagatgcttttgttttcaaacaacatctcaataatggcaatggagatttgatgtatctgtaccatagatttaaaaaaagaactctacctgttaccaccatggggatggaggttattttatcatacacagtaactttgtgatgtgttagctgttttttgttttttttttatagtgtgaatacatttccttctgctttttctatcaactaaaacgttgctgtgagctgactttcgttccattatacttcta

SEQ ID NO: 25017 - DNA, 915 bp, Homo sapiens
gctggaatagccactttagagcaggtgcgcttgacaggatgaactgaacacacatattatctgctctaatgaagtgcacttattcttagcctggggcatagtcagtgatgttctgtgatttctctatatccatccagcagaagctttcctgtttctcaaaatacctcaccctagacatcgaggagccacttctatggaaggaaaagcagtttatcctccactgacatcctattgttagctgtgctatcgagttggcgagcagtcatcatcctgctgactaagaccccattctcctgggtctcaccgtggtcagatcaatgctctaatctctgggaaggaagaatgataaggcatctatgtagggtctcctctttagtcttcttttctcttagctgtttctttcaatgcccagattgccagtgagttaggctgcagtgctgaatagatcagagtgtttcactagaaagcacgcagtacaaagttsttcctgctctcttcaactcagtggccccatgactttgcataggacattttaacttacagaatcgcaatattcccttttgttcattgcaaaagctatcattgagtatcaatccatgtttactacctacttttcaaaatactggaaatacaaacatgccatccctattttgcccttaaggagccaaccatactacagagaaaacacggaagtgaacagccagttatgaacacggccccatcaccttcctagaattgtcaggtaaatgagaccataaatgggtcagcacttcctaagctctctgctgtcatattaatttcaggacatggctatgacagtcatgttactaatagggctctgcctagtaaccgtgttcatcccagaagaatacacaaaaatgtctttcatggttcgaaacttggttagaaatacca

SEQ ID NO: 25018 - DNA, 558 bp, Homo sapiens
acaaaatgcacctctgaaagggggccaaatggtggagtgagctaacactttgatgtcrgactagtcctggttcaaattctgcctccaaccactcactagctatgattacttgggtaagtcacttaccaatatgacctcaatttcctcttctgtaaaaagggacaacaaaagtacctgattcatagggtgactgtaagaattaaaattgagtttagcctttacgtatgtaaataatcacagtactaactaacagtggctgaggcctggtgacaggtacacagtggatgagaactattatggctattatattattactgagactcagggagaggcagtgatttatccaaggtcacgcgtggcctagacctgaatccattcctcacaaaacagtctccctccttgccatgggattccctggggttttcacaggccacagctctaatggtctgcagcaggttaccttgttccccagaacatagcttgtcataacatctctgcagggttctcccaaacccctttctgcctggcaacagctgacatcacacctagctgtaagtc

SEQ ID NO: 25019 - DNA, 626 bp, Homo sapiens
tgccccaattttatacaactctcacacacacaaaaatccctctctctcatacacacacgcacacacacacatacacacacacacaccctagagggataaacagttgacccttgaacaacacaggtttgaactacctgggatcacttgtatgtggattttcttctgcttctgtccccctgagacagcaagaacaaactctcctcttcttcctcctctctagcctactccatgtgaggaggacaaggatgaagacctttatggtgatccatttccatttaatgaattgyaagtatattttctcttccttgtgtttttcctaataattttcttttctctagtttattgtaagaatacagtatgtaggccgggcgcggtggctcacacctgtaatcccagcactttgggaggctgaggcgggcggatcacaaggtcaggagttcaagaccagcctggccaagatggtgaaaacccgtctctactgaaaaaatacaaaaaattagcctggtgcagtggctggtgcctgtaatcccagctacttgggaagctgaggcaggagaatcacttgaactcagagggcggaggttgcagtgagccgagatcacaccactgcactccagcctgggtga

SEQ ID NO: 25020 - DNA, 761 bp, Homo sapiens
aagaactggcaatgtatgccttcatgtcaaccaggggctggagccagaagcagctgcctcctctttggccggccaggatagggctctgcagttggctatagtcttcacctcctgctgttattaaaaatgtatacaaagggccacatgtcatttgctttacctgctggggcccatgagcatctgagtttgtggcccctcacctttagcgtctcctcagctggtagtagagggtgctacttgagagcaggaaggaaacacaaacaggaagtctagcccctgcttcgggaaactccaaaacaggacctgccaatgccacactgagtctatcagatactaggtatgacctaaggcagtggccatcctctctgtgcctcagttacctaatacatgggatcaggataattatggcacctaccacatgagtgaggctgatatgattaaatcaggaaacaatggcaataaaaatagtaaaagcaggataggaggactgagagcttaccatgcctgcaacatgtccrgcactgttccaagtgcctcagagggatgactcacctgctcctcacagctaccctatagtcgtgagtaatattattacccccatgctacagacgaggaagctgaggctcagaggagtcatgcaacttgttcaaagtcacccagttcaaaattaagggagcagggatatgaacctacacaatctgtttccacagcaaatactcctaactaccaccttatcctgcttgcttgtgcacaaaaggaaa

SEQ ID NO: 25021 - DNA, 556 bp, Homo sapiens
ttaaaggaaatcaactacgtactggtcgttttacctgcttttaaaagcagatcaacaggatataaamctgggttgtttttttccttaagaggacatttcttaatgacctcttaatttaatcgaatggaacaagtagcacaccaaaaatgatgtgtagtggaaaaagaaacagaagaaaaaatcgcaagaagtcatatagtgatctactttcactagtgttagaaaagcaaaggatgagtgtcttcttgagtaacttcaggctgaccacaatagccacttgttacactactaccacccactccaacacttcaggttcattaggaattaagaggaggcaaggaagataaaagacacaccccaaccaggtctaaggtctctccgtactacaccttgagggacacagggaaccagtgcattgtgccccccacccccaaaccttccctgctccccaggaggcaaagcccacggcctggggccaagacagtcctccggccagggcagtgacccagcgccaaacaacccgccccttatgaccaaagcgtcggcacccaggggt

SEQ ID NO: 25022 - DNA, 428 bp, Homo sapiens
tttgaaagtttcctcttttcattgattgaagcccactgtccctgttcccgacccatagccgtcaaagcaagcagctgtctagtctgcttgcacatttctaatgacagacagtttacctccctttaaaacagtcaaaggtagactttgaaatgactaagaaagttgagtaaaataaaagaccaacaggacaggtcctctaccaaactgggaagcaggtaacccaggcgccttgtcacttctagttcctcccctctcrtcattattgcaacttcttgaggcctttattctcttccccattttctgctgggccttgctctcagctgagggttaaggaaactccacagtggtagccactgacagtagtttaaggctctgcttcacaaaccaggagtgtgtatgccatggagtccttgaactccaagatgaac

SEQ ID NO: 25023 - DNA, 1615 bp, Homo sapiens
gattgagagagagaaacagtccaatggaagtgcacaaagagtcaggttgtcaggatatggcacatgccacatcttagatgtggatggagagggagaaagaggaacaaggatcacttctgaaacacccgcttgggggactaggtggtagtaccatccctaagccaggaaccccacagaggaagacagtttggaagaacaaagagtcgtgttggggaatactgtgtttacaatgcctgtgaagacccacagatcaaggtccagtggctgctcttctttccagagctttggggaatggtcaggactggagaagcaggagccccagcagacctgaaatggagaccatcccagaaaatcctgtttgatatcagcatggaaagcctcccttccgctgagagccaccaccagccccttcctgacagctccttggggcatgtccacagccaggtttcccttctaagcaatcaggcctccaccctggagtcccaggccaagcgagtaggcttggggttgtggctgagggggccccaatagcagcctcctccctccagcagggccaatgggaccccagagggggctggatgtttgtgcagatgacatgtttatggcccaacctctccttactcatgcttttggctttccctcgctgattttggttgggtggatcccagttctgctgctgggtttgggagccttggggctggggctgaacagaggttcctttaactgttccaacccacgatgattccagccccttccccctctcccccaagacctcatcttttcccacacccaaccttattaccaaatgctggcctctcagagctggaaggggcctccggcatcctcttgtccaatgcctcctcacgtagatgaagaaactgaggcccagagacaagaagsgacttgcccaaggtcatccaagcaggtagagacagaagagcctgcatcctgacttccagcttggagccctgaagccatcctcccaccaccaacttccttggttgctgttttgtttgggaaaggacagttcagctttttcaagcctgcagcagtaactctctcccctcccagggaggcagcagacagtgacggactctctgcttttacactttaattccataggaaattggaaattgcctgtcagaggtgtccgggtggcccggctgccggccaccccacacagacccaggctgccccgccccgacctggccgccagcacgcccgcttctccctgctccctggcaggggggcccttttcggaagctctcctgagggctcctgtggaatctctccctgctcttccttccagggcaggaggatagagctcggtatagggcagccaggcctggctggggcccgaaaccctgacatttagtcgcactgttttccattccgggctctcgggagtctctggcccatagtggcagcttggcttcagcattgcttcctgccctgaggtcacagcgaaattgggggacccctcttctgggggtctggggtatccaggttccctaaaagcctctacattgccctcccagtgcttgtcaccatctcagggtttctgagactgcagtgggtcacacttcttcccttctctgggtatcccctgcatttg

SEQ ID NO: 25024 - DNA, 1615 bp, Homo sapiens
gattgagagagagaaacagtccaatggaagtgcacaaagagtcaggttgtcaggatatggcacatgccacatcttagatgtggatggagagggagaaagaggaacaaggatcacttctgaaacacccgcttgggggactaggtggtagtaccatccctaagccaggaaccccacagaggaagacagtttggaagaacaaagagtcgtgttggggaatactgtgtttacaatgcctgtgaagacccacagatcaaggtccagtggctgctcttctttccagagctttggggaatggtcaggactggagaagcaggagccccagcagacctgaaatggagaccatcccagaaaatcctgtttgatatcagcatggaaagcctcccttccgctgagagccaccaccagccccttcctgacagctccttggggcatgtccacagccaggtttcccttctaagcaatcaggcctccaccctggagtcccaggccaagcgagtaggcttggggttgtggctgagggggccccaatagcagcctcctccctccagcagggccaatgggaccccagagggggctggatgtttgtgcagatgacatgtttatggcccaacctctccttactcatgcttttggctttccctcgctgattttggttgggtggatcccagttctgctgctgggtttgggagccttggggctggggctgaacagaggttcctttaactgttccaacccacgatgattccagccccttccccctctcccccaagacctcatcttttcccacacccaaccttattaccaaatgctggcctctcagagctggaaggggcctccggcatcctcttgtccaatgcctcctcacgtagatgaagaaactgaggcccagagacaagaagggacttgcccaaggtcatccaagcaggtagagacagaagagcctgcatcctgacttccagcttggagccctgaagccatcctcccaccaccaacttccttggttgctgttttgtttgggaaaggacagttcagctttttcaagcctgcagcagtaactctctcccctcccagggaggcagcagacagtgacggactctctgcttttacactttaattccataggaaattggaaattgcctgtcagaggtgtccgggtggcccggctgccggccrccccacacagacccaggctgccccgccccgacctggccgccagcacgcccgcttctccctgctccctggcaggggggcccttttcggaagctctcctgagggctcctgtggaatctctccctgctcttccttccagggcaggaggatagagctcggtatagggcagccaggcctggctggggcccgaaaccctgacatttagtcgcactgttttccattccgggctctcgggagtctctggcccatagtggcagcttggcttcagcattgcttcctgccctgaggtcacagcgaaattgggggacccctcttctgggggtctggggtatccaggttccctaaaagcctctacattgccctcccagtgcttgtcaccatctcagggtttctgagactgcagtgggtcacacttcttcccttctctgggtatcccctgcatttg

SEQ ID NO: 25025 - DNA, 1122 bp, Homo sapiens
agggtacaygtttaaaaatatccataggtatccctccagctgctgtgtggaaacggcttgaagaggggcagggacaccagtaaggcatcttttgcaccactgacaggaagttagagctggagcggaccaaagaatgcagctcattgaagggctgcacctgccagatgggtaaactgagggtcagaaagggaaaatactgtaccaaaggtgcccaccactggggatgcttaagctaggtttgaatgactgtcaaggacactgccaacagggattaaaaaacaaggaaaaattgtcaaagaatggatttttttcttaaaaccaacaaaaagcacactcccatagatggaaaaaaaaattctgcttacacaattcatccttgatctcttgtttacaatttttaaagttctgaacatacagtgcaaggactctgcagcaagcctaattggtttattggaatcaacccctgaacacaacgtgatgtctgcatttttaggcagagacctaattttttaacgagagctgccctagcgtagggctttgtccccgtcctgggtttgggggctggtgagagagcacacaccctgggtcacagagccagctctgctgctagagaaactcacaaggcattcacctctctggccacccacccttctctctaaaacaaggacaataatctcccttgaggggtaagccacaatagctaacggagatggggccaacacctggcacgcactaggagtgcaacgttcagcttccctcacagtggtcatcccatgttcctgcttgtctagtaccttcccctcccctccttttggtaacagaatcctgacttcccacggggaatccttcctctggtcttcatgaggggagtgggcatgtctccctcccaggcccagccaaccacagccctgctgatgaatgatggctcagggatgggcacaagacggatgagaaccaattccaggacttttgatggcagtctcaggggacagaccattttgcccactcagtggctgctgggagaacctacaccaggaatttcccatggaaagcgcctgtcacacagaagaaagcagagccagagggagagaggagggctcagaccccgtggcaacatttgaa

SEQ ID NO: 25026 - DNA, 1200 bp, Homo sapiens
tgggctatactcatcagaaggctggattggggaagatctgcttccaagtttacttacatggttgttggtgggattcagttcctggtaggctgccagctttagctcctcatttcctgatggctggagggttccctcagttcctttccatgtgggcctctccagcatggctgcttgcttcatcaaagtgtacaagaagggagacagcaataggaacatgtcagcaagatggaatccacagtctttttaaagctaaccatggaagtgatattccatcacttttggtgtattctgtttgttaggaacaagacactaggtccagcccaccactcaaggtatgggattacacacggcatgaatactatggggtggggatcactggaaattatgtcagcagctatctgtcacacatgagagaagtggagatggtagtcataataatagtcatcatcatmataataataaggctggtgaggatagccagcatttattgggtgttcttgatgcatcaggcactgggctaaatcccttctatgcattgtctcctttaatctcctcatcactctcattaacttccctgagttactacagcaaagagattaggaccagactctgttgtttccactccgaagtccatccctttacatgatgcagatcattgataagaatccactgagctgctgaggctccaggaaagacctgattgagagaggagtctgataaacgaagctgaactcactgctcctcagaaaactgcaaatgaacacaaccagaagccatttcttacccatcagattggaaaagaaaatgtaagttggtgagagtgtggagaattctcacgccctgcagagaggctataaatttgtactgccaccttgtagggaaatttggcaggacatattaaaattttaaaaggacataaaaattaaaaatgtgcatagcctatgacctagaaattacatttttgagtatctgccttagagaaatacttgcacatgtgcacaaagaactgtatacaagaattttcattgcagcgctgtttccaagagtaaataatacatagtaacactgagacagagtgtaagtgctcatcagttttaaaaatggctaaataaattttgcaaatttttctaccaaaaagacacatgcacttgtatgttcatcacagcactattcacaatagcaaagacatggaatcaacct

SEQ ID NO: 25027 - DNA, 1091 bp, Homo sapiens
ggatccctgttgctcttcctcattcactggaatagctacatagtattccgtattatggattaccatgatttacttaacccacttgaccaggcagtttcccagcaacacagatcatttgaaaaagtaaattatccatggttactgagtggtaagcaaataaataataaagtctaaatgggagaaggttgtcaagggcrgagtgttaattgggttataggaaaagaagcaaggggatagggtgtctcccccagctctaacccagcgtctcctgcctacaggtgtctgctccatttagtgtgctggtgtcctgctctccccaccctgtgcccgtcaactctgccctcttccctattttagcatttccatccatgcccttcaagccctctgaccacgtaaccacaacgtctctctcccctgctgttccaggaaggttcagatacaggttgcctgagttcctggaccctcgtggcaccagggacaagagctagttaaaccttgccagctaaaaggttccagaaagtcaatccgtggcaactcacattccacacaggcatctcaccgagtcttactcagtaaaacccaaacacccatttttgttgagactttgacgagccctgaaaccactgagggccgggcttgcctcggcacacgtctgaaatatgtcaggcaggtgtttccaaagaacttatgctacaggaaaatatatcctgatgtaatctgactaatttggcttttgccttactttcaagagaactggctatttgtaatggaaacagtgctcgggacacttcagacggggctttgtaatgtgagctggtaaaaccctgcaggtgctacgggggcccctgttttcattttacgtctcacttttgtttatttaatgtgtttctctgggaggaaaaaaaaagagacccgggaggggtttaacaagtcatttttcatttcaaaaaaaaaaaaaaagaaatggttttgtattaagaaaattagaatcgagcgggaccgcaggagccctgcgggcgacaggaagcacacgtggcctgggaggatatgtttcttgagactaattccccaaagacgcgtgttcaggatcc

SEQ ID NO: 25028 - DNA, 1091 bp, Homo sapiens
ggatccctgttgctcttcctcattcactggaatagctacatagtattccgtattatggattaccatgatttacttaacccacttgaccaggcagtttcccagcaacacagatcatttgaaaaagtaaattatccatggttactgagtggtaagcaaataaataataaagtctaaatgggagaaggttgtcaagggcggagtgttaattgggttataggaaaagaagcaaggggatagggtgtctcccccagctctaacccagcgtctcctgcctacaggtgtctgctccatttagtgtgctggtgtcctgctctccccaccctgtgcccgtcaactctgccctcttccctattttagcatttccatccatgcccttcaagccctctgaccacgtaaccacaacgtctctctcccctgctgttccaggaaggttcagatacaggttgcctgagttcctggaccctcgtggcaccagggacaagagctagttaaaccttgccagctaaaaggttccagaaagtcaatccgtggcaactcacattccacacaggcatctcaccgagtcttactcagtaaaacccaaacacccatttttgttgagactttgacgagccctgaaaccactgagggccgggcttgcctcggcacacgtctgaaatatgtcaggcaggtgtttccaaagaacttatgctacaggaaaatatatcctgatgtaatctgactaatttggcttttgccttactttcaagagaactggctatttgtaatggaaacagtgctcgggacacttcagacggggctttgtaatgtgagctggtaaaaccctgcaggtgctacgggggcccctgttttcattttacgtctcacttttgtttatttaatgtgtttctctgggaggaaaaaaaaagagacccgggaggggtttaacaagtcatttttcatttcaaaaaaaaaaaaaaagaaatggttttgtattaagaaaattagaatcgagcgggaccgcaggagccctgcsggcgacaggaagcacacgtggcctgggaggatatgtttcttgagactaattccccaaagacgcgtgttcaggatcc

SEQ ID NO: 25029 - DNA, 375 bp, Homo sapiens
ttaaaagtaaaaaatggatctataaataagcaaaatccaatttaaaggcatcattggaaggggaaaagcctgtttacaaggacaataactattattattattacagtaataataacacccaagtaaaatccacatgagaaaaagtgtaaaatatttctgaaaaacacagaagcagacttgaacaaataagaaggctttctttccatattctaggcaaggaagtaccaacatcataaagttggcagtgcacacaaagttaactttcatacttagtgagtgccaataaaatgtcatcaggtttttattttcctaaatrtaaagttgattataccattaatttggaaaaacaccaaaaaatataagaaataggagggg

SEQ ID NO: 25030 - DNA, 1929 bp, Homo sapiens
gccatcaacaaatcacagcaacaatttctaaaaatcaataaatgacctgtaaatcattatctttttaatgaactatgtgcatttcagcttgtatcacttggtaagcagtttaataatttagattagagaattataaaatatacattgaaggccgggcgcagtggctcacccctgtaatcccagcactttgggaggccaaggtgggcagatcacctgaggtcaggagttcaagaccagcctgaccaatgtggtgaaaccctgtctctactaaaaatacaaaattagccgggcgtggtggcacatgcctgtaatcccaggtactcgggaggccaagacaggagaaatgcttaaacctgggaggtggaggttgtggtgagctgagatcatgccattgcactccagtctgggcaatgagcaaaactctgtctcaggaaaaaaaaawatatatatatacacacacacacatatatatatatttaatgtttttattaatatattgatttatacattagcgtattactgtaatgcttaagtatttttaatgccatccctataaacacttataaaaaggatattttcataagtatgtatgagagtgagctagcaaatttatgatcatctgagtatggtgttcaagcaccactactttgcacaaaacagcccttcaaatctagtcatcacacagaccactccttgtctcatctgtgtctgaaggtagaatcatgcacagagaaataggacatcaagataaaagtaaaggaactatagtagatgggttaaatgtgtttttcttttctctgtttcttttttcttattttggctcttggatccctccttggggaaatcaacaattccctacttcatgtggtccttgcaaaatgcatcaggatgctttctttgacataaattaagaaagaaagaaaaaaactctgacagctagcttaaaatctcacacaagaaggcaagaggtaaagcaattcaatgacattcgggtcttctgttctctaactagttaagaaacttgcctgaagcacccccatgcccagcagacttccaattcatgttttgtgtcaattggccaaaatgaggtcacaaaaatttggctgcttctaaaccaagaagcacatagggaaaggaattatcttaagtgatacagactaatcaagactccctacctaccagggcacccctaataaaacttcagcagccaaaagtcagagaagataccacttctatgtgggcttgagttccacaatcactagaaaaaaatgttaaaggtagatcttaaggaggaaagaaagtcatttagcagattgatatataattatttccctttctattaaaacacagcaaatactatcaaataaagcaattactcaactctcaaccctaacaaaaatgcacactagacatgcaaacagaaagctgggtccaagttggaagctagattcaccatttactggtctgtgcagcacccattggccatcaagtgtcaagtatactaagtctttggaagaagccagacaaattaccaagcaaacacaatctattcagagcagagagttagtaatattaattgtatcagataggaatttttatgcaaagtgtttaaaactcagctgaaatgccttaagcaattgatccagagtcagagtgggctttaagtgaacttcgttgattcagcagtttagacattattaccaaatacccttgatgtctcatcttccttctgtctcttagctctcccttccatagggattgttccatcatcagattccatgtggtagacatgccccaaatacacacagtagcttcagctttactcttatgacaaccaaatagctgccccagtttcaagccacacatgctaaccctaaatgctccagggaaaagaaaatgtcagttccaacagcacatagccaggtcttg

SEQ ID NO: 25031 - DNA, 1929 bp, Homo sapiens
gccatcaacaaatcacagcaacaatttctaaaaatcaataaatgacctgtaaatcattatctttttaatgaactatgtgcatttcagcttgtatcacttggtaagcagtttaataatttagattagagaattataaaatatacattgaaggccgggcgcagtggctcacccctgtaatcccagcactttgggaggccaaggtgggcagatcacctgaggtcaggagttcaagaccagcctgaccaatgtggtgaaaccctgtctctactaaaaatacaaaattagccgggcgtggtggcacatgcctgtaatcccaggtactcgggaggccaagacaggagaaatgcttaaacctgggaggtggaggttgtggtgagctgagatcatgccattgcactccagtctgggcaatgagcaaaactctgtctcaggaaaaaaaaaaatatatatatacacacacacacatatatatatatttaatgtttttattaatatattgatttatacattagcgtattactgtaatgcttaagtatttttaatgccatccctataaacacttataaaaaggatattttcataagtatgtatgagagtgagctagcaaatttatgatcatctgagtatggtgttcaagcaccactactttgcacaaaacagcccttcaaatctagtcatcacacagaccactccttgtctcatctgtgtctgaaggtagaatcatgcacagagaaataggacatcaagataaaagtaaaggaactatagtagatgggttaaatgtgtttttcttttctctgtttcttttttcttattttggctcttggatccctccttggggaaatcaacaattccctacttcatgtggtccttgcaaaatgcatcaggatgctttctttgacataaattaagaaagaaagaaaaaaactctgacagctagcttaaaatctcacacaagaaggcaagaggtaaagcaattcaatgacattcgggtcttctgttctctaactagttaagaaacttgcctgaagcacccccatgcccagcagacttccaattcatgttttgtgtcaattggccaaaatgaggtcacaaaaatttggctgcttctaaaccaagaagcacatagggaaaggaattatcttaagtgatacagactaatcaagactccctacctaccagggcacccctaataaaacttcagcagccaaaagtcagagaagataccacttctatgtgggcttgagttccacaatcactagaaaaaaatgttaaaggtagatcttaaggaggaaagaaagtcatttagcagattgatatataattatttccctttctattaaaacacagcaaatactatcaaataaagcaattactcaactctcaaccctaacaaaaatgcacactagacatgcaaacagaaagctgggtccaagttggaagctagattcaccatttactggtctgtgcagcacccattggccatcaagtgtcaagtatactaagtctttggaagaagccagacaaattaccaagcaaacacaatctattcagagcagagagttagtaatattaattgtatcagataggaatttttatgcaaagtgtttaaaactcagctgaaatgccttaagcaattgatccagagtcagagtgggctttaartgaacttcgttgattcagcagtttagacattattaccaaatacccttgatgtctcatcttccttctgtctcttagctctcccttccatagggattgttccatcatcagattccatgtggtagacatgccccaaatacacacagtagcttcagctttactcttatgacaaccaaatagctgccccagtttcaagccacacatgctaaccctaaatgctccagggaaaagaaaatgtcagttccaacagcacatagccaggtcttg

SEQ ID NO: 25032 - DNA, 1929 bp, Homo sapiens
gccatcaacaaatcacagcaacaatttctaaaaatcaataaatgacctgtaaatcattatctttttaatgaactatgtgcatttcagcttgtatcacttggtaagcagtttaataatttagattagagaattataaaatatacattgaaggccgggcgcagtggctcacccctgtaatcccagcactttgggaggccaaggtgggcagatcacctgaggtcaggagttcaagaccagcctgaccaatgtggtgaaaccctgtctctactaaaaatacaaaattagccgggcgtggtggcacatgcctgtaatcccaggtactcgggaggccaagacaggagaaatgcttaaacctgggaggtggaggttgtggtgagctgagatcatgccattgcactccagtctgggcaatgagcaaaactctgtctcaggaaaaaaaaaaatatatatatacacacacacacatatatatatatttaatgtttttattaatatattgatttatacattagcgtattactgtaatgcttaagtatttttaatgccatccctataaacacttataaaaaggatattttcataagtatgtatgagagtgagctagcaaatttatgatcatctgagtatggtgttcaagcaccactactttgcacaaaacagcccttcaaatctagtcatcacacagaccactccttgtctcatctgtgtctgaaggtagaatcatgcacagagaaataggacatcaagataaaagtaaaggaactatagtagatgggttaaatgtgtttttcttttctctgtttcttttttcttattttggctcttggatccctccttggggaaatcaacaattccctacttcatgtggtccttgcaaaatgcatcaggatgctttctttgacataaattaagaaagaaagaaaaaaactctgacagctagcttaaaatctcacacaagaaggcaagaggtaaagcaattcaatgacattcgggtcttctgttctctaactagttaagaaacttgcctgaagcacccccatgcccagcagacttccaattcatgttttgtgtcaattggccaaaatgaggtcacaaaaatttggctgcttctaaaccaagaagcacatagggaaaggaattatcttaagtgatacagactaatcaagactccctacctaccagggcacccctaataaaacttcagcagccaaaagtcagagaagataccacttctatgtgggcttgagttccacaatcactagaaaaaaatgttaaaggtagatcttaaggaggaaagaaagtcatttagcagattgatatataattatttccctttctattaaaacacagcaaatactatcaaataaagcaattactcaactctcaaccctaacaaaaatgcacactagacatgcaaacagaaagctgggtccaagttggaagctagattcaccatttactggtctgtgcagcacccattggccatcaagtgtcaagtatactaagtctttggaagaagccagacaaattaccaagcaaacacaatctattcagagcagagagttagtaatattaattgtatcagataggaatttttatgcaaagtgtttaaaactcagctgaaatgccttaagcaattgatccagagtcagagtgggctttaagtgaacttygttgattcagcagtttagacattattaccaaatacccttgatgtctcatcttccttctgtctcttagctctcccttccatagggattgttccatcatcagattccatgtggtagacatgccccaaatacacacagtagcttcagctttactcttatgacaaccaaatagctgccccagtttcaagccacacatgctaaccctaaatgctccagggaaaagaaaatgtcagttccaacagcacatagccaggtcttg

SEQ ID NO: 25033 - DNA, 1111 bp, Homo sapiens
actataggacattgaaacaaatggaactaatcaatgacgaatgacatttcttctcagtgtagggatcctcctctcaatccatccagaaaatttttcttactaatttccccaacattctgcagtttcaacttttggcataatacatgccagttgctacatcagcttagctgatatctggacaatttgaccttactaccactagaaacttcatccaaggagaacaaaatcccgaggaagatatctcccatcttgccacatgctgaaagcaagcatttctagcccatctttattgaccatgagtacctgtgaggaaacaggcaaaagcaaccacccattctacctcctacaaaacacatgtgctccccaacataccaactttcacttagaaaatgtgtgaagcttttaaaataacttagtagagctgcaagtggtgggagtgcaaagaaagtatgatttgagtcccaggctgccagcatttcaggcatgctcagatatgtctagctcccttttttttcccctgggtcaaaggtaaatatggccatttttggagaaccatcacagtctgttgtactgaaaaatgtgtgaagagcaaaaccattgccagcagaaaagaagtagtctgtcctgggcagtccctgctggagaaagcattttgggtgactgagaatgtcctgctgttaaatacagatatagttttatgatggtaatctttcactatactttttattgctgacgttctaatgcttcatactaatagatcacagtacaacacagtgtaatgcagactgggaattagtcttagtggtacctatttatttgtgagtgcttactgtatgatgcacaatactatgcactgaatacacatcagtttgctggattctcacaatggtgccattaagtagattttataattaacccaattttataaaygagtaaacagagttagaagggtcattatgaactttgaacagtttatagttggtagtggtagagctgggacttgatcaatgaataagatctgtattcttagtcaccatgctaaaaatgtatcagtcagatcactgggttctagctctgtcctgatactcatcagttgtatgggccatgagtg

SEQ ID NO: 25034 - DNA, 542 bp, Homo sapiens
tcgagtgtttacgtggtacctggcacatagtgagcattcaataaatgtcactgatgatggtaaagatgataatcatggtgataaccagtggatatcctgataaatgcctataatctccttaaatcatatatgtctttctaaggactcaccacaatatgaggaatttcaagttttgaacttgactctctcaaaggataatggtcaactcagttatctacatgacatggagaggagggtgatggaattgattatctaaggcaggatataattcaggaaaatatctaacttgactttgtaataaagattttttctttccctgattgttctgygcacacatattattccatatcacagaggtatgctaattaccctaatttatttactttctccccattgatggactcttagtttgaatctaatttttactattaccagcaatgctgcagaggacatccttctagacatattcttatgctcttttgtgtttttgtaggaaaaagttgtacagccatttatagacagcttattacatatccgacatt

SEQ ID NO: 25035 - DNA, 372 bp, Homo sapiens
ggtgtatctctgtccttccacccagagggatctgtccactacagcccaccctttggaccacctgaattcatttctccatatatgttcaggaaacaactcttccaggatttccatggacttctcttcctggggagaaacttagaaaagggaaattcacggtacagcacactggctcccaccagcaatcccagcactttgggaggttaaggagggaggattgcttcagcctaggagtctgagacaagcctgggcaacatgrcaaaaccctgtctctaccaaaaaaataaaataaaataaattctttcaaaaattacccagacatggtggcaagaccctgtagtcccagctacttgggaggctgagacaggagga

SEQ ID NO: 25036 - DNA, 589 bp, Homo sapiens
aacttcccagaatataattaggtatagaatatagttcttatctttctttgagaactttttgaattattgttatagtttctaaaatatcttttctattttgagggtaaggtcacaaaacagaaaaaaatgtgtatcagagtatgttgaatatggctgtttgtcagatcaagtttacgctgtgtatgggccttcgtccaatttagatgcagatggtataagggactttgaatatgctatattattattcagctgacttctccagtaaataatagtgttcttcaggaacagaaaaccaaacgccacatgttctcactcataaatgggagctgaacartgagaacacatggacacagggaggggaacatcacatacactggggcctgtaggtggaggggagcagggggagggagagcatcaggataaatagctaatgcatgtggggcttaatacctaggtgatgggttgataggtgcagcacatcaccatggcacatgtttacctatgtaacaaacctgcatgtcctgtacatgtatcccagaccccaaaataaaattaaaaaaataataatagtgttctttagcgtctttca

SEQ ID NO: 25037 - DNA, 1022 bp, Homo sapiens
cagctattcaggagcctgagacaggagaatcacttgaacccgggaggtggaggttgcaatgagccaggatcgcaccactgcactcaagcctgagcaacagagtgagaccccccccaaaaaaaaagagagttcactgtgaccccggccctgcctcagggccgtcccctgctgcggcctcctaggtcccccaccctgcgtcgacaactgctggtggctgcaaagagggggacgagcagacatcacaacagccaccaaagctaaagctggatgcacccccaacccagcgattccagggctagggtgtgtcctacagacacaaccgcatgtgggagaggggctcaggacagcagcgttggccacgtgaagacctggaaggagtctgagtgtcgctgcggacacaatgcagctaaagcaacagcggcacggctgggcacaggggtgctctgcggcggcaagacagaacaaagatggcccctccacraccccggcgaccccagatccatgggagaggcagagcagggaatggagggtgcagcctccactggtgcgagaggacgctcacggaatagctctgctcagactttgtggccgtagctcctctctcatgatggggctgggggtgggagctggggtggggaaggagagcacgctgtctgctcttttttagcttttatgttttgaactttgtgaatgaaggtttcagtgcaaaaaaaaaaaaaagaaaacagggaaatgacatgtggccctgactaccggccatgagagaaaatcatctcaggccctgaagcccctccctgaaatgactgtcttggggacaataaagagaccaaagcacagaagtaatgtccccaggcccctgggggttcccaagcttctctaggctggggccggcatggcactcatgggcgaggacgaggctgggtgggcaccagcgggccactgacctcagcgtgctgggccatggtgctggcctccaccgcgtagattttccgtgctccagcttgggcggcaaaaaacgacag

SEQ ID NO: 25038 - DNA, 580 bp, Homo sapiens
caggcaggtttaccagagcatctacacctcactttcttcacctgtgaaacaaacaataaggctgggtgcggtggctgacatctgtaatcccagcactttcggaagccaaggtgggcagatgacctgaggtaaggagttcgagaccagcctggccaacatggtgaaaccccgtttctactaaaaatacaaaaaaattaattagccaggcatagtggcaggtgcctgtaatcacagctactcggcaggctgaggcaggagaatttcttgaacccaggaggtggaggttacagtgagccaagatcatgtcattgcgctccagcctgggtgacgagagtaaaactccatctcaaaaaaaaaaaaaaaaaaaaaaaatgctgggcccagtgkctcacgtctgtaatcccaacactttgggaggccaaggcaggtggatcatgaggtcaagagattgagaccatcctggccaatgtggtgaaacaccatctctactaaaaatacaaaaattagctggctgtggtggcgcgtgcctgtagtgccagctactcaggaggctgaggcagaattgcatgaacccaggagg

SEQ ID NO: 25039 - DNA, 536 bp, Homo sapiens
tcaaaaatcggaaagggacccacagttcctaagaaggtgtgagaggcctggttgtcgcaaaggcaggctgtgtcccctcacggccctagtgcagggctactttctgctccaaccgaactaaagacttgttccagggcagcagggccccagggcacaggcttttggggccacccctgttcccagctccggccctgcctttgctatctgcagtactcaggycagtgtccccaaaagccccagaggctgtcagggagggaaatggggggatcgtgggggaggtgacttgcccgagggcccccaccaggaggtggtggagctccccattggtctggctctagaccccagctctgaccctagaccccagctctgacctctgggccgcacattgtgtctgaagccaaggaatgacgcaggcagacgcccctgctcgccctcctgctgtgccagctcctctgaccccactgcctctgccctgtcccaggtgaagctgtcagactttgggttctgcgcccaggtgagcaaggaagtgccccgaa

SEQ ID NO: 25040 - DNA, 1124 bp, Homo sapiens
ttctcgatgtagcagagcctagtttaggttacacagcatgcatcattatcccatcccaccaccctccaaaccgactgtgcccagtcatgccactgagcttgcctttccaaaactgccatctgacaatgtcacttcctctgctttagaaatcttcccaaggctgcagacaccgacggatttgctttgggagccagagtagctgccgccaccagagtccggagccatgagcgggtttaattttggaggcactggggcccctacaggcgggttcacgtttggcactgcaaagacggcaacaaccacacctgctacagggttttctttctccacctctggcactggagggtttaattttggggctcccttccaaccagccacaagtaccccttccaccggcctgttctcacttgccacccagactccggccacacagacgacaggcttcacttttggaacagcgactcttgcttcggggggaactggattttctttggggatcggtgcttcaaagctcaacttgagcaacacagctgccaccccagccatggcaaaccccagcggctttgggctgggcagcagcaacctcactaatgccatatcgagcaccgtcacctccagccagggcacagcacccaccggctttgtgtttggcccctccaccacctctgtggctccagctaccacatctggaggcttctcattcactggtggaagcacggcccaaccctccggtttcaacattggctcagcagggaattcagcccagcccacggcacctgccacgttgcccttcactccggccacgccagcagccaccacagcaggtgccacacagccagctgctcccacacccacagccaccatcaccagcactgggcccagcctctttgcgtcaatagcaactgctccaacctcatctgccaccactggactctccctctgtacccctgtgaccacagcgggcgcccccactgctgggacacagggcttcagcttaaaggcacctggagcagcttccggcacctccacaacaacatccaccgctgccaccgccaccgccaccaccaccascagcagcagcaccaccggctttgccttgaatttaaaaccactggcgccagccg

SEQ ID NO: 25041 - DNA, 520 bp, Homo sapiens
tttttttcttttttttcttttctttttgtggagaacagggtctcactgtattgcccaggcaggtctcaaactcctgggctcaagctatcctcctgcctctgcctccctaagagctgggattacaggcgtgagccaccgcgcccggctaatttttgtacttttagtagaaatgaggtttcaccatcttggccaggctggtctyaaactcctgactccaggtgattagcctgctttggtctccaagagtgctgagacgacatgcctgagctaccgtgcctggcctgcagacagctattccagaggctgcggtggggcatgggccaagactgcaacactgcactgcagcctgggtgacagagccagaccttgtctcataacacacacacacacacacacacacacacacacacacacacacgaaggaaaaaaaacccaaagtgatacaagagtattctgtgtgtgtagaagagtgttttgtgttaatcattatattatctatagaagatgatatgataaaatg

SEQ ID NO: 25042 - DNA, 608 bp, Homo sapiens
cggcctcagcttgcttctttcattgtgttgtgacttgcctcgaaattctttccagcaagagatccaagaacccgcttttggggtctggattggttgcctcttctctggcaatggtgtgacccaggctatccctgaatccaagcattatagctgctacggaacccagcctcacaacccagagaccctggtcatttccttaaagctgggctgaagtccagtttatggcgcagaacaagcaccacggtttagcttttacctgcagtggctcctggagccccccgccccccctcccccccatggtgttttttcggtgctcgcctcagtcattggacctcagctatgacagcactttcattctggcaccagaaagtgccctcaaggctgagtgccacagactgagaagtaccctccctgtattgtccagtacctggaaactgcaggcacatcctctatgcagaagataagagatttaaaactgacttctgaatgttgctcaatagygaaaggtagattgagcattctctccagttctcaggaacaatgcagagccttgtaatgcaaatcctaggcctgccctggggctcatgcctgtaatcccagcactttgg

SEQ ID NO: 25043 - DNA, 552 bp, Homo sapiens
attcccgacctcaggtgatcctcctgtctcagcctcccaaagtgctggaattacaggcgtgggccactgtactctgcctggtgccattattaaaaytaggaaaaaagaaagatgcccacacctaaacagcaaatcatttgttgttcaagtatgtctcaaatgcagtcttcatctaaaatactaatttgactggcggctaggtgtgaaccaaagaacggtcctttctttcctcttgcctgtgcatggttaatattcacatgtagtcccagctactaaggactggggagaggtggaggcaaaaggacctaagcccattttagcctgggcagcatagtgagacccctgtctcgttgcacatatgacctggtcgtgcagccaagagttcagctgcatttacccagtgaaaactcaaagccatgcactccacctccgtgccccagtgaaaactcaaagccatgcactccacctccgtgctcttgctaagcagggcacatcccatctgcaagggacaatgaggtcccccacccccttatttatttatttatttttttg

SEQ ID NO: 25044 - DNA, 1216 bp, Homo sapiens
agagcttcttgaaattacatttttttttttttttttttagacagggtcttgctccatcacccaggctcaagtgaagtggcatgatctcagctcactgccgccttgacctcctgagctcaaatgatcctcccacctcagcctcatgagtagctaggactgcaggcatgagccattgcacccagcaataaatagcctttttggtttgcccaatttgtgtcrtgtttgtcactagtaaccagcagagtcctaatctagggtgtcaggatgggcccccagctgtgagtactcacccctagtggccacagccccacaagggcctccgcatcctgggtatccagctctggcacatgccacaccccccatgtcctctgcaggcgagtaagtggctctagggtgctgaggacccctagaggggtcctgtctgctttgttcacctgtggtgggaccagcctgggatggacagtgtccagggagtcaggggtcagaggtgggcagtgggacaatgaggtgaggtcaaaggtacaggaaggggcaggcccagggcagaggctcagagatgtgattcaggattctgtagtgagggaggtattggatggaaagggtttctggatgcaggggaaggagggcatagcctcagccctagtagcctcacctcaccccctctgtggggacttcaggtgccttgtcttctggctgggccatcgtcaggttgcaggaagccagtgagtcatgacctggcctctggcagggagaaaggtaagactcaaagctgctctagccctcgggtcatgttcaagatatttacaatcaatatggcagagaccctgaccaatcagaatggaccccagaggccgcttgccgtggcaggggttaattctttattttatttttgagacggagtctcactgtattgcccagactgcagtgcagtggcacgatctcagctcactgcaacctccgcctcgtaggttcaagcgattcttgtgcctcagtctcccgagtagttgggattacaggcgtgcaccaccacgcctgggtaatttttgtattttttagtagagacaaggttttgacgtgttacccaggctggtctcaaactcctgacctcaagtgatccccccgcctcggcctcccaaagtgctgagattacaggcatgagccaccacacccggccggcaggggttaaatctttagtaccggatggtggggaatctgg

SEQ ID NO: 25045 - DNA, 871 bp, Homo sapiens
taatgctcaaaaacttaatcatgaatgagttattacacaaagttataaatatatagcatttatcagtggctcattcttttttctttcttttttttttttttttttgagatggagttttgccctgtcgcccaggctggagtgcagtggcacaatctcggctcactgcaacctccgcctcctgggtgtgagcaattttcctgcctcagcctcctgagtaactgggattataagcacatgccaccacgcctggctaatttttttgtatttttagtagagacggggcttcaccatgtggttcaggctggtctcagactcctgaccttgtgatccgccctccttggcctcccaaagtgctgagattacaggtgtgagccaccgcgcctggccttttttttttttcccgagacacagtctcactctgttgcccaggctagagtgcagtggcgcgatcttgactcactgtaacctctgacttctgggttcaagcaattctcctgcttcagtctccgaagcatctgggattacaggcgcacgccaccatgcccagctaaatttttggtatttttgtagaaacagggtttttccacattggccaggctggtcttgaactcctgacctcaaggaatccatcctcttcagcctcgcaaagtgctgagattataggcatgagacaccttgcccggcccctgtgactcattcttaaaaaggatctttggattatgggtttccacttttgcaaggaaatgtgagaatgatactctttaagcagtggtacctgaggtttaataggaagtgtttttatcctaagttagttaataaaatttttttctatccattttrgttttcatttttttctatccattttaaagtg

SEQ ID NO: 25046 - DNA, 1035 bp, Homo sapiens
gggacgtgggtcagtcctgggaacaagagatggcttgagcatgtttggatccatgtcttccagcagccatgggaatcaactgcagaccctttgaacatgacatgccactcaatttttttggtgtgatggaaaatcccacacccccataatggccctgtctccaacccttccaccctcaggttgtctctcaatccttgatgtcaactgccaacctctcagaccaaggcttgggactttgccatatgggrtgcctttgattacagtgggggtcactatgaacaaggattgcagagttgttcagaggagattaaaaacctgccccatcaggcagccagtgcatgcccaagccaagaagaaagctaagaatctccactcccactttatgatctaaccactagactgagctcctgttacttgacaaaaatgatttgcttttaattaaaataggagcataagctatttttatccctatattattgggcggtaagtaaattcacagtaactcactggattttttaaaatctattttaaatataaacacactgccatattttctgtgggtttgaaagcttatgttaagtttgcaaataagtcaactccataaagataacatctttccctaaaaaatgtgttgcaatctaatggcatgctatggaaaattaacatcttattaagaaaatacatgaattctccctccgttgaaaaggtccaaatagcgctgagtttcttacctgcccgtgagacaagatggactgatggggtggcctccaagcctccaaacccaggcaccccccaccccaggagtgtcctctgccaccctcacgggactcacatgtaacaaaaagctgtgattttattttgggtcatgctgaactctgtttttgaacttatcctgttacatgtctgacaggtcctgtattcacggagggacctgcattactctggttcaccctgaaaagatgccatctcagacaggctgcatgggaaggtgcagtgatctcccagcccagctgcctgtctgaacaccagggatcc

SEQ ID NO: 25047 - DNA, 1035 bp, Homo sapiens
gggacgtgggtcagtcctgggaacaagagatggcttgagcatgtttggatccatgtcttccagcagccatgggaatcaactgcagaccctttgaacatgacatgccactcaatttttttggtgtgatggaaaatcccacacccccataatggccctgtctccaacccttccaccctcaggttgtctctcaatccttgatgtcaactgccaacctctcagaccaaggcttgggactttgccatatgggatgcctttgattacagtgggggtcactatgaacaaggattgcagagttgttcagaggagattaaaaacctgccccatcaggcagccagtgcatgcccaagccaagaagaaagctaagaatctccactcccactttatgatctaaccactagactgagctcctgttacttgacaaaaatgatttgcttttaattaaaataggagcataagytatttttatccctatattattgggcggtaagtaaattcacagtaactcactggattttttaaaatctattttaaatataaacacactgccatattttctgtgggtttgaaagcttatgttaagtttgcaaataagtcaactccataaagataacatctttccctaaaaaatgtgttgcaatctaatggcatgctatggaaaattaacatcttattaagaaaatacatgaattctccctccgttgaaaaggtccaaatagcgctgagtttcttacctgcccgtgagacaagatggactgatggggtggcctccaagcctccaaacccaggcaccccccaccccaggagtgtcctctgccaccctcacgggactcacatgtaacaaaaagctgtgattttattttgggtcatgctgaactctgtttttgaacttatcctgttacatgtctgacaggtcctgtattcacggagggacctgcattactctggttcaccctgaaaagatgccatctcagacaggctgcatgggaaggtgcagtgatctcccagcccagctgcctgtctgaacaccagggatcc

SEQ ID NO: 25048 - DNA, 999 bp, Homo sapiens
caccagccttggcctcccaaagtgctgggattacaggcgtgagccaccgcacccagccaaattctgggcatttctctcaggcaaaagccacatacccatcacacttaccccaataagttgcagcacctgttgcaccatgccttacacacttacctgccccacaaacacccccaatatccatcccaggttcataccgcgtgaccacctatccaggcccaggcacccctcccagtcacacacacacccatcccctacccccagtgctgcctggaactgcactctagtctacattccccatcctctgtcccctagacctgccccccgaagtcccctgccacacagccccatctaggcaagcccagcctccacctccacacattcatctcccaaaggactccttgaatatttgccccaaaacatcagctcccagaaaacacccctttcaggtccccaaccttcttacacatttatcccaattgactccgtgcacaacyctactccccactgcatcacaaaccacagacacctgtgcacacacgcacacatgcaccccggcactctctcctattctcatgacctctggcatgcctgccccactcatcaggcccaggcacccctgccctactccacccacacacctatgactccacacaactcccacacatgcaccagctctccagaatcctttgcacacctcgcccccataaacaccctcaaccccagcacacacatacacgtacacacgcaacacaaccagaaagaatattcttcttctcgtcctacgatccccctggaaggtccccaagcctcctgcctgctcattccaaaccttgactgagccgatttcctcgccaaagctttgccctctcatccccaactccaggacccagggaagggactgtgacccccacccacctacgtccctcactcaccgctcacgatcacaggccggggcttcctgaaccctcgcaatgacacttgcccggaccctgccaccga

SEQ ID NO: 25049 - DNA, 999 bp, Homo sapiens
caccagccttggcctcccaaagtgctgggattacaggcgtgagccaccgcacccagccaaattctgggcatttctctcaggcaaaagccacatacccatcacacttaccccaataagttgcagcacctgttgcaccatgccttacacacttacctgccccacaaacacccccaatatccatcccaggttcataccgcgtgaccacctatccaggcccaggcacccctcccagtcacacacacacccatcccctacccccagtgctgcctggaactgcactctagtctacattccccatcctctgtcccctagacctgccccccgaagtcccctgccacacagccccatctaggcaagcccagcctccacctccacacattcatctcccaaaggactccttgaatatttgccccaaaacatcagctcccagaaaacacccctttcaggtccccaaccttcttacacatttatcccaattgactccgtgcacaaccctactccccactgcatcacaaaccacagacacctgtgcacacacgcacacatgcaccccggcactctctcctattctcatgacctctggcatgcctgccccactcatcaggcccaggcacccctgccctactccacccacacacctatgactccacacaactcccacacatgcaccagctctccagaatcctttgcacacctcgcccccataaacaccctcaaccccagcacacacatacacgtacacacgcaacacaaccagaaagaatattcttcttctcgtcctacgatccccctggaaggtccccaagcctcctgcctgctcattccaaaccttgactgagccgatttcctcgccaaagctttgccctctcatccccaactccaggacccagggaagggactgtgacccccacccacctacgtccctcactcaccgctcacgatcacaggccggggcttcctgaaccctcgcaatgacactygcccggaccctgccaccga

SEQ ID NO: 25050 - DNA, 568 bp, Homo sapiens
cctggcctcatttgagtatttttataatgtctcttttaaagtctttgtcagataattycactgtacatgttattcagtgtttggtgtccactgagttgtcatttgccagacaagtggagatttttgcagctcatccttgtattctcagtagttccgatatgtaccctcgaaatgtgaatgttatcttatgagactctgttttatttgtatccaacagaagatgtttattatttatttggctttctgtgaactgaggtcttaatatcagctcattttaaaagtctttgcagtggtattcggatctatcctgtgtgtgcctatgagattgggtgcagtgtatcctgttagctccattctcagggcgtttgaatgtgaattaggaccagcgcaatgaatgctcaagttggggttgggcgttagaattcataaaagtctttatatgctcagattctgcagctccatcctcttcatgattgtgatcgtaaggacagtggaattttgcagttgtctataccttatcttgaagtagaactaaattgttacatttgaagaatgtacttcataaatt

SEQ ID NO: 25051 - DNA, 568 bp, Homo sapiens
cctggcctcatttgagtatttttataatgtctcttttaaagtctttgtcagataatttcactgtacatgttattcagtgtttggtgtccactgagttgtcatttgccagacaagtggagatttttgcagctcatccttgtattctcagtagttccgatatgtaccctcgamatgtgaatgttatcttatgagactctgttttatttgtatccaacagaagatgtttattatttatttggctttctgtgaactgaggtcttaatatcagctcattttaaaagtctttgcagtggtattcggatctatcctgtgtgtgcctatgagattgggtgcagtgtatcctgttagctccattctcagggcgtttgaatgtgaattaggaccagcgcaatgaatgctcaagttggggttgggcgttagaattcataaaagtctttatatgctcagattctgcagctccatcctcttcatgattgtgatcgtaaggacagtggaattttgcagttgtctataccttatcttgaagtagaactaaattgttacatttgaagaatgtacttcataaatt

SEQ ID NO: 25052 - DNA, 1498 bp, Homo sapiens
gatacaatggaaaacaaaatagagcttctattttggcgggagatcgacttaataactgtgaacacgtgtcactggaaaaagcagtatgttaataagtaactgggctgctttgggaaaaatggaaatgcaggcgatgttagaacactggtacacacactaattcattcatcctcacaaagccctatagacaggtactattatgacccctcaactgtaacataggctggaaggtcacatgacaaggaagtagtggagctgggatttgaacccaggcagtctggcttcatacttgataagcttaatcacaatgccaaagtggtaaatagctgtgtggcataatttcaggtagtgataagtgctgtgaaggataaagcaaagaaaggggcagggatggctctttagagagactacttagggatggctttcaggaagaggtggcatttgagcaggggcccgagggattgatgtgacttgtgataaaagaaaaacttcagacgaattaaatttaaagaagtttaattggctaggcactgtggttcatgcctgtaatcccagcactttgggaggccgaggagggcggatggcttcaagtcaggagcttgagaccagcctggtcaacatggcaaaaccctgtctctactacaaatacaaaaattagctaggcatggtggtgggcacctgtagtcccagctactcgggaggctgaggcacaagaattgcttgaacgcagaaggtggaggttgtagtgagctgagatcgcaccactgtgctccagcctgtgcaacagagcgagactccatctctaaataaataaataaatagagtttaattgagcaatgaaggatccacgaatcaggtagcctcgggccagagtaggctgaaactccagcacagccatgtggtggaagatttatggacagaaaaaggaaagtgacatacagaaaacgtaagtgaggtacagaaacagctgrattgattacagctcggcgtttgctgtacacagttcgaacagttggctacatttgattgcccaaaactcggtgattggcacaagcgtaggccaccttctgtttacacctccacttgttatagttcacgacgtacagaaaaaccttcaggccgaacttaaaatatgtaaggaggcagctttaggctaaacttgatttaacactgtgagctatatatgtggggcatatagagggttaaggtttactaacctttagtttcctcttgccttcctgaagggccaaatactgtaatacgtgcagttccctccaataggaacgtacttcttcattctcttttcctggcaaacacattcttcaaggtccagttctgtgaagatccttctgcctgttttttaaaatttatttttatttgtttgtttatggtcacatacgtctcttcctggtctggactcatccaatccatttgtcacagtaaagcttctggggtaggggaggtggttattctaatgtacatccaatcaagccactct

SEQ ID NO: 25053 - DNA, 1498 bp, Homo sapiens
gatacaatggaaaacaaaatagagcttctattttggcgggagatcgacttaataactgtgaacacgtgtcactggaaaaagcagtatgttaataagtaactgggctgctttgggaaaaatggaaatgcaggcgatgttagaacactggtacacacactaattcattcatcctcacaaagccctatagacaggtactattatgacccctcaactgtaacataggctggaaggtcacatgacaaggaagtagtggagctgggatttgaacccaggcagtctggcttcatacttgataagcttaatcacaatgccaaagtggtaaatagctgtgtggcataatttcaggtagtgataagtgctgtgaaggataaagcaaagaaaggggcagggatggctctttagagagactacttagggatggctttcaggaagaggtggcatttgagcaggggcccgagggattgatgtgacttgtgataaaagaaaaacttcagacgaattaaatttaaagaagtttaattggctaggcactgtggttcatgcctgtaatcccagcactttgggaggccgaggagggcggatggcttcaagtcaggagcttgagaccagcctggtcaacatggcaaaaccctgtctctactacaaatacaaaaattagctaggcatggtggtgggcacctgtagtcccagctactcgggaggctgaggcacaagaattgcttgaacgcagaaggtggaggttgtagtgagctgagatcgcaccactgtgctccagcctgtgcaacagagcgagactccatctctaaataaataaataaatagagtttaattgagcaatgaaggatccacgaatcaggtagcctcgggccagagtaggctgaaactccagcacagccatgtggtggaagatttatggacagaaaaaggaaagtgacatacagaaaacgtaagtgaggtacagaaacagctggattgattacagctcggcgtttgctgtacacagttcgaacagttggctacatttgattgcccaaaactcggtgattggcacaagygtaggccaccttctgtttacacctccacttgttatagttcacgacgtacagaaaaaccttcaggccgaacttaaaatatgtaaggaggcagctttaggctaaacttgatttaacactgtgagctatatatgtggggcatatagagggttaaggtttactaacctttagtttcctcttgccttcctgaagggccaaatactgtaatacgtgcagttccctccaataggaacgtacttcttcattctcttttcctggcaaacacattcttcaaggtccagttctgtgaagatccttctgcctgttttttaaaatttatttttatttgtttgtttatggtcacatacgtctcttcctggtctggactcatccaatccatttgtcacagtaaagcttctggggtaggggaggtggttattctaatgtacatccaatcaagccactct

SEQ ID NO: 25054 - DNA, 1498 bp, Homo sapiens
gatacaatggaaaacaaaatagagcttctattttggcgggagatcgacttaataactgtgaacacgtgtcactggaaaaagcagtatgttaataagtaactgggctgctttgggaaaaatggaaatgcaggcgatgttagaacactggtacacacactaattcattcatcctcacaaagccctatagacaggtactattatgacccctcaactgtaacataggctggaaggtcacatgacaaggaagtagtggagctgggatttgaacccaggcagtctggcttcatacttgataagcttaatcacaatgccaaagtggtaaatagctgtgtggcataatttcaggtagtgataagtgctgtgaaggataaagcaaagaaaggggcagggatggctctttagagagactacttagggatggctttcaggaagaggtggcatttgagcaggggcccgagggattgatgtgacttgtgataaaagaaaaacttcagacgaattaaatttaaagaagtttaattggctaggcactgtggttcatgcctgtaatcccagcactttgggaggccgaggagggcggatggcttcaagtcaggagcttgagaccagcctggtcaacatggcaaaaccctgtctctactacaaatacaaaaattagctaggcatggtggtgggcacctgtagtcccagctactcgggaggctgaggcacaagaattgcttgaacgcagaaggtggaggttgtagtgagctgagatcgcaccactgtgctccagcctgtgcaacagagcgagactccatctctaaataaataaataaatagagtttaattgagcaatgaaggatccacgaatcaggtagcctcgggccagagtaggctgaaactccagcacagccatgtggtggaagatttatggacagaaaaaggaaagtgacatacagaaaacgtaagtgaggtacagaaacagctggattgattacagctcggcgtttgctgtacacagttcgaacagttggctacatttgattgcccaaaactcggtgattggcacaagcgtaggccaccttctgtttacacctccacttgttatagttcacgacgtacagaaaaaccttcaggccraacttaaaatatgtaaggaggcagctttaggctaaacttgatttaacactgtgagctatatatgtggggcatatagagggttaaggtttactaacctttagtttcctcttgccttcctgaagggccaaatactgtaatacgtgcagttccctccaataggaacgtacttcttcattctcttttcctggcaaacacattcttcaaggtccagttctgtgaagatccttctgcctgttttttaaaatttatttttatttgtttgtttatggtcacatacgtctcttcctggtctggactcatccaatccatttgtcacagtaaagcttctggggtaggggaggtggttattctaatgtacatccaatcaagccactct

SEQ ID NO: 25055 - DNA, 565 bp, Homo sapiens
tgtacatatatgtatatatgttatatatacacatatayatatatttgttcttttttttttttttttaagcagagatgaggtttcaccatgttggccaggctggtgttgaactcctgacctcaagtgatccgcccacttcagcctcccaagtgctcgggttataggcatgagccactgtgcccggcccacctgataaagatttaagaatatgcattcaacattagcacagggcctgaaaatgtgaaaaaatgaaacttatcacaaactataattattttataccacctgacatttatcacaaacttcaactcttttatgcatttagtttttgtcagccccctagcttataatgtaagctccatgagaaaaataccttgtctttttgcctcaatagttccagcctcttcagcctctgatatctgataggtactcaatgaacgtgaaaaagattcatatcctgggaccttaagtttactggtactactatttaccttaaaaaggcagcaagagtctctctgcacaaatgtgtaatacaattactaactgtatgcaaagtctccacata

SEQ ID NO: 25056 - DNA, 629 bp, Homo sapiens
atccaatgctagagacctccaaaccagaatcatactggagttacggggacaaggggagcatcctgttccagaaaggcgaggggcagggttttacagatggctgaagaaccgcctgggctaagttggagccactgtggttacagtgcattcgtctccacttattttttatttattattattttatttatttatttatttatttatttttgagatgaagtctccctctgtcgcccaggctggagtgcagtggcggatctyggctcactacaagctccgcctcccaggttcacgccattctcctgcctcagcctcccgagtagctgggactacaggcggccgccaccacgcctggctaatttttttgtattttagtagagacggggttttattgtgttagccaggatcgtctcgatctcctgacctcgtgacctgcccacctcggcctcccacagtgctgggattacaggcgtgagccaccgcgcctggcctattattattattattattattattattattattattattgagaaggagtctcactctgttgcccaggttggagtgctgtggcactatcttggctcattgcaaccttcatctcccgggttcaagcaattctcctgcctcag

SEQ ID NO: 25057 - DNA, 578 bp, Homo sapiens
ttagggtgtcaaggatcctggttggctttgaagccaggcaaacctgagtgtgaattctccctttcagctacatgaccttgggcaagccctctccccatgaatctcagtcaccccatctgtaaaatggtcagagtatctacttcctgacctcgctagaaatcgaggtaccactggcaagtgtcaggcccacaggaggggctcacaagggccagctccctgtccagcctcctcaaagcagcctctttctccttctccagggtcagggccactgccctsagtgtggacctgctcttgtccttgcagctcagcccttgtaccacccaaccccaagccatgctcagtgctgggtgatgtaattgtcctggaggaggggcactgatccagccacgcactcacccccatctgagccacgttagaagcactgcccataggggtccttaaagaagtgacctagagtctctaattagcaccaaactcccattttcaccctaatgagcttccagcaccacaccaacccaccacattgcagtgtgagaggagacctttggatgctgtcggtccaagccctttccccatgc

SEQ ID NO: 25058 - DNA, 577 bp, Homo sapiens
gaaggcagtttacacccaggtctgtctacttttacaatttatttggcccagtgtcctgcctgtgccaccctctgccatgtgcccccttgtccagaggccctggagctcaggtcaggggctcattcaagcctgccgcgtggggctgggccagaacatccctcagcaaagccatctttacacaagctcaaagaggccccgacccagatcttgagcggatctgggatctccgtgtccccrtggctttcctgacatcttgaggtttcagtatctggacatgagcaaaagtgtcatctctctacctgcctaaagggaaagtctccattcaactgaagaatcttctcttctctcttcacttgattataaagaacacacttctgttaacttcaatatttgccttagccccacactctatttaaaagccaaacatggtgccgggtgcagtggctcatgcctataatcccagcacttcaggaggccaaggcaggaggatcacttgagaccaggagcccaagaccagcctgagcaacacggcgagaccccatctctacaaaaaattatttaaaattgaccaggctcg

SEQ ID NO: 25059 - DNA, 577 bp, Homo sapiens
gaaggcagtttacacccaggtctgtctacttttacaatttatttggcccagtgtcctgcctgtgccaccctctgccatgtgcccccttgtccagaggccctggagctcaggtcaggggctcattcaagcctgccgcgtggggctgggccagaacatccctcagcaaagccatctttacacaagctcaaagaggccccgacccagatcttgagcggatctgggatctccgtgtccccatggctttcctgacatcttgaggtttcagtatctggacatgagcaaaagtgtcatctctctacctgcctaaagggaaagtctccattcaactgaagaatcttctyttctctcttcacttgattataaagaacacacttctgttaacttcaatatttgccttagccccacactctatttaaaagccaaacatggtgccgggtgcagtggctcatgcctataatcccagcacttcaggaggccaaggcaggaggatcacttgagaccaggagcccaagaccagcctgagcaacacggcgagaccccatctctacaaaaaattatttaaaattgaccaggctcg

SEQ ID NO: 25060 - DNA, 1792 bp, Homo sapiens
gcgttcggggcgtggccgggagcacgttggctccgccccctggcggctgcctcagcggcggcggcggcgcaggctcagagcagaccccgcccggcgaggaggagggagggtgagttagggggagacccggcccccaaggggcgggcgccgggcagggccccgcgggcggccgagggttgggcccggctcccagcccctcgccgtcctccggctgacagggggaggagcccgccgggagggccggggtctcgggctggggagccgggacgggagagcagcgcagccgggtgcaccgcggccgcgccccgggagggctgttcgggccagcgcccgccggctgctccgcgctgacagcgccgggctggggcggggcggggggctttgcaggccgccagtgtcgacatgctgctggaggaggttcgcgccggcgaccggctgagtggggcggcggcccggggcgacgtgcaggaggtgcgccgccttctgcaccgsgagctggtgcatcccgacgccctcaaccgcttcggcaagacggcgctgcaggtgaggccgggccggtccaggttggggcggggcggctaagcgggatgaggatcgagaccccagagctcctctctggtctcctggccctggtggtgacccactgggaaccggtccttcttctctaggctttcattgttcccccacagtcccccttcgaaggtgggtggtgggtgaggctaggttgtggggggaggggagagctttttagcatcttctctgggaggattcctggttctctgagtgccggggattcactttccctggggaggttcttattccgtgggtgcgggttcagctcctttggatgccgtttccatggggacggctcacgtttcttggggcttctatggggagatccgatctctggaaggagaggtcctgtctctaggggttcctcattttgtagggggctctctgagacaaatctggttacttgggggtggggtcttcattcctaaaggttatgcggatccttgatatagtatgggggccccaatggaggaacaatgtcagattgcaagacatccctatattccctgggagacattttacagggaagtctcgtttctcttttattattacttttggaatcccgcttcttgaaaggagctctcaggtactctgaggtgacatcaccattatgtaggaggaggctatttcctggagaaggggttcgctttcctttgacatcttttttcccttatgaggactatcaattctttgggggtagttctccatctctgggggcccatttcctggaggggattttctgtttcctggtgattgcccatatctgggggcgtctttggtcccttgggggagagtcttaggttccttgaaagtttccatggggggctgttctctgggttggggggtctcattcttaagggagtgaccagcttttggggggggtccctattcccagaagaactttcctgggggcttatgcagcttctccgttcactagaggacccctcctctagcatttcctgtttctgggagatgcctctttctggatgacccttctctttccagtgaccccttttgtggaacctcctcccttgaggacctcctgatcctctgtccctcacacaggtcatgatgtttggcagcaccgccatcgccctggagctgctgaagcaaggtgccagccccaatgtccaggacacctccggtaccagtccagtccatgacgcagcccgcactggattcctggacaccctgaaggtcctagtggagcacggggctg

SEQ ID NO: 25061 - DNA, 554 bp, Homo sapiens
gtctccagtctctgacttgttggtttttcaggggatgtgcrgtttacctaggaccaggcctccctcccacgattcagagttatgaattctcatcttgacctattccttccttcggtttgccagggggtgtccctatccctgagatagtcctggctcatgccctggcatcacactgtctccagcaagttgaggtttgcagggacaaacaggaaagctggtgaccagacctgctgtccagggtgaggacagtgtgtcacccaccctctgagaggcaggcagtgccaggacccagccatgggagcccatccccctgactctgtagagagcggtcacgggggccctccctccccatgtcacctccttgccactcctatatccctgcccgtcttgaagcatctggagccatttctctgtgcctctcatctcctgacgtctttgctgtcaactatgaccagaagttagcggagctaccaaggcttcctgaagcagcctttggatgctgtatcctgggctccgaggccctgacgggactgaaccacaaaaagaaccaggaa

SEQ ID NO: 25062 - DNA, 1140 bp, Homo sapiens
ctatctggcgcggtcaccatcaccgcacatccgcccagcatccccttcccttctgcacgagtaattaagaaacacctgtgtttctccatcagactgcacgttgggggagagcttccttgcgtcgtgcaggggcccacggtgctcctgagcccattggggcagcggacggcctccttcctgagcctccaagtgggggtagcgggggaaaaggcctcccaggctccagcaccactaaacctgccttaaaaatggctgaagcccccaccgaactttgcaaccagaatgagctcctcgaggtgccgtcttgccagcactctggccgatgccagctttctcacaaacgaacagcttgtatccccatgaaaatcaatggatggaacaaattgtattaaattatgtaaaatgatactaaagagcacattctaccagtgaaaagaaaaaaaaaataacccccagaaaatcttattttaataaatctggcaaaaatatagaagataattaggaaggggaaaaaattgctaaatttttatgacacttaaagacgcatcccctggccatcggcagagacgtgggatttatcccctcataggtcagacacgcataattcttgtgtgtgtctgacacctgtgagttatttatcatccccgtgctctggccggagccgtctcctgcccggctccttgccatagagacagactcagccggtagcagaatcaagcaggcattttttggaaccaaatgccctgcccttttacatggatgtttttttcttggtaaataactgtgattagcattgaacttacaatataacctcttgcccacrtgtgtggaaaaaaatcattttaaaatattttagccactgccaccgtttcaattctatagggcagctaccatttttttttaatcaaggatgtcctgagacatgggaatgaataggtcaagaggcctttctcagcccccatgcattcagccctcagctccaacccccaaagggcatgtcattcaccaacacagagtccatggcatgcctacatggcataaaggagccagaacatggaagcaggtgtatccaggttactgtttctgtccagaaacggtttgaactgacttgggctggggagctccctgaatgagggatcc

SEQ ID NO: 25063 - DNA, 1084 bp, Homo sapiens
agcaaccaagagtttaactccaagcacagcagaggggccccaggcccctgctccaactgtgctgcctcctgccactctgattgggggtggcacccttcaggttggtgagtgtccctacaggttgtcccacagctgcagacaccctggccacacacctctcagactccagctccacggattggggarggtcctgctggagtctgcttgcatttcttctcgaagctcaaacgcctgctcctcccttcctggcctcctccctcccttccttacccctgacccaattaaagaactcacctaccgggaagcactatatttatactttttttttttttttttcatttttgagacagagtctcgctctgttgcccaggctgcagcgcagtggctcaatctcggctcattgcaaactctgcctcccgcttcaagtgattctcctgcctcagcctcccgagtagctggaattataggcatgtaccactacacccagctaatttttgtatttttagtagaaatgggttttcaccattttggtcaggctggtctcaaactcctgacctcaagtgatccacccacctcagcctcccaaaatgcggggattacaggcatgaaccactgcacccagcccatactattatattggctattataattattaatcataatattaatattactttgggaggccgaggcaggcagatcacttgacatcaggagtcaagaccagcctgggcaacatggtgaaacaccatctgtactaaaaatacaaaacattagctgggcatggtggcgtgtgcctgtaatcccagttactcaaaaggctgaggcaggagaattgcttgaacctgggaggcagaggttgcagtgagctgagatcctaccactgcactccagcctggatgacagagtgagattccgtctaaaaaaaaaatttgttataaatattaatagttagacatttccattttgtgaccacattctctgaattatcctcatgtttagcattttatttatttattatatcacccagcctggaatgcagtgatgccatttcagctcactgcaacctccgtctcctgggctcaag

SEQ ID NO: 25064 - DNA, 1084 bp, Homo sapiens
agcaaccaagagtttaactccaagcacagcagaggggccccaggcccctgctccaactgtgctgcctcctgccactctgattgggggtggcacccttcaggttggtgagtgtccctacaggttgtcccacagctgcagacaccctggccacacacctctcagactccagctccacggattggggaaggkcctgctggagtctgcttgcatttcttctcgaagctcaaacgcctgctcctcccttcctggcctcctccctcccttccttacccctgacccaattaaagaactcacctaccgggaagcactatatttatactttttttttttttttttcatttttgagacagagtctcgctctgttgcccaggctgcagcgcagtggctcaatctcggctcattgcaaactctgcctcccgcttcaagtgattctcctgcctcagcctcccgagtagctggaattataggcatgtaccactacacccagctaatttttgtatttttagtagaaatgggttttcaccattttggtcaggctggtctcaaactcctgacctcaagtgatccacccacctcagcctcccaaaatgcggggattacaggcatgaaccactgcacccagcccatactattatattggctattataattattaatcataatattaatattactttgggaggccgaggcaggcagatcacttgacatcaggagtcaagaccagcctgggcaacatggtgaaacaccatctgtactaaaaatacaaaacattagctgggcatggtggcgtgtgcctgtaatcccagttactcaaaaggctgaggcaggagaattgcttgaacctgggaggcagaggttgcagtgagctgagatcctaccactgcactccagcctggatgacagagtgagattccgtctaaaaaaaaaatttgttataaatattaatagttagacatttccattttgtgaccacattctctgaattatcctcatgtttagcattttatttatttattatatcacccagcctggaatgcagtgatgccatttcagctcactgcaacctccgtctcctgggctcaag

SEQ ID NO: 25065 - DNA, 1084 bp, Homo sapiens
agcaaccaagagtttaactccaagcacagcagaggggccccaggcccctgctccaactgtgctgcctcctgccactctgattgggggtggcacccttcaggttggtgagtgtccctacaggttgtcccacagctgcagacaccctggccacacacctctcagactccagctccacggattggggaaggtcctgctggagtctgcttgcatttcttctcgaagctcaaacgcctgctcctcccttcctggcctyctccctcccttccttacccctgacccaattaaagaactcacctaccgggaagcactatatttatactttttttttttttttttcatttttgagacagagtctcgctctgttgcccaggctgcagcgcagtggctcaatctcggctcattgcaaactctgcctcccgcttcaagtgattctcctgcctcagcctcccgagtagctggaattataggcatgtaccactacacccagctaatttttgtatttttagtagaaatgggttttcaccattttggtcaggctggtctcaaactcctgacctcaagtgatccacccacctcagcctcccaaaatgcggggattacaggcatgaaccactgcacccagcccatactattatattggctattataattattaatcataatattaatattactttgggaggccgaggcaggcagatcacttgacatcaggagtcaagaccagcctgggcaacatggtgaaacaccatctgtactaaaaatacaaaacattagctgggcatggtggcgtgtgcctgtaatcccagttactcaaaaggctgaggcaggagaattgcttgaacctgggaggcagaggttgcagtgagctgagatcctaccactgcactccagcctggatgacagagtgagattccgtctaaaaaaaaaatttgttataaatattaatagttagacatttccattttgtgaccacattctctgaattatcctcatgtttagcattttatttatttattatatcacccagcctggaatgcagtgatgccatttcagctcactgcaacctccgtctcctgggctcaag

SEQ ID NO: 25066 - DNA, 2514 bp, Homo sapiens
tgtggctttaattttattccatttcaaatgttttctgttacctttatcatgttaatctaagagaaactatctacgtaactgtttatgcattcaagaaatactcaaggtgtttaaagttcaatgttgtaatacagtataataggatcttctaaaattagcagttccttattaataaattcattgttttcaaggcttttcaattatgaaaacaaataattaggtatgctttctaattataatttcaattttaggagggtacccactggtctccatggtatttctgaaatggatagtgtaaaactgggccaaccagaatggtgcagatatgctgatttattagaatgagtttagctttcttagtagactaccggtatcccagaggctgatcattcactatggcttacaaaatgtttctccataatgccagtgagcaccttcgaccgtgttgtctttttcctctcattgatgtggtcatgttgtggttttttctgtcaccttaatgctatctcaaatgagaagtgattatttcttgcatgaatgagacccccccaccctttattttcttgtcatggaattcttctgtcttcctgtggaaagcaacatgtgggaagcagaaatgattacaatatacaaacatttcctgccatgtgaccaccaaaagcagcttacaacatggcccacctagaagtcacttacttccaggcaagcagcagtgttttactatgatgtgtctcttcctcttaaaagcacctctaattcagtttagccaaattgagataatctcccttttgatgaacaccaagtcaacatattagtaacctaatttcatgagtgatttctcaccacagtcacaccttttttacactcaagagaaaaggaatgcacagcagatgtgcaacagacctggaatccttgggatcatcttagaattttgcctacccacctgaatagacttttaaaatagtcttatagtttattttgttatctaagtaaacaaagatatcatctccaaataattaactgctttccaattttatgtattgcaaatattaatatcttttttgcttaaattattttttcatgtaccattctatacaatcttataacaatataaatgattcaatttttgatttttattaaaaatgagtgtttagatgtattaagttactgtgagaattaaaatccattaacacataaataatgttatggttagtgctcagtacaaattagctattaataagatattcatatgctgaattacattaatatgtgctttaacacaaatatttttacataacacacgtttatcaacaaataaatatatatttaattttttaaatgtggtaaatggaatacaattcagccttaaaagaagataaatccaaccatttgaaacaatatagataaatttggaagacactatgctagagggaataagtctgacacagaaagacaaacactgcatgatctcatttatatgcagaatctaataaagtttaactcaaaaaagtagaaagtgaaataatggtgactagaaggcaagggtctgagagggaaatagggatttgttaaagggtataacgtttcaaatagacagaggcaaatagggtttgagatctattgcacagcagcataactatagtaaacaataatgcattatttcaaaataggagtacatttcagatgtctcaccacaaaaaggttattgatacgttatgtaactttacttattttatatacatatatcagaacatcactttgtacactgtaatgtataaaactctgattttccaataaaaatactattttttttttcagaggagtctcactgtgttgcccaggctggagtgcagtggcgtgatctcagctcactgcaacctccgtctcacgagttgaagcaattctccctcctcagccttccgagtagctgggactacaggcgtgcgccaccacgcctggctaatttttgtacttatttatttttgagaaggagtttcactcttgttgcccaggctggagtacagtggtgtgaactkgctcactgcaacctccgcctcctggattcaagcgaatctcctgctcagcctcccgagtagctggcattacaggtgcccacgaccacacccagctaatttttggatttttggtagagacagggtttcaccacgttgaccagactgctctcgaactcctgaattcaggtgatctgcccatctgggcctcccaaagtgctgggattacaggcgtaagccactacacccagccagtacattttttttttttttaaagagataaacgttaagaaattgggtcagagaaaaagtgtttcttcatcttaaaatgccaggaaacatacataaattaaaacatatacatatatatatataaacacatatatataaattaaaacatatgtttcctggaattataagatgaagaaatatatatatatatatttatattttatatatatatatatttcaaatgcctttctcatttagtaatgtaggtagg

SEQ ID NO: 25067 - DNA, 615 bp, Homo sapiens
aaagggatctgcccaactcggcctcccaaagtgctaggattacaggcatgagccaccacacccggcccaaaaagtggctcttaaaatggccaggcagccgggtgcagtggctcatgtctgtaatcccagcactttgggaagccgaggtgggtggcacgaggtcaggagtttgagaccagcctggccaacatggcaaagccccgcctctactaaaaatacaaaaattagctgggcgtggtggcgggtgcctataatcccaactacttgggaggctgaggcaggagaatcacttgatcctggggggaaaagttgcagtgagctgagattgcgtcacttcattccagcctgggcaaaagagcaaaactctgtctcaaaatatatatatatatatatatatatatatatatatatatatayacaaaaataaaaaataaaaataaaaaataaaatggccaggtgacctcaccatcttggggaatctcttaacgccacccttccctcccccactgccaagggtaacagcagcagttcaggctgttttgtgtttggggtgggtcctgacacagctttctctaaatgtgatgtactagtgacatggtccagaacacatatcca

SEQ ID NO: 25068 - DNA, 1091 bp, Homo sapiens
tcccacatcagcctcccaaagcactggaattacaggtgtgagtcactgcgctcagctcagtgtaaatatttgaggcttgctgggcctgcctctgttgcaactgctcagttctgccactgttccatgaagggaaccacagacaacgcagaaatcggtgggctttggctgcattccaacaaaacttcatttatcgacactgagatttgaatttctttytttttttttttttttttgagacggagtctcactctgtcacccaggctggagtgcagtggtgcaatcttggcttactgaaacctccgcctcccgagtagctgggattacaggcacccaccaccatgcccggctaacttacgtattttgagtagaaacagggttttgccacgttggccaggctggtctggaactcttaaattccagcgattcgccagccttggcctcccgaagtgctgggattataggcatgagcctaggttccgttttttgtaactcctgacctcaggtgatccgcccgcctcggcctcccaaagtgctggaattacaggcgtgagccaccgtgcccagcctccaagtgcagtttttaagaaaccctgatctcactccccaccaagaacccaagtttggaaaccacttagtttgatgccctatatctggaggcaagaacctgagcatggcaagaggcagatgccagatgagaacccaggtgtggctcctgtctcacgtgcctgtgctggctgccccaacactgcgaggcggggactggccttttacacgacgaaatgagagcactgtgacaaagggtgttatacatggcaccacccagagcatttcccagtgccaggggaagatgaaaaggaaaggccagccccagctcccctacgccgcaggcaggtgcagtcggtcctgagtgcagggaggcccatggccactgtctgcagggctgggggagggcagcttgaggggcgttcgctcttttctgaattcatcactactggtgtccctgttgtcaccacaggaggtcctggaatcctgagtggctctgagtcagaaaatgcctcaagtcctttctgaagaggcagaaatcacaggat

SEQ ID NO: 25069 - DNA, 1091 bp, Homo sapiens
tcccacatcagcctcccaaagcactggaattacaggtgtgagtcactgcgctcagctcagtgtaaatatttgaggcttgctgggcctgcctctgttgcaactgctcagttctgccactgttccatgaagggaaccacagacaacgcagaaatcggtgggctttggctgcattccaacaaaacttcatttatcgacactgagatttgaatttctttctttttttttttttttttgagacggagtctcactctgtcacccaggctggagtgcagtggtgcaatcttggcttactgmaacctccgcctcccgagtagctgggattacaggcacccaccaccatgcccggctaacttacgtattttgagtagaaacagggttttgccacgttggccaggctggtctggaactcttaaattccagcgattcgccagccttggcctcccgaagtgctgggattataggcatgagcctaggttccgttttttgtaactcctgacctcaggtgatccgcccgcctcggcctcccaaagtgctggaattacaggcgtgagccaccgtgcccagcctccaagtgcagtttttaagaaaccctgatctcactccccaccaagaacccaagtttggaaaccacttagtttgatgccctatatctggaggcaagaacctgagcatggcaagaggcagatgccagatgagaacccaggtgtggctcctgtctcacgtgcctgtgctggctgccccaacactgcgaggcggggactggccttttacacgacgaaatgagagcactgtgacaaagggtgttatacatggcaccacccagagcatttcccagtgccaggggaagatgaaaaggaaaggccagccccagctcccctacgccgcaggcaggtgcagtcggtcctgagtgcagggaggcccatggccactgtctgcagggctgggggagggcagcttgaggggcgttcgctcttttctgaattcatcactactggtgtccctgttgtcaccacaggaggtcctggaatcctgagtggctctgagtcagaaaatgcctcaagtcctttctgaagaggcagaaatcacaggat

SEQ ID NO: 25070 - DNA, 1091 bp, Homo sapiens
tcccacatcagcctcccaaagcactggaattacaggtgtgagtcactgcgctcagctcagtgtaaatatttgaggcttgctgggcctgcctctgttgcaactgctcagttctgccactgttccatgaagggaaccacagacaacgcagaaatcggtgggctttggctgcattccaacaaaacttcatttatcgacactgagatttgaatttctttctttttttttttttttttgagacggagtctcactctgtcacccaggctggagtgcagtggtgcaatcttggcttactgaaacctccgcctcccgagtagctgggattacaggcacccaccaccatgcccggctaacttacgtattttgagtagaaacagggttttgccacgttggccaggctggtctggaactcttaaattccagcgattcgccagccttggcctcccgaagtgctgggattataggcrtgagcctaggttccgttttttgtaactcctgacctcaggtgatccgcccgcctcggcctcccaaagtgctggaattacaggcgtgagccaccgtgcccagcctccaagtgcagtttttaagaaaccctgatctcactccccaccaagaacccaagtttggaaaccacttagtttgatgccctatatctggaggcaagaacctgagcatggcaagaggcagatgccagatgagaacccaggtgtggctcctgtctcacgtgcctgtgctggctgccccaacactgcgaggcggggactggccttttacacgacgaaatgagagcactgtgacaaagggtgttatacatggcaccacccagagcatttcccagtgccaggggaagatgaaaaggaaaggccagccccagctcccctacgccgcaggcaggtgcagtcggtcctgagtgcagggaggcccatggccactgtctgcagggctgggggagggcagcttgaggggcgttcgctcttttctgaattcatcactactggtgtccctgttgtcaccacaggaggtcctggaatcctgagtggctctgagtcagaaaatgcctcaagtcctttctgaagaggcagaaatcacaggat

SEQ ID NO: 25071 - DNA, 1091 bp, Homo sapiens
tcccacatcagcctcccaaagcactggaattacaggtgtgagtcactgcgctcagctcagtgtaaatatttgaggcttgctgggcctgcctctgttgcaactgctcagttctgccactgttccatgaagggaaccacagacaacgcagaaatcggtgggctttggctgcattccaacaaaacttcatttatcgacactgagatttgaatttctttctttttttttttttttttgagacggagtctcactctgtcacccaggctggagtgcagtggtgcaatcttggcttactgaaacctccgcctcccgagtagctgggattacaggcacccaccaccatgcccggctaacttacgtattttgagtagaaacagggttttgccacgttggccaggctggtctggaactcttaaattccagcgattcgccagccttggcctcccgaagtgctgggattataggcatgagcctaggttccgttttttgtaactcctgacctcaggtgatccgcccgcctcggcctcccaaagtgctggaattacaggcgtgagccaccgtgcccagcctccaagtgcagtttttaagaaaccctgatctcactccccaccaagaacccaagtttggaaaccacttagtttgatgccctatatctggaggcaagaacctgagcatggcaagaggcagatgccagatgagaacccaggtgtggctcctgtctcacgtgcctgtgctggctgccccaacactgcgaggcggggactggccttttacacgacgaaatgagagcactgtgacaaarggtgttatacatggcaccacccagagcatttcccagtgccaggggaagatgaaaaggaaaggccagccccagctcccctacgccgcaggcaggtgcagtcggtcctgagtgcagggaggcccatggccactgtctgcagggctgggggagggcagcttgaggggcgttcgctcttttctgaattcatcactactggtgtccctgttgtcaccacaggaggtcctggaatcctgagtggctctgagtcagaaaatgcctcaagtcctttctgaagaggcagaaatcacaggat

SEQ ID NO: 25072 - DNA, 525 bp, Homo sapiens
ggtgaaacctcgtctctattaaaaatacaaaaattggctgggcgtggtggtgcaygcctgtagtcccagctgctagggaggctgaggcaggaggattgcttaaactcgtgagccagacgttgcagtgagccgagatcgcgccattgcactccagcctgggcaacagagtgagaccctgtctcaaaaataataataataaaatacaaagacaatgaacacagggtttacaagtccctttctacgtgttttccttatttttctagggctgcctagttatttatctgatcagggcctttgtcccatgacccccagaaccccaggaaagaacaccaatattcattaccctcaggtgaaaagactgttttccagggccatttgaaaatgcttttaaatctgatgtatttgttctgatcattctaaatacacacgttggtagacccacacaagagacaaatacaaaataaaactattaaaaatccagaaacagagaatatgtttaggagagaaaaaagtctcctaggaatt

SEQ ID NO: 25073 - DNA, 759 bp, Homo sapiens
caaggatacacaggagttaaataggtgagggggggtaatataggccaaagccctgtggtggcagaaatagaaggccagtggagctgtccgagtatgaagctgagtggtcagaccacaagggtcttttaggccagggatagtttggtcttccccgcaaaaacaactgaagcatcagacaggagagggaagtggtcaggtttcacttaatattcactcctttttttttgagacagtctttttttttttttttttgagacagagtctcgctgtcgcccaggctggagtgcaatggtgctatctcagctcactgcaggctccgctctgcccccctccccggttcacaccattctcctgcctcagcctcccgagtagctgggactacaggcrcccgccacctcacctggctaattttttgtattttaatagagatggggtttcaccgtgttagccaggacggtctcgatctcttgaccttgtgatctgtccacctcggcctcccaaagtgctgggattacaggcgttgagtcttgctctgtcacccaggctggagttcagtggcacaatctccatgcactacagcctcctcctcccgggctcaagcaattctcgtgcgtcagcctcccaagtagctgggactacatgcacacaccactaagcctggctaatttttgtatctttagtagagatggggtttcacccttttggccaggctggtctcgaactcgtgacctcaggtgatccacttgggattacaggcgt

SEQ ID NO: 25074 - DNA, 1203 bp, Homo sapiens
agggtataattaagagtgacagccccaggtctcgatgatggaaggaagtggggagggagggagatggagaaattagaaatgacagtcagttctgggtcctttctctgggtccttaacccagagaaaccatcagggaatctttggccgcagacagatggcaggaccaggaggcggctcagggccacccagcctcccagagatgtgggtgcacttcacagcgtcctggttcccaccagctgccagcaacatgcagcccagatgttccattctggggacatctgtgccgggccttccccagcatcaagtgagtttcatctgtggcagcagcatcgtctgggatgcctccgmtggagaggcaggaaggcagggctggagcaaaggaggcacccgtggtctctggccagaaggctgtcacggggagggggccacatggggacaggcagcagttcccagagtggccaacacggtgctggagatgggatctgtgatgcttgagtggtgagacgtggaaactcaaaacttaccatggaacgggagaaggctgggctcccacttcagacgcttggagttcacaagttcccatcacaagtccccacctccaagcccttaccccagccatgcccctcgctaggagagtcctgttcactttcacttccccttgaattcttcccttcacaagcatgtattgagcacctgctgtgtaccagtaaacacaagaagccaagaaaaaaaaaaaaaacctctgagtttatagggctcagtctggtgtgagggtcagacaaatgaataagctaatttattttctttttcctttttttggaacagagtcttgctctattgcccagagctgaagtgtagtggtgtgatctcagctcactgcaacttccgcctcccagattcaagctagtctcctgcctcagcgtcctgagtaattgggattacaggcgcccgccaccacacccggctaatttttgtatttttagtagagatgaggtttcacctgttggccaggctcgtctcaaactcctcatctcaagtgatccacccaccttggcctcccaaagtgctgagattacaggcgtgagccaccacacctggcctcttttcttttctgtttttgagacagagtcatgctctgtcgcccaggctgtagtgcagtggtgcaatcacggctcactgcagcctcagcctcctgggctcaag

SEQ ID NO: 25075 - DNA, 1203 bp, Homo sapiens
agggtataattaagagtgacagccccaggtctcgatgatggaaggaagtggggagggagggagatggagaaattagaaatgacagtcagttctgggtcctttctctgggtccttaacccagagaaaccatcagggaatctttggccgcagacagatggcaggaccaggaggcggctcagggccacccagcctcccagagatgtgggtgcacttcacagcgtcctggttcccaccagctgccagcaacatgcagcccagatgttccattctggggacatctgtgccgggccttccccagcatcaagtgagtttcatctgtggcagcagcatcgtctgggatgcctccgctggagaggcaggaaggcagggctggagcaaaggaggcacccgtggtctctggccagaaggctgtcacggggagggggccacatggggacaggcagcagttcccagagtggccaacacggtgctggagatgggatctgtgatgcttgagtggtgagacgtggaaactcaaaacttaccatggaacgggagaaggctgggctcccacttcagacgcttggagttcacaagttcccatcacaagtccccacctccaagcccttaccccagccatgcccctcgctaggagagtcctgttcactttcacttccccttgaattcttcccttcacaagcatgtattgagcacctgctgtgtaccagtaaacacaagaagccaagaaaaaaaaaaaaaacctctgagtttatagggctcagtctggtgtgagggtcagacaaatgaataagctaatttattttctttttcctttttttggaacagagtcttgctctattgcccagagctgaagtgtagtggtgtgatctcagctcactgcaacttccgcctcccagattcaagctagtctcctgcctcagcgtcctgagtaattgggattacaggcgcccgccaccacacccggctaatttttgtatttttagtagagatgaggtttcacctgttggccaggctsgtctcaaactcctcatctcaagtgatccacccaccttggcctcccaaagtgctgagattacaggcgtgagccaccacacctggcctcttttcttttctgtttttgagacagagtcatgctctgtcgcccaggctgtagtgcagtggtgcaatcacggctcactgcagcctcagcctcctgggctcaag

SEQ ID NO: 25076 - DNA, 1203 bp, Homo sapiens
agggtataattaagagtgacagccccaggtctcgatgatggaaggaagtggggagggagggagatggagaaattagaaatgacagtcagttctgggtcctttctctgggtccttaacccagagaaaccatcagggaatctttggccgcagacagatggcaggaccaggaggcggctcagggccacccagcctcccagagatgtgggtgcacttcacagcgtcctggttcccaccagctgccagcaacatgcagcccagatgttccattctggggacatctgtgccgggccttccccagcatcaagtgagtttcatctgtggcagcagcatcgtctgggatgcctccgctggagaggcaggaaggcagggctggagcaaaggaggcacccgtggtctctggccagaaggctgtcacggggagggggccacatggggacaggcagcagttcccagagtggccaacacggtgctggagatgggatctgtgatgcttgagtggtgagacgtggaaactcaaaacttaccatggaacgggagaaggctgggctcccacttcagacgcttggagttcacaagttcccatcacaagtccccacctccaagcccttaccccagccatgcccctcgctaggagagtcctgttcactttcacttccccttgaattcttcccttcacaagcatgtattgagcacctgctgtgtaccagtaaacacaagaagccaagaaaaaaaaaaaaaacctctgagtttatagggctcagtctggtgtgagggtcagacaaatgaataagctaatttattttctttttcctttttttggaacagagtcttgctctattgcccagagctgaagtgtagtggtgtgatctcagctcactgcaacttccgcctcccagattcaagctagtctcctgcctcagcgtcctgagtaattgggattacaggcgcccgccaccacacccggctaatttttgtatttttagtagagatgaggtttcacctgttggccaggctcgtctcraactcctcatctcaagtgatccacccaccttggcctcccaaagtgctgagattacaggcgtgagccaccacacctggcctcttttcttttctgtttttgagacagagtcatgctctgtcgcccaggctgtagtgcagtggtgcaatcacggctcactgcagcctcagcctcctgggctcaag

SEQ ID NO: 25077 - DNA, 1203 bp, Homo sapiens
agggtataattaagagtgacagccccaggtctcgatgatggaaggaagtggggagggagggagatggagaaattagaaatgacagtcagttctgggtcctttctctgggtccttaacccagagaaaccatcagggaatctttggccgcagacagatggcaggaccaggaggcggctcagggccacccagcctcccagagatgtgggtgcacttcacagcgtcctggttcccaccagctgccagcaacatgcagcccagatgttccattctggggacatctgtgccgggccttccccagcatcaagtgagtttcatctgtggcagcagcatcgtctgggatgcctccgctggagaggcaggaaggcagggctggagcaaaggaggcacccgtggtctctggccagaaggctgtcacggggagggggccacatggggacaggcagcagttcccagagtggccaacacggtgctggagatgggatctgtgatgcttgagtggtgagacgtggaaactcaaaacttaccatggaacgggagaaggctgggctcccacttcagacgcttggagttcacaagttcccatcacaagtccccacctccaagcccttaccccagccatgcccctcgctaggagagtcctgttcactttcacttccccttgaattcttcccttcacaagcatgtattgagcacctgctgtgtaccagtaaacacaagaagccaagaaaaaaaaaaaaaacctctgagtttatagggctcagtctggtgtgagggtcagacaaatgaataagctaatttattttctttttcctttttttggaacagagtcttgctctattgcccagagctgaagtgtagtggtgtgatctcagctcactgcaacttccgcctcccagattcaagctagtctcctgcctcagcgtcctgagtaattgggattacaggcgcccgccaccacacccggctaatttttgtatttttagtagagatgaggtttcacctgttggccaggctcgtctcaaactcctcatctcaagtgatccrcccaccttggcctcccaaagtgctgagattacaggcgtgagccaccacacctggcctcttttcttttctgtttttgagacagagtcatgctctgtcgcccaggctgtagtgcagtggtgcaatcacggctcactgcagcctcagcctcctgggctcaag

SEQ ID NO: 25078 - DNA, 557 bp, Homo sapiens
gaatacatgygtagcttatagctgtgcaagaaaaccataagggttttggttaaattacctgttgttatatgttataaagtagacataaaattggccaaaatagattaaaattctacaaacatggagtcaagtttctcttgactccagataaacttggaggcttaggaaagacagacctggaaaaaacccagtaaaaggctaatcagaagctcagaggaaattgcaaccatttgccctttatctacctatgacctggaagctcccgccccacttcgcgttgtccttttctgaacaatgtgcatcttacatatagtgatggatgtctcctgtctccctaaaatgtataaaaccaacatgtgccccaacaaccttgggcacgcattgtcacaacctcctgacactctgacatctcagatactttgggctcaaattagtaatttcaggtagaaattaaaattcttattaaaatagaaacaaacaaaaggactaaacagagaaaaactaataaaagtgtgctcaagcctgggaacagtggctcacacctataatcccagcac

SEQ ID NO: 25079 - DNA, 497 bp, Homo sapiens
aaaaattagccgggcgtggtggtgtgcgcctgtaatctatcccagctactcgggaggctgaggcaggagaatcgcttgaacctgggaggtggaggttgcagtgagccaagatcacgccacagcactccagcctggacgacagggcaagactccgtctcaaaataaataaataaataaataaccatcgccacgattaacaaaaacaacaacaacaaaaaaaaaaacaacaaaaamcaaacaaacaaaaaacccactgcctttctatttaaagaatgaggaaagtaggtcccgcagaggttcagtgacttcttcaagatctctaagcttgtaagaggcaaaattctgggtctttttacttggcctctcctgagtggtatggggtctagagggaggagagaagaagaggaaataagagggactctagtgcccaaactccagagaactgcccctcagggtccttggggaattgttccattgtcagagggaagtgggttacc

SEQ ID NO: 25080 - DNA, 830 bp, Homo sapiens
ggatcccagtgatcttagaaaaaacagctccttccttatcacagtttgcgagcagcaggcgcccacagtgtgcccagaggaggagcccagggtggtagctgtgttggaaggaaggaccacacaacttatcttaatgtcccagccccaaggaactagcacatatatcttcaggttacggaaaataaaaagcaatataaatttccggagtaataaaagtgaaatagtttacagtgctttatgccattgcatgggattcttcctgcattgttctaaagaatttcagtttgaggaacatttgtagggcacagaggaagtgccccagctgacaggcacttagggcgagacactcactaagttccaaaggtgggttcagctgggtgcagcggcttacacctgtaatcccagcactttgggaagctgaggtgggtggatcacctgaggtcaggagttcgagaacagcctggccaacatggtgaaaccctgcctctactaaaatacaaaaaaaaaaaaaaaaaaaaaatagctgggcatggtggcaggtgcctgtaatcccagctacttggtaggctgaggcaggaaaatctcttgaacctgagaggcggaggttgcagtgagccgagatggtgccactgcactccagccaaggtgacagagcaagactctctcaaacaaaacaaaacatatatatttaaaaatgtatattttaagtgaaatatwtaaataaaaatataaaaatatataattactttatataggtatttatttatatattatttctacatacattatatatagacacttcttttaaaaattactctgatcctccaaat

SEQ ID NO: 25081 - DNA, 670 bp, Homo sapiens
aggtgttagagggcagtgtcctggcctaggctcagatatatggggctgggggaaaaggatgggttggagaaatgatgtttacaggcagaaaggatgaggatttggtgcctgtcggtaattggaggaggccatcacaggtctaggggaagacactgaggtcagtttgggacacagtgagtatgaaagggctcagaggccatctaggggaggcatccaggatgctgctggtgcatggaggtcttgagttctggaaaaaagtgggactctatagacagatgaggacacgtgtcatctctagagacaggaactgaggtcatggaaagtaaaatggacagggagagagkgcatggagggagaacaaagtggccctggactgagccctggtaattgatgtcagatttgaaggggttaacagtaagaggagcttgaagaggagctggtggagttttgagaaaaaccaggagagcatgatacggcagaagccaagagaggagcatttctccagggagggcatggttggggtgccagatgctgctgggatggtagggaatacagaatggccacagaattagcaacaggggtggccagtgatcttcgtgagcagtgtggactagaaacagagatgggagtcactgtcacagagatgtccaccaccgccaagggagaggac

SEQ ID NO: 25082 - DNA, 626 bp, Homo sapiens
tgggagtaggtcagcccacctgctgtcctcaaccttcaattcgtgtttgcttccccactcgtgctccagggaccagcgagaagaagaactgggcgagtattacatgaagaaatacgccaagtcatctgtgggagagacgtaagggcatggtgggggcaggtgggggcagggagcaggtggtccctaagygggaaggggcggggatctgacagagcttcaccccttcctgactgccctcctcccttcagggtgtatggaggatctgatgagctctcagacgacatcacccagcagcagctgctcccaggagtcaagtaagggggttgggatggtgggggccgtgctggggtgcgaatcttgtatggggtgatggtgcctagacaggtggctccctgaaataagtcagggcagagtcacacaggcagtgtggtggatggcaggggtagggagggcaaggtggcactttctctttcctcttgctcctgggtagaagcgtggggaagtcagtgagtgtgagggaacctggatgtgaaaccagaggaagggggtggccctgggggttcgtctgtttgttactgaagatccagcttcactgaaggccttccttttcctctgctgcttaggga

SEQ ID NO: 25083 - DNA, 578 bp, Homo sapiens
gtattcccagctacttgggaggctgaagcaggagaatcgcttgaacctgggaggtggaggttgccgtgagccgagattgcaccaactgcactccagccagggtgacagagcaaaactctgtctcaaaaaaccaaaaaaaaccaacaacaacaacaamaaaaaacaccaaaaaacatttcagacgttcaagattatataccaagaacaccaatgtccccatcagccagctgaggaaacaggaaacaatatgtactagataggacccacttcagcagcaccctaaatccattcccccagaagtaaccaggagggccgagttccttgtgtctttccctttcttgaatttgtatttttactaccttggtatttggttttaaagtttacataaacaggatctgatttttcttccactcaatttaagggaggttcgtggtgtcttatctatagcctctaattcgtttctcactcaagccctgtacagccagatactgctgttctttggctgagcctcaggtaaaatggttggctctccagtcctttatagaaaatcatggcaggaaggaatgggagagaaaaca

SEQ ID NO: 25084 - DNA, 810 bp, Homo sapiens
cttcccttatttcttctacatttattattcggaattcttctgtaaggaagaattgctgcttctccctcatttatttatgtatycagttacgcatttaatcaggatggacctatggatatttacattatgtcttgggctataattcaataccatagttatttattttgctcaagttgtcctaactttggccattcggagccccttcggtttgcttcctgtagccttttgaaatacacatacacatacatatatgtttttgttgttgctgttgttgtttttagagacagtctcactttgctgctcaggctgtagtgcagtggcacaatcatagctcaccgcagtctcaaactcttgggctccagttatcctcctgccccagcttcccaaatagctggctattttttattttattttttgtacagacagagtctggctatgttgcccaggctgtccgatctcctggctatttaatactttcttactgtctagtggccacaggatactccaggctcttcctctattttctctgccccatccctgaaccagctggctccctatggttactcccttctgttcattttccccatgatgcacggtctctgtattgccacatctcagaggcagagaccatttctgttggaggagatgctgggagagcatagacccttcatcatgctggggagaggtcttgggaaggccagaggcatgactgtcgaggcgctgctgagactgaagcattaagggaccacaaattccaaagccccgagaagggatttcagagagtcgaccctgcgtccacagttccggatc

SEQ ID NO: 25085 - DNA, 576 bp, Homo sapiens
agatataacttgctacaaagaagcttcctgcaaaagctcactagtaaggcatgtatgcatctctagagtctccagatggtcctggatgtgtgaattctgcccattgctggccgtgaacattcaagggtacggcatgatgtcacrgctgagtcacaggccgaggagttcttgagaccagagctgcattccaccctgccacttgcagactctgtagcttatgcaaattacttagcgtttctgaaaatggggatactaatttcgactctgcgtggttggtgttcagatgacagacaatgtgcaggaggtgccagcattacctggccctttaagacgctatagattacgtctattatactattatccccaggactgccacttgcaccactgggcctctttccatagggcaggtcaaggccctggtgaggaagaccagagcaatctaagaaagcatgaatttttcctctgagagacatagaaatgaacttctaaaagtggaaaaaatgtttcggtccacggcactatcccaggctctttggaactccaacagaccagctcacaaacaaaaaaaaaccctaa

SEQ ID NO: 25086 - DNA, 576 bp, Homo sapiens
agatataacttgctacaaagaagcttcctgcaaaagctcactagtaaggcatgtatgcatctctagagtctccagatggtcctggatgtgtgaattctgcccattgctggccgtgaacattcaagggtacggcatgatgtcacagctgagtcacaggccgaggagttcttgagaccagagctgcattccaccctgccacttgcagactctgtagcttatgcaaattacttagcgtttctgaaaatggggatactaatttcgactctgcgtggttggtgttcagatgacagacaatgtgcaggaggtgccagcattacctggccctttaagacsctatagattacgtctattatactattatccccaggactgccacttgcaccactgggcctctttccatagggcaggtcaaggccctggtgaggaagaccagagcaatctaagaaagcatgaatttttcctctgagagacatagaaatgaacttctaaaagtggaaaaaatgtttcggtccacggcactatcccaggctctttggaactccaacagaccagctcacaaacaaaaaaaaaccctaa

SEQ ID NO: 25087 - DNA, 576 bp, Homo sapiens
agatataacttgctacaaagaagcttcctgcaaaagctcactagtaaggcatgtatgcatctctagagtctccagatggtcctggatgtgtgaattctgcccattgctggccgtgaacattcaagggtacggcatgatgtcacagctgagtcacaggccgaggagttcttgagaccagagctgcattccaccctgccacttgcagactctgtagcttatgcaaattacttagcgtttctgaaaatggggatactaatttcgactctgcgtggttggtgttcagatgacagacaatgtgcaggaggtgccagcattacctggccctttaagacgctatagattacgtctattatactrttatccccaggactgccacttgcaccactgggcctctttccatagggcaggtcaaggccctggtgaggaagaccagagcaatctaagaaagcatgaatttttcctctgagagacatagaaatgaacttctaaaagtggaaaaaatgtttcggtccacggcactatcccaggctctttggaactccaacagaccagctcacaaacaaaaaaaaaccctaa

SEQ ID NO: 25088 - DNA, 542 bp, Homo sapiens
tatattttaacatcagaaaaaatatcaataaagcactgattatggtatatccatgccacaaaatatgatgcaacagttaaaaagagcaaagtaggccgggcacggtggctcaagcctgtaatcccagcactttgggaggccaaggtgggtggatcacctgaggtcaggagttcgagaccagcctggccaacatcatgaaaccccgtctctactaaaaatacaaaaaattaggcatgcgtggcgtcatgcacctgtaatcccagctacttgggaggctgaggcaggagaatcgcttgaacccaggagggagaygttgcagtaagcagagattgcgccactgtattctagcttgggtaacaagtgaaactccgtcaacaaaacaaaacaaacaaaacaaacaatcaaacaaacaaaaaacaaggagcaaagcagtacattgggctaatgtactgctatggaaaaatgtccaagatacagtattaagttaaaaaaaaaaaaaaagccttctgacttaatttcgtattaaaagactagactgccga

SEQ ID NO: 25089 - DNA, 775 bp, Homo sapiens
cgggtcgccctggcactgggagtggccttattgcatgggttgtctcccttctcccaaggccagacagtgagctccccggggcatgaggactgacttcgtgcctgtgggagtgcggggggcggtgggagaagccccccggagcttggccaccctccgcgagggtctccaccccgcaggtccgtggctatgggtcgccgtgggcggcgcggcggggggcgcggcgctgctggccgcgggggccggcctggccttctacgtgcagtccaccgcctgcaagaagggcgagtacaacgtgcaggaggccgagagctcaggcgaggccgtgtgtctgaacggagcgggcggcggcgctggcggggcggcaggcgcggagggcggacccsaggcggcggggggcgcggccgagtcgccggcggagggcgaggtcttcgccatacagctgacatcggcgtgagcccgctcccctctccccgcgggccgggggacgccccccagactcacacgggggcttatttattgctttatttatttacttattcatttatttatgtattcaactccaagggcgtcacccccattttctacccatcccctcaataaagtttttataaaggaactccctgtctccgcttctgtttctgcaaggtggaacaagcccagggttccagtcgtgacctcccgagttattcattcaaaaagcgatttttgagagggcctggggtggtggcttaggcctgtaatcccaggacttgtgggaggcccaggtgggaggatc

SEQ ID NO: 25090 - DNA, 1139 bp, Homo sapiens
gagcccagctgattcatggtacatcagacacatgacatccttcttctatatccatgtccccaactgtagctctgccagggaattccgagaaaccaggatggaggcttttgtgctaagatctgtcttttatccatttaaattacaatactggaataattatgtatgtgtaaaaactgtcaaaagtatacttaaatgatacctttgccgtgtactaaaattacttttcattatgacctatttgtacatcgtttgaactaaatatctcagcctagaaatgtaaacgtgttttgtttttgctctgcaggttaggtcagcagacgtctgaaacaaatacgattgcaagggtgaaagtgacatgatttacttaaatcaggcaatttctccatgaaagcattgaagcctcaactcataaagacactcttcagcagatgagctgtaaggttgtccagcatttgtcatattaggtgatttgaaaggaaagaacaattataaaaatgaatgtaattctctgttgaagaaaaaataatccagtttttgcagcagggggccacagattaaaaacagatttcacagcaattcggctgctataacattatacaattaaaacgyaagaagaaacagctctcgtgccaaagaagacagttgtgggaattagtttgtttggggacggggaggcaggttccccctgcagcatcaaaggttattttgtttcccctaggaacagcactgttgccataaacggtgctggtttgcttccaacccccatcttccccgcttttctgagctgctttcaattagcagggattattaaactggaaacattttaaactgctgccgaagcggctttccggccttatgagctgaggccttatgagccgagctagaggcgtcacaataaagctgattgattagggaggaatgtactgatagcaactaatgcccagtgtctttttctatgcgtttcacagtctactctttccccactgaactgtgtgtcttcatggggagtttgactttgcttctctctctggtgccttctggagcctggaggctctcaacttccatttcaactgcctgacctgggccagccatatctccatgacccatctcccacctggacccattgctagggtgggcgg

SEQ ID NO: 25091 - DNA, 1139 bp, Homo sapiens
gagcccagctgattcatggtacatcagacacatgacatccttcttctatatccatgtccccaactgtagctctgccagggaattccgagaaaccaggatggaggcttttgtgctaagatctgtcttttatccatttaaattacaatactggaataattatgtatgtgtaaaaactgtcaaaagtatacttaaatgatacctttgccgtgtactaaaattacttttcattatgacctatttgtacatcgtttgaactaaatatctcagcctagaaatgtaaacgtgttttgtttttgctctgcaggttaggtcagcagacgtctgaaacaaatacgattgcaagggtgaaagtgacatgatttacttaaatcaggcaatttctccatgaaagcattgaagcctcaactcataaagacactcttcagcagatgagctgtaaggttgtccagcatttgtcatattaggtgatttgaaaggaaagaacaattataaaaatgaatgtaattctctgttgaagaaaaaataatccagtttttgcagcagggggccacagattaaaaacagatttcacagcaattcggctgctataacattatacaattaaaacgtaagaagaaacagctctcgtgccaaagaagacagttgtgggaattagtttgtttggggacggggaggcaggttccccctgcagcatcaaaggttattttgtttcccctaggaacagcactgttgccataaacggtgctggtttgcttccaacccccatcttccccgcttttctragctgctttcaattagcagggattattaaactggaaacattttaaactgctgccgaagcggctttccggccttatgagctgaggccttatgagccgagctagaggcgtcacaataaagctgattgattagggaggaatgtactgatagcaactaatgcccagtgtctttttctatgcgtttcacagtctactctttccccactgaactgtgtgtcttcatggggagtttgactttgcttctctctctggtgccttctggagcctggaggctctcaacttccatttcaactgcctgacctgggccagccatatctccatgacccatctcccacctggacccattgctagggtgggcgg

SEQ ID NO: 25092 - DNA, 1139 bp, Homo sapiens
gagcccagctgattcatggtacatcagacacatgacatccttcttctatatccatgtccccaactgtagctctgccagggaattccgagaaaccaggatggaggcttttgtgctaagatctgtcttttatccatttaaattacaatactggaataattatgtatgtgtaaaaactgtcaaaagtatacttaaatgatacctttgccgtgtactaaaattacttttcattatgacctatttgtacatcgtttgaactaaatatctcagcctagaaatgtaaacgtgttttgtttttgctctgcaggttaggtcagcagacgtctgaaacaaatacgattgcaagggtgaaagtgacatgatttacttaaatcaggcaatttctccatgaaagcattgaagcctcaactcataaagacactcttcagcagatgagctgtaaggttgtccagcatttgtcatattaggtgatttgaaaggaaagaacaattataaaaatgaatgtaattctctgttgaagaaaaaataatccagtttttgcagcagggggccacagattaaaaacagatttcacagcaattcggctgctataacattatacaattaaaacgtaagaagaaacagctctcgtgccaaagaagacagttgtgggaattagtttgtttggggacggggaggcaggttccccctgcagcatcaaaggttattttgtttcccctaggaacagcactgttgccataaacggtgctggtttgcttccaacccccatcttccccgcttttctgagctgctttcaattagcagggattattaaactggaaacattttaaactgctgccgaagcggctttccggccttatgagctgaggccttatgagccgagctagargcgtcacaataaagctgattgattagggaggaatgtactgatagcaactaatgcccagtgtctttttctatgcgtttcacagtctactctttccccactgaactgtgtgtcttcatggggagtttgactttgcttctctctctggtgccttctggagcctggaggctctcaacttccatttcaactgcctgacctgggccagccatatctccatgacccatctcccacctggacccattgctagggtgggcgg

SEQ ID NO: 25093 - DNA, 762 bp, Homo sapiens
gtttttgcatctgccacagctctcctcactgccttcagtggcagcaggcaaggtccttcctggtggggggcaccactcacaccagagctctgtgctggaaatggagtgtattggctatagtagtaccactaatgagaactaccattctggggggtcggaggatgtagcagagccaagattccaaccctggggctggctccttcagagcctggctatggtagagtcgctgggtgtgggctgtctgcttggtgaccacagtggggaagacaaattacctgcctcctggaaacttactcttgcctcctgaggacacccttttggttaagaccagggaactaggatgctggtcccattgcaaagggactcccagagatctgggccttacctctctggaaattctactccgccaggaagcagagttttactggctttgaggtgacctggtgaggcccaggagagcatcattggaatgtcccattttaagggactacaatagcgtacatacccatctaatgttttattttttacaatttcctcttattaatgttgtatgtaatagaaatcagtgcccctcagaatagtgcatttgaatgccccttagaacctttcatttactgctgagcacrtgcctaggcatgtgacatcagctggccatttttttttttttttaaattttcccagacagggtctcactctgtcacctaggctggagtgcaatggcacaatcatagttcactgcagcttcacccttgtgggctcaag

SEQ ID NO: 25094 - DNA, 762 bp, Homo sapiens
gtttttgcatctgccacagctctcctcactgccttcagtggcagcaggcaaggtccttcctggtggggggcaccactcacaccagagctctgtgctggaaatggagtgtattggctatagtagtaccactaatgagaactaccattctggggggtcggaggatgtagcagagccaagattccaaccctggggctggctccttcagagcctggctatggtagagtcgctgggtgtgggctgtctgcttggtgaccacagtggggaagacaaattacctgcctcctggaaacttactcttgcctcctgaggacacccttttggttaagaccagggaactaggatgctggtcccattgcaaagggactcccagagatctgggccttacctctctggaaattctactccgccaggaagcagagttttactggctttgaggtgacctggtgaggcccaggagagcatcattggaatgtcccattttaagggactacaatagcgtacatacccatctaatgttttattttttacaatttcctcttattaatgttgtatgtaatagaaatcagtgcccctcagaatagtgcatttgaatgccccttagaacctttcatttactgctgagcacatgcctaggcatgtgacatsagctggccatttttttttttttttaaattttcccagacagggtctcactctgtcacctaggctggagtgcaatggcacaatcatagttcactgcagcttcacccttgtgggctcaag

SEQ ID NO: 25095 - DNA, 1132 bp, Homo sapiens
tttgtttaataggattgcagtagaaaccagccaggataaaagatgtcagagttcttggaaaaatgtacatgaaatttcaaaaattaaattccagcaggatatgtgagtgtgtgtatgtatgagtgtgatttgtgtgtattctaaggaagaggactaggtgatgtgtatttcagatgaggtagataatccactaccttctgtttttgatttaggttttggaaaccctgatccataaaaacatgctgctatgtatgttattcctgccacatccaccaaagccaggaaattcttttctttgtggaatccacttttccaatggaatttcctatatgattgaacactttgattatatatgtattttttttttgatggagtcttgcgctgttgcccaggctggagtgcagtggtgtgatctcagctcactgcaacctctacctcccgggttcaagcgattctccccactaagtctccagagtagcagggattacaggcacccactaccatgcctggataattttgggatttttaatagagacagggtttcaccgtgttggccaggcttgtctcaaactcttgacctcaggtgatccaccagccttgggctcccaaagtgctgggatttcaggcttgagcccctgcacctagccagattacatatgtatttttgattatgattttcttacagcatcctgaaactttgaacttagtgatttattcatgttgcctgcaatgccccctgtttagcactgcaatgctctggcagtgttatgggctatcccccaaaaattcataacagcatgtgactgcattgggagacagggtctttaaagaggtaagctgaaatgaggttactagggtggaccctaatccattataactggtgtctttataggaagagaaaatttggacacacagggagaaaaccacagggaggagatggccatctacaattccagaaaagcagcctcagaagaaaccaatctgcaaacatctttatctgcaactccctgcctccmaaatggtgagaaaattaatttctgctttttaagccaaccagactgcaggactttgttatggcagccccagaaaattaatacagacagcaaacggccagatgtcccacttgaaaaat

SEQ ID NO: 25096 - DNA, 521 bp, Homo sapiens
taaataaataaattaattaaataaacctgagactgggtttaatgtttgagcgatatttccaaggtcgtggcagaaactagatttgaatttaaggttcttctctgccatgtgatggaaaacctaactcaaactggcttaattaacgaagaaggaatttatttttacttatttatttatttttgagatggagtttcactcttgttgcccaggctggagtgcaatggcgtgatcttgrctcaccacaacctccgcctcccaggttcaagcgattcttgggcctcaccctcccgagcagctggaattataggcatgtgccaccacgcccggctaattttgtatttttagtagagacagggtttctccatgttggtcaggctggtctggaactcctgacctcaggtgatccaccctcctcggcctcccaaagtgctgggattacaggtgtgagccacggcgcccggcacgaagaaggaatttaacctggttgtggtggtgtgcacgtgtggtcccagctacctggg

SEQ ID NO: 25097 - DNA, 400 bp, Homo sapiens
aactggggtgtccatggcgggaggtgtacaggactaatgattgaggttgcagacctggggaaccctagaccaggtttcacagggccagggccacctactttgggaggtagggacccttagggaaaatccaggctgtggggaccctcagagatagttttctcagggtggatgtcagagaccctcggtataaggcagggacaggcgcgcctttgctctaatgtgctacatggtaaatgtttaagctcgcaggctgtaggttctcgttccagctactcactctgccactgtggcatgaaagcagccgtagactatgtaagtgaagaggtcaggytcctataagactttagaatacaagagcagcagcctagggggccatcatgagcggaacactgatgtgtgg

SEQ ID NO: 25098 - DNA, 400 bp, Homo sapiens
aactggggtgtccatggcgggaggtgtacaggactaatgattgaggttgcagacctggggaaccctagaccaggtttcacagggccagggccacctactttgggaggtagggacccttagggaaaatccaggctgtggggaccctcagagatagttttctcagggtggatgtcagagaccctcggtataaggcagggacaggcgcgcctttgctctaatgtgctacatggtaaatgtttaagctcgcaggctgtaggttctcgttccagctactcactctgccactgtggcatgaaagcagccgtagactatgtaagtgaagaggtcaggctcctataagactttagaatacaagagcagcagcctagggkgccatcatgagcggaacactgatgtgtgg

SEQ ID NO: 25099 - DNA, 400 bp, Homo sapiens
aactggggtgtccatggcgggaggtgtacaggactaatgattgaggttgcagacctggggaaccctagaccaggtttcacagggccagggccacctactttgggaggtagggacccttagggaaaatccaggctgtggggaccctcagagatagttttctcagggtggatgtcagagaccctcggtataaggcagggacaggcgcgcctttgctctaatgtgctacatggtaaatgtttaagctcgcaggctgtaggttctcgttccagctactcactctgccactgtggcatgaaagcagccgtagactatgtaagtgaagaggtcaggctcctataagactttagaatacaagagcagcagcctaggggkccatcatgagcggaacactgatgtgtgg

SEQ ID NO: 25100 - DNA, 521 bp, Homo sapiens
aactggggtgtccatggcgggaggtgtacaggactaatgattgaggttgcagacctggggaaccctagaccaggtttcacagggccagggccacctactttgggaggtagggacccttagggaaaatccaggctgtggggaccctcagagatagttttctcagggtggatgtcagagaccctcggtataaggcagggacaggcgcgcctttgctctaatgtgctacatggtaaatgtttaagctcgcaggctgtaggttctcgttccagctactcactctgccactgtggcatgaaagcagccgtagactatgtaagtgaagaggtcaggttcctataagactttagaatacaagagcagcagcctagggttccatcatgagcggaacactgatgtgtgggatcgggcttggggttcagacactagcaccaaagggcaggggagagaytgggatcccaggggcagggacagagagcagagttctgagtctcacgcacggagacctcaccaaggcaggacat

SEQ ID NO: 25101 - DNA, 1211 bp, Homo sapiens
tgcatacccacgccctcagctcagcctcctcacacccacttcccagaaccccacttgttccatctttccaggatttcctcttccctttccaaattcgcacccccttgcccttgcattctgcaagtctcccactcaacagcctcgccccctcccgtcgtggccctgaccccagtgtctagaccattccacatccccttgtctttgcctggctatagctgtccctgacattccagaacctggtccctggtttttcttcttttcagcctggcccctcaggtccctggaagtcaaggcctggccttccctgtgaaggagtcccgtccgcwtgttctcctggcccccttagttcccagcccggattctcttggattggtccctctcgtcacatctcaggctcaacctgaggcgcggggacccccagcttctgccagcccttggggagcccatctctggagatggaaccagactttggcctcaggtcccattttgccccagagttacgatttttttacttagagccattgttgtcaaccgaggggacgctgggtgatgtctggggacatctgtggttgtcacgaccacgggtgctcctggcatggagtgggtggaggccagggacgctgctcaattccctgtagtgcccaggacggccccaccccagagaacgatccggccctaatgtccacagtgtccaggggaagcgccctggggccacagtggtggtgtataaacccaaggcccaggctctggagggtgggagtggaaggccagaggctcctcatgcagtgaccgcgttttccgtgctgcttgggattttcccgggggaagggtcctgacgggcaccatcctgtagaatcgcctccatctttgctgcctggcacaggagccagcagccacaggaggctgccgagcccccaaagcgtggcctgtgcaaccggggggcaggattttcagcgctgcttgagggtaataaacgcaagtagccacgcgtgcctgcggctctcatagcggcttccgtggggtttccagggcagtctgcaccccaaagaccccactcctagagctcgagataccctgttcacactcttggcatctcctgcctggtcctgcagctcacccggcctccctccagccccccgggcaggtgtgatctggtggctgctacactgtccctgggcaggtgtgggccccctttctctccccaagaaccc

SEQ ID NO: 25102 - DNA, 1211 bp, Homo sapiens
tgcatacccacgccctcagctcagcctcctcacacccacttcccagaaccccacttgttccatctttccaggatttcctcttccctttccaaattcgcacccccttgcccttgcattctgcaagtctcccactcaacagcctcgccccctcccgtcgtggccctgaccccagtgtctagaccattccacatccccttgtctttgcctggctatagctgtccctgacattccagaacctggtccctggtttttcttcttttcagcctggcccctcaggtccctggaagtcaaggcctggccttccctgtgaaggagtcccgtccgcttgttctcctggcccccttagttcccagcccggattctcttggaytggtccctctcgtcacatctcaggctcaacctgaggcgcggggacccccagcttctgccagcccttggggagcccatctctggagatggaaccagactttggcctcaggtcccattttgccccagagttacgatttttttacttagagccattgttgtcaaccgaggggacgctgggtgatgtctggggacatctgtggttgtcacgaccacgggtgctcctggcatggagtgggtggaggccagggacgctgctcaattccctgtagtgcccaggacggccccaccccagagaacgatccggccctaatgtccacagtgtccaggggaagcgccctggggccacagtggtggtgtataaacccaaggcccaggctctggagggtgggagtggaaggccagaggctcctcatgcagtgaccgcgttttccgtgctgcttgggattttcccgggggaagggtcctgacgggcaccatcctgtagaatcgcctccatctttgctgcctggcacaggagccagcagccacaggaggctgccgagcccccaaagcgtggcctgtgcaaccggggggcaggattttcagcgctgcttgagggtaataaacgcaagtagccacgcgtgcctgcggctctcatagcggcttccgtggggtttccagggcagtctgcaccccaaagaccccactcctagagctcgagataccctgttcacactcttggcatctcctgcctggtcctgcagctcacccggcctccctccagccccccgggcaggtgtgatctggtggctgctacactgtccctgggcaggtgtgggccccctttctctccccaagaaccc

SEQ ID NO: 25103 - DNA, 765 bp, Homo sapiens
tcgtcgcggtgctgagacttgcaggggtgaagtggcagcaagtggggggtccgtgtgcagctcaggtgtgcggagcagggacccctgagctgcgtcttgttgggtggaggacgttttgctgagagaggagggaagagcagtcccaggaagcaaaaggcagcggcgaaaccagaagccctggcgagtttccagagcggtgaccgtggggagcgccaccgcagaagtgaataagcccgtgatggagcgacagccccaggctctcagcgacggccgtggccttccagggaagaccccgcctcgccccagagacaccatagcccaagctgctgagccttctgccaccccagcccctggatttctagaaagcttacgtgtccaaggcgcagtagggtggtcctagagcaggcgagcccgaggggcgctccatgctggtcttgtggctcaacacaggggtttaacctggggcccatcaacaggcttcagggragggccgtccccatctgggaccccctgtaacaggagttgaatccagcctgcccttggcctatttaagagttttgttggcacacagtcccacttgttggcttacctgttgtatatggctgcactcaccctgcctgcagttttacagctgagtggttgagacacagaccggaaatactcactctctggcctgttgtagaagaggtttgccgagccctggtctaggatcctgtgtagacttcggtgtggggtgggaagtgtgggtttctcccaggagaaggg

SEQ ID NO: 25104 - DNA, 908 bp, Homo sapiens
tggctgcgcggccagctggtaggcctcccgggggtggaggctgtgaccctctagaaggaccctgtgtatccatacaaaagacagaagtctcatggccaggacagctgtgtccctccctgatccgccctgggggctttccccagggctggcctggtcgtgccagggcgtatcacccagcaggcagggtcaccctggctggggctgctcctgcccgcttgactggcccgccaggatcgcagccctgagaagctctcatcaccgcgaaagtgtgtcacagggcaggctccaagtagcctgctcctccttcacctgggcatggaggtgtcaccagggcctgggacagctctgctggcctcttgtctaccgccccataggtctgccatgggagcgtgttcagatttatccaaaggaggtctcttgtaacagaaagagcagtggtgcctgcccctgccagggccactgagcagccaggcaggaagcaaaagtcagagggggcaccccgcrggttgccatacagggcctcactcccaccctggaggggacgctgctagccccatcttacagccctcgaagccaacgcagatagacacccacgctgcccagcctcagggtctcagcctattactgttattactctttatatagatggagcaaatctccacttcctccaaaggaagatgtccttgcttcagggtccctgcatccccaggcaggctgtgagtctccaaaaccaagacccagggctgtcctctgcctggtcccctccatgactgtgcagtgaaattcactccattctggtttttagctacttttttttttttgagacagggtctcgctctgtcacccacgctgcagtgcaatggcacagtgtgggctcactgcaagttccaccgctaccctagctcaag

SEQ ID NO: 25105 - DNA, 1091 bp, Homo sapiens
ttgaccccygaacttcactcctgtcttctgcaaagtgggaggaataagtgggccttctcagatcgaatgggtgaataatcggaacaggcttagcttgagcctgactcgtagccagcatttgccattgggagctcttgaatttggtttatttgtcttaatatagacagaagacattttgctgctgaaaaatggtaaaagaacagtaaaccctggcttgacttggaacatcattccagagtagtgtggaaacctccgttttgatgcttgctttttccttttcctcataggatggtccagcagtttggggtggattttgagaagaggatcgagggctcaggagatcaggtggacactctggagctctccgggggcgcccgaatcaatcgcatcttccacgagcggttcccatttgagctggtgaaggtagtgccccccggggctgggccctcccgtctctggtcaggcaccctcctgctggcctcaagccaggcctcctcccaggcaataaggtctcaagctcctacctctaggcctgaacttgtggtgggcagggtgtggcctggatgaggtgtccccatgggcttccttttctgacactcagctttgaggttttgggcagaacaatatgaaaacccctgtgtttttcctctgacaaaagccaatatacattctttgcaaaatacatagaaaatacagataaatttacatgagaagatgtccctagcatgtcattgaagaaggaaaaaataggcattggagccagcatgtgcaacatagcactgagctgatatatacaacatccttatgtatgaaactgaacatggatgtctgtctacaagtgtttctttgtatttgcaaggatgtttgcaaaaatgtcagccctgggtgctaggatttgggacttctttttccgtgtgtgtgtgtgtgtgtgtgtgtgtgtgtgtgtgatttgcttgaagttttatactgtttacaatgagcacatagcattttttattaaaaaaacaaacagttttttaaaatcagaggagcaagaccaaatgcagtggctcacgcctataatccgtgggaggccaagggggcctgatcac

SEQ ID NO: 25106 - DNA, 983 bp, Homo sapiens
aagagggaggagggaaacgaagacatgccaaggtgaggtcacagtaggagacccaagatctgaacctagatccctgtgaagccagagtcaccatcacctgtgtgacagcacaaagaaggaaacrggaggggccagtaaaaagcatctggcttggatttggcttgatttacttaattaagagatggagtctcgctctgttgcccattctgcattgcagtggcacaatcatagcttactacagctttgaactcctgggctcaagccatcctccggactcagcctcctgagtagctgggagtacaggcacgtgcaccatcacacacggattttttttttttttttttttttaaagacagagtctcactctgtcacccaggctggagtacagtggtgcaatctcagctcactacaacctctgcctcctgggttcaagcgattctcatgtctcagcctctcgagtagctgggattacaggcatgcaccaacacacccagctaattctatttttagtagagctggggtttgatccacccgccttggtctcccaaagtgctgggattacaggcgtgagccactgtgcccagcctggataattttttaagagagagatggggtcttgctgtgttgctcaggctggtctcaaactctgggcctcaagccatcctcccaactgtgctttccaaaatcctggggttataggcatgagacaccacgcctagcctgggttcccgtaaaggaggaggagttgtgagtcattagtacgccaggaaaaagggtccagtgggagggcttctgaagcctgaggtcacaaaacgggagcaggcctacaagtgagctgagagtggaagcgccttcgttcttagaaacaggaaggaaggcagagaagggcagctgtggacatcagtgagtcaggaggaaggggaagaggcccatatcaccaaatcctcagcctggctagtgcccacagaccccaaaggccctta

SEQ ID NO: 25107 - DNA, 1140 bp, Homo sapiens
tggacaagaaaatggccttgtattttagaagcgccagggaaatgctcactagggttcgcaaactgcagcatttgtgggctctagagcaccaagtacgggctgcctggctctgcctctctactaagaggccttgagcaagccgcctggcctccagcagccccaatttcctgacctgtaaagcgcagataatacttccctactccccacgggattgttataggcactgaatatgtctgtgcaggggagcttagcacacagtaggcactcaaacccgagggctagtatgagctatcagccctccacagcttgtggtcaggtctgacaaactactgcttagcatatgttaacaaactggtgccaacaaacattatttcatgtaatctagtttaaaagaaaacttgtaacgactaccagaagagttaagtcagtcaacaggactacagtccaagactgagacacccgcacagagggctctcagtttctgtgctgccacagccaggaggtgtcactgtgtgaatgggcacacagaaccagagatgtaaccagcactatgtactccaagaaaactgaaagaagtaaactggtaggaagaaagaaaattaaaggctcaagtgactcactcggactttgatctaaagaatccacagctcttaagataaggatgaactatacacctaaagacgttaagtcagacctacaaaattttgccctgtgcaaaattctcagggcagaaacacgcacctaagggttgtcattcacttcctaagggaggggtcaccattcatttctgggtcccagtgtgcgcacaatccaagtgtccgtcaggctctcagcctgggccctgcccataagcctttccttgttgaagtgatcaattccgattcttggcaataatccctttaaaaggccagctgctgctgtctagtcactgatgccgacccactctaggtgggaaaaaagaaatcaatggagccaccgcctagatggggaggcaaatttaaagtgtcgggccttgagaaaggccggagatcagagaggggaaagggtcccgcggctcccgggggttaggcaggaagggcgcgagctgggggagggccggccctccagscgtgggcgcgcggggactcttattctgacacg

SEQ ID NO: 25108 - DNA, 580 bp, Homo sapiens
accggatcgggcctttcccaggtcccacctcagctcaccctccagcccctaatactctctggccccgccccatacttgtactaccctagcgatcaagtggtcctcccgtctcagtcccccgccaccccccgcccgcgtagctgagaccacaggcacacaccaccatgtccagctaatttttaaattttttatagagatggggtctccctaggttgcccaggttgctctcgaagctatcaccccacttgactcctttttcggacactcctctttcgcccttgcactctacccccgcccacacaataaatacccccgccscactttcctatggccccgcccactaaccaggccctcccctaactccacccatcaatccaccctcacctctccaggctgcacctactccaacgcacacctgattgtgtcttctaaatccacccagagcccccggctcacgcctcctggtcctgcgcccccagcacaccccagcctgtctcgccccctcagtcacccctgcaggacaatctaaagccttggccatctctccagttggagccaaactttcctcacccggctctac

SEQ ID NO: 25109 - DNA, 570 bp, Homo sapiens
ccatagtgtgggtggagccagcatgagtatggggcggggccatggtgtgggtggagacagcatgagtatggggcggggccacactggtggagccagcatgagtatggggcggggccatggtgtgggtggagccagcatgagtatggggcggggccacactggtggagccagcatgagtatgcggcggggccatggtgtgggtagagccagcatsagtatggggcagggccatggtgtgggtggagacagcatgagtatggggtggggccatggtgtgggtggagccagcatgagtatggggcggggccatggtgtgggtggagccagcatgagtatggggcggggccatggtgtgggtggagccagcatgagtatggggcggggccatggtgtgggtggagccagcatgagtatggggtggggccttggtatgggtggagctgggatgggtatggagcagggccatggtgtgggtggagccaacatgggtatgaggcagggccagaaagggcatggggtgggacagtgtgagggtggggcgggccagggcaaagacaagacccccaagca

SEQ ID NO: 25110 - DNA, 570 bp, Homo sapiens
ccatagtgtgggtggagccagcatgagtatggggcggggccatggtgtgggtggagacagcatgagtatggggcggggccacactggtggagccagcatgagtatggggcggggccatggtgtgggtggagccagcatgagtatggggcggggccacactggtggagccagcatgagtatgcggcggggccatggtgtgggtagagccagcatgagtatggggcagggccatggtgtgggtggagacagcatgagtatggggtggggccatggtgtgggtggagscagcatgagtatggggcggggccatggtgtgggtggagccagcatgagtatggggcggggccatggtgtgggtggagccagcatgagtatggggcggggccatggtgtgggtggagccagcatgagtatggggtggggccttggtatgggtggagctgggatgggtatggagcagggccatggtgtgggtggagccaacatgggtatgaggcagggccagaaagggcatggggtgggacagtgtgagggtggggcgggccagggcaaagacaagacccccaagca

SEQ ID NO: 25111 - DNA, 570 bp, Homo sapiens
ccatagtgtgggtggagccagcatgagtatggggcggggccatggtgtgggtggagacagcatgagtatggggcggggccacactggtggagccagcatgagtatggggcggggccatggtgtgggtggagccagcatgagtatggggcggggccacactggtggagccagcatgagtatgcggcggggccatggtgtgggtagagccagcatgagtatggggcagggccatggtgtgggtggagacagcatgagtatggggtggggccatggtgtgggtggagccarcatgagtatggggcggggccatggtgtgggtggagccagcatgagtatggggcggggccatggtgtgggtggagccagcatgagtatggggcggggccatggtgtgggtggagccagcatgagtatggggtggggccttggtatgggtggagctgggatgggtatggagcagggccatggtgtgggtggagccaacatgggtatgaggcagggccagaaagggcatggggtgggacagtgtgagggtggggcgggccagggcaaagacaagacccccaagca

SEQ ID NO: 25112 - DNA, 570 bp, Homo sapiens
ccatagtgtgggtggagccagcatgagtatggggcggggccatggtgtgggtggagacagcatgagtatggggcggggccacactggtggagccagcatgagtatggggcggggccatggtgtgggtggagccagcatgagtatggggcggggccacactggtggagccagcatgagtatgcggcggggccatggtgtgggtagagccagcatgagtatggggcagggccatggtgtgggtggagacagcatgagtatggggtggggccatggtgtgggtggagccagcatgagtatggggcggggccatggtgtgggtggagccagcatgagtatgsggcggggccatggtgtgggtggagccagcatgagtatggggcggggccatggtgtgggtggagccagcatgagtatggggtggggccttggtatgggtggagctgggatgggtatggagcagggccatggtgtgggtggagccaacatgggtatgaggcagggccagaaagggcatggggtgggacagtgtgagggtggggcgggccagggcaaagacaagacccccaagca

SEQ ID NO: 25113 - DNA, 604 bp, Homo sapiens
cttggagggagtctgccagcaggcaccttattatgctgtgagagtacgcacaggccccccccttctggcccattcatcgttgttccgcaaagtccattgctttgatgcagtagccttgaaggtggtttttcctgctgctcctggcttcagcaatctagaaagcggggcaatgggtaatcagtctcaccgtcactaggcygaatgggagaaatgctcctgtggacatggcctcccagtgtgggtgagcaaaagggcaggctgaggtttttaaatgaaaaggctggcttgtgaaagcctgtctccaaacagaggcagcgtgaagatgaatggtgtagctgcctggagcccagacagtgtccttctgctcagactttgtcagaatcagggatgggctagggataggctgtgcatggagagctcagtcactctggatggcaagagagtaggcactggtttccagagatacccatgagaggctgcctggagaaagttctgccacaggtaggactaaccatcaacaggaacccagcacagtcgttagcacacaaactccagagtccggtaacctgggcttcattcctgacttccctagttttctagctgt

SEQ ID NO: 25114 - DNA, 1002 bp, Homo sapiens
tgaatgcaatgtaaatttcccatttcttcctgtagcaatgaaattgaagagtgtatagtctagcatagtgttgacatgaagtcttaggattgaggcccagtgtgaatactgtgtggccttgaagaaaggacttaccttttctgattcacatgctctgcttctaaaaatgagagtattggccaggcactgtggctcatgcctctaaccccagcactttgggaggccaaggcagggggattgctagtgctcaggagttggagaccagcctgggcaacatagagagaccccatctctacaaaaaaaagttttaaaattagacaagcatggtagtgcactcctgtggtcccagcttctcgggaggctgaggtgagaggatggcttgggcccaggaggttgagactgcagtaagctgtgattaggccactgcactctagcctgggtggcacaatgggaccctgtctaatcaaccaatcaatcaatcagtaaaattgtattgtattatatacctcatagggttattttgaaggtgcaatgggtctggcactagattgtaaattctataacatcagaaattacagtatgcttacaattgtatytccagtgcctatcgtcatccccggcacatggtgggcaatgaataaaaggttttgaaagaatgctgaatcatagggctcttctgaaggctgtgtagtaaatatgagaaacaatcttgagcttttatttgtttacttccttactacctgcctcccttcttagcatgtcagctctgtaggagtaagaaaattaccttcttgttcccttgccagatccctgtgcccagaaccttgacatttagatgtggtttctcagccaacacatgacactccccggaagtttgttaaaatggtaaaattatgggcctagcaccagacctactgaattagaatctgcatttactatcctctgttaattcttgtacacattacattttgagaagcatttgtctagaaaacacctgtccgt

SEQ ID NO: 25115 - DNA, 1002 bp, Homo sapiens
tgaatgcaatgtaaatttcccatttcttcctgtagcaatgaaattgaagagtgtatagtctagcatagtgttgacatgaagtcttaggattgaggcccagtgtgaatactgtgtggccttgaagaaaggacttaccttttctgattcacatgctctgcttctaaaaatgagagtattggccaggcactgtggctcatgcctctaaccccagcactttgggaggccaaggcagggggattgctagtgctcaggagttggagaccagcctgggcaacatagagagaccccatctctacaaaaaaaagttttaaaattagacaagcatggtagtgcactcctgtggtcccagcttctcgggaggctgaggtgagaggatggcttgggcccaggaggttgagactgcagtaagctgtgattaggccactgcactctagcctgggtggcacaatgggaccctgtctaatcaaccaatcaatcaatcagtaaaattgtattgtattatatacctcatagggttattttgaaggtgcaatgggtctggcactagattgtaaattctataacatcagaaattacagtatgcttacaattgtatctccagtgcctatcgtcatccccggcacatggtgggcaatgaataaaaggttttgaaagaatgctgaatcatagggctcttctgaaggctgtgtagtaaatatgagaaacaatcttgagcttttatttgtttacttccttactacctgcctcccttcttagcatgtcagctctgtaggagtaagaaaattaccttcttgttcccttgccagatccctgtgcccagaaccttgacatttagatgtggtttctcagccaacacatgacactccccggaagtttgktaaaatggtaaaattatgggcctagcaccagacctactgaattagaatctgcatttactatcctctgttaattcttgtacacattacattttgagaagcatttgtctagaaaacacctgtccgt

SEQ ID NO: 25116 - DNA, 557 bp, Homo sapiens
ccttcactttcatctgcctctcctggatctgttttacacttacatggccagaaaagaacgctagttatagtagaaactagttacaataactagttaaggcggtaactgatagagttataaagatctttatgtacccaggaaaggggttacactgaaagctgtaacttcacatcaaccctgtgaggtaatgaaattgttttttaacaagatgataaatattaatagaataatgagctaagatcttctgaatcaagcaccatatttgtaggtagagtacaggaagcatctttattaacttaaggtgttgagaaacatcctattacagaacaggtcataaatttatctttgagtgttttaaattatctgattttagtgyctttgacacattcaaaggaatgacttttgaattgatctaccagtttgaaatatgaaaattgatttacctatttttttcttgtttaacaattagttctttcttgaggggaaaaagcatagattttggaaagcaacatgatagcattctctgtcaatgcattaaaatttctaaatcaagctta

SEQ ID NO: 25117 - DNA, 557 bp, Homo sapiens
ccttcactttcatctgcctctcctggatctgttttacacttacatggccagaaaagaacgctagttatagtagaaactagttacaataactagttaaggcggtaactgatagagttataaagatctttatgtacccaggaaaggggttacactgaaagctgtaacttcacatcaaccctgtgaggtaatgaaattgttttttaacaagatgataaatattaatagaataatgagctaagatcttctgaatcaagcaccatatttgtaggtagagtacaggaagcatctttattaacttaaggtgttgagaaacatcctattacagaacaggtcataaatttatctttgagtgttttaaattatctgattttagtgtctttgacacattcaaaggaatgacttttgaattgatctaccagtttgaaatatgaaaattgatttacctatttttttcttgtttaacaattagttctttcttgaggggaaaaagcatagattttggaaagcaacatgatagcattctctgtcaatgcattaaaatttytaaatcaagctta

SEQ ID NO: 25118 - DNA, 829 bp, Homo sapiens
gccactgactctcaacttttccatatgacatgggaaccaaggatggcttgggaatgtagtcacttagggtcttctgttccaccagttaccttgatatgtcaatgcctgaaactgtgacaggcatttggggagagagtcttctccttggactctaatcaggaaatgcaacactctcctcttccctggtgtgcttagagacagtacaactctacttgtctctttcttgcattccatttttcttctttcctcagtgtcccaggggtaaaagaacaattcttttaattccctgatatcatatgagctgtatatcaaaaaagtcatctggatttctgaggtaggtaaaatattatttttatgctggaggaactctatattctctgtatttcagcttgtgcatcaaggtaaagggggaactaaaacaatccagtaaatactctctcaagtatatagcctagatggaaacactatcatctcagtgcatagccctgagttacacatctgaagccaaatattacactgttccttcaccaagaatcctttctatgtcaaatcccaaatttcttgtcattctccatagcactgttcatctgcatgccrtagtagatgaaggctttgggtggacccattgaaagtcttgtgctcaagaagacaaaggacacaattcatggttagtattcaaaatgttgctcccaccacaaacatcttcatattcttctaagtagaatgtctaccagacatgctatcttttctccagcaaacagagtgaacaacaatcctcgtttgcctgagaattaggatttctttcttaggatgtggaatttttagtgct

SEQ ID NO: 25119 - DNA, 508 bp, Homo sapiens
ttgttgaacgctaacacttacagtattaacaaaaacagaggggaaaccctcagaagattttgtaaaggagtggtcagggaggtaggaagaaaccagagaagaatgttgatacacaacgcaaagaaggaaaatttcaaagagaaggtattggtaaatattagtatcagaaattagtatcaaataatagtatcatatacatcaaaaattgaattaggtctgtactttttaactatgtagcatctaaaaattctgggagagcaacttccatgtttggtagattcaagtggtagtggtttgaatgggaggttagaaagtgccttagagctgttaacattgctgtaaaggaaggataaagaataatggttcyagtaaagaatatgggtgtcaaccagggtagatgaaaaatcaagcataaatgattgcataactttgctacgtatattagcctttaatagcaaaatggtttttaggtaaaatgctacttcctttcaaaatctaaaaaaaaaaa

SEQ ID NO: 25120 - DNA, 879 bp, Homo sapiens
agaatgttttgaagatgctaactgggcagtggccttgtgtgtgttaactgttgatgggaaggggccagtaggaagggtgaggctgatggcccaggagaaagcagagatggcccctggagcgagtccagaaggtgggatgagacagggtccggagcttgggggaggactggctggcgatgaagagctgacctctgacttagcacagtggttaaagagtggtcacctcctggctctgccacatgctacgtaagcgcttggccccgggcaggtgtcaggaggacacagcacggagtggacattccagcggcgagaggcactcacatgaccaagaaagcctgagttgtggcacacagccgaattagccccagctgtggacagtccggcatctcagaactcagttaccaaagatgctgtgatttattcatggcaattcagaacrggggcccacagagggccacctgccccctgttcctgcagagctgtgttggctgagccatgcccatttacctccatgttgtctgtggctcctttctctccaagctgcaatagacttgtggggatagagaccatatggtccccaaagcctcaaatatgtactacagaaatacgtgttgcagaagagcttgccaaccactgagtgagaatatgcaaggactctgggcagcttgattccagtgctgtctctacacggatgcctgtgtgccctgggcagcctcctggtctgtaagatgcaagagcaggagtcctcccaacagcatgtaggcagtgctcactgtgtcctcactcagctgggcactctgtctgatatggactggctgtatctccaaccaaatctcatcttgaattgtagctcccataattcccacatgttgtgggagg

SEQ ID NO: 25121 - DNA, 559 bp, Homo sapiens
gcctgaatacaggatctaggtcacaagtccacactcgagctgcaagttatgttggtaaagtgagttgctggcatctctttgagaagaatgccttaaacttggaaaggatgtttcaagaagaaaggcaaatatgcgccacagtaaccatggagagtgatttgctagagactgtttagaaagcaaacctgaaaatacctttcttcatggccaggcgcagtggctcatgcctgtaatcccaacaccttgggaaggcctaggcaggtgaattacctgaggtcaggagttcgagaccagtctggctgacatgggaaaactccgtctccactaaaaatacaaaaattagttgggtgtggtggtgggtgcctgtagtyccagctacttgggaggctgaggcaggataattgcttgaaccaggaaggcagaggttgcagtgagctgagatcacgtcattgcaccccaggttgggtgacagagtgagactcctctcaaaaataaataaataaataacaacaaaaaacataaacaccttcggggccaggtattggagatggatacctca

SEQ ID NO: 25122 - DNA, 559 bp, Homo sapiens
gcctgaatacaggatctaggtcacaagtccacactcgagctgcaagttatgttggtaaagtgagttgctggcatctctttgagaagaatgccttaaacttggaaaggatgtttcaagaagaaaggcaaatatgcgccacagtaaccatggagagtgatttgctagagactgtttagaaagcaaacctgaaaatacctttcttcatggccaggcgcagtggctcatgcctgtaatcccaacaccttgggaaggcctaggcaggtgaattacctgaggtcaggagttcgagaccagtctggctgacatgggaaaactccgtctccactaaaaatacaaaaattagttgggtgtggtggtgggtgcctgtagtcccagctacttgggaggctgaggcaggataattgcttgaaccaggaaggcagaggttgcagtgagctgagatcacgtcattgcacyccaggttgggtgacagagtgagactcctctcaaaaataaataaataaataacaacaaaaaacataaacaccttcggggccaggtattggagatggatacctca

SEQ ID NO: 25123 - DNA, 586 bp, Homo sapiens
tgctgctgatgacactagtctgagcccacaccttgagaaccactgtgcctgggcaaaarcctgtattttctgagttggaacagccagcttcattgacaagctttgccttcttcaggagaattatgaatagataaaatggaatctaaccaaacctgtaacattccctccatgttctttctccttgctgcttcttaggaaaaaggttaattggataatggggaaattgaatctttctttacaataagtcctgtaagatttacttatctttagttatttctccagcttgaaaatttaaattatatgaagctttacacagggcctgtctataaaatgtactgattttgggctacctgaattttatttaccatttgttttaattctctaatacatctgtgttccttgtttgctagtttcttttctaaattttgatttataaaaagggttttggaatcatattcatatgtaagattggcctataattttcttttcttgtacagtctagtttttgctatcaaggttatattaaccaaaacaaaaaagatgagcaggggcacaatatttctatctctgttctctagaacaaggt

SEQ ID NO: 25124 - DNA, 586 bp, Homo sapiens
tgctgctgatgacactagtctgagcccacaccttgagaaccactgtgcctgggcaaaaacctgtattttctgagttggaacagccagcttcattgacaagctttgccttcttcaggagaattatgaatagataaaatggaatctaaccaaacctgtaacattccctccatgttctttctccttgctgcttcttaggaaaaaggttaattggataatggggaaattgaatctttctttacaataagtcctgtaagatttacttatctttagttatttctccagcttgaaaattkaaattatatgaagctttacacagggcctgtctataaaatgtactgattttgggctacctgaattttatttaccatttgttttaattctctaatacatctgtgttccttgtttgctagtttcttttctaaattttgatttataaaaagggttttggaatcatattcatatgtaagattggcctataattttcttttcttgtacagtctagtttttgctatcaaggttatattaaccaaaacaaaaaagatgagcaggggcacaatatttctatctctgttctctagaacaaggt

SEQ ID NO: 25125 - DNA, 1306 bp, Homo sapiens
tgcctattaagtgttgggcactgagctatgctctggagatcaatactttgaacagaacagtgtcaatggttgcaatatggtctgttcttatttgactccatttcctttcagcctccagctccctgacagacttactgaccacacctgtgggcttgtgcccctctcagcaaaagaaacataagatgctccctgatggtgctgggaggtgcctcaacatacaggtgttctggttgtgatgcctcatatctgtagtcaggacagcttgctgggtcctgtcttgcccaaatccctggtttccagctccttgcctaagatccagctccctgcgtggctagacttgcctgaccactctcttctcacctaacttttgacccttgctatggcttgaccatcagctcttagatatcccctcaaacctggctccatcaggccaagctgctgatgcccactataaatcccgtcttaccatcttggacctgggtttccagtctttatgacacacatgttctcaggcaagaagaaaggaaggacaaaatgatacataggtatgcccatataagtgtacttgtcagttggaaacctgagaattgtgtcttatcagattaaaaaacaaaacattcaataagaatataagttggggaaaagtgaagttaagtgttttaagatctttatactacctgtaatgagcataaatatattgtgtaagtttaaaattttagaaattatgtatgtttcaatgttgagggtaaatattaaaataatacaagcagtataactccctagcagaaggaaaacagaaataataaaaatagacaaacccaaaagaaggtaataaaagaagcaaggcaaatataaaaacaaaataaaattttaacccccaaatattagaaatttaaaaattttaaatggattaagttctccagaaaacacaaagattttcaagctgtagtaaatacatatacacatgacatcatataaaaataaattaacatgagagtactatattgtataaatactcatatttttgtatatatgcagttataaatacgcacrcatacattcctgtgtataatattttcaagagacgtgtctaaaatgtaaggatacaaaaaggtgacatataaaaggatggaaaaaatacagccggcaaatagtaatcagtagacatcttagaagaatacactaatataaaacaaaatacactctaaacattattagagaagtataaattcacaatgaaaatgttttaattaacacaattattacaactttgatatgtaagaacacaaaataaagctttgtaata

SEQ ID NO: 25126 - DNA, 546 bp, Homo sapiens
ctgtctggtacccagcaggcaggagctgtgtggccctgggcaaatgacttggcctctctgtgtctgtttctcagtcataaaatgggagtaytgtccacccagcagggctgctgtgagggccatataataacacacacaaaatcctcagcctggggcctgtcacccaggaaaagcagagagtagctgctgccactgtcacgatttaagactgttatcacgtcgctgcactgcatggtgccatgggtgctagagggaggtgagctggccaaagaggaagaggtctgaaggaacatagaccatctgattccacactagcacccatacctggggagcacgaggggtgcctggctgggatgtggccatgcctagggtgtgactttggcttgttttggcttctaagccaactaagctgggttgggggcactctatgtaccaagcactgtgctaggagctagggtagcaaacacactcatactgaggacagtggctgaaatgtgttagcacttgctacatgccaggctctaagcccagcactgtggggtggca

SEQ ID NO: 25127 - DNA, 546 bp, Homo sapiens
taacgctaagactctgctatcacatcaaggtccattatcttcttgggccattttgccatttttacgaagcacaaacaaaaaatctcaaaccctgctcatttaaatgacggctctgagaacagtcaatggcccagagggaacagagaattcacgttcctgcgaccgcacctccccctcccccagcagcagaggaaagagctgcttccccaaacacttcctctccaccctaccctcaccccatggaaatagcggcactgcaatggtataacgatgacggctggagagaatagcagtgcagtrggtaggggtcatcacagcagctgccatttactgaacacctactaggtgccgggcgctactccagcctctctttcccatcatctcgggtggacagtcgtcctgatcctgtcaggaatctgaggatcgttcttagcccagatgacttcctggggctggcgaacatgtttttgagattgtaggcactgggtagagcttccaaggattctccttccactctgctgatggtagtgcacctctgtagccatc

SEQ ID NO: 25128 - DNA, 634 bp, Homo sapiens
  misc_feature (1)...(634): n = A,T,C or G
gggtttttatggttttaggtctgacatttaagtctttaatccatcttgaattnnnnnnnnnnnnnnnnnnnnnnnnnnnnnnnnnnnnnnnnnnnnnnnnnnnnnnnnnnnnnnnnnnnnnnnnnnnnnnnnnnnnnnnnnnnnnnnnnnnnggggaggggaggtagtctcaatggaaaggagttccttggcaggtgaaatgatgtaagcatttgaaaaatattggcagaaatgcctacaaagacagtagagttggctgagtactgctaaattgtaytgatttcctgaagaaagggtctgttatacaaagggccctggtagagaaaacctgagaagttacatacggttcgagtacatctggatggagactacttacttggtcagattctggtctagcaaaagagggacccattcttctctggtaagagttagcacttcactgtgctgaaatatgttgcaggaacctctctcccataaagcatcaagtgtccttccacctcctctcctggccaccaagctgttgaccagtgttaaatcctagcataacccagtggaagatgtgctgagtcttttaagggaggataaagacagtatgcaataaggaattgcaagaattcgctgtcattaatgaaca

SEQ ID NO: 25129 - DNA, 1165 bp, Homo sapiens
gggatccagcagccttctatacagtggcctatagagtagccattcttttattcctctactttgttaaaatatttgctttcactgtaccgtttggacttctccttcattctttcttgtgcaagactcaaagaccttctcttccctctcttggggtctggatcaggacccctttctggtaatagtttctcaaggggaacaataactcttccgagatgagagcaaaacgtatcctgcakactcttataaaagatcctttttaatgcactgaatgacattctcaataacattctaacagcacatgtaagattcatggcattgtttttataagaagatggattaataagccttctatatctatacatgcttcaataataatatttctttgcttcttctttttttttttttgagacaggatctcactctgtcgcccagactggagtaaataataacatattttatttcttattttaaactgctttttaacattaagaataaataaacagttcagcttgaggccacgcagggttgaaaataatgtctatgaatcggccccagtctctcgaaatgctctttactaggatggacacttcagcaaaggtgaaaagatacaacaatatatttaatgagactaattcaaagaaaggaataatcacagtgtggagggatgtgtgggagacagatttacttccttaagtttctgttattagtgaatgggaaaatgatgactctgaaacagaaagcatagaaacatgctctgaagggtgcttggggccaattccacttccttcatagaagaggttctagataagaaaaaaacaaagaacacaaatgttcatattattacctgggtcaaggactcctttaagattcagacgaaaactactacatatccattgactgattaagtgtgtcaaaccttagctctcagcccaccctggctttagaaaaatgttgatgccgaggttttacagcaaggaaaaaaaaatctgaaatcctattttcttgctttgccaatctaaaaaataagagggagctggcaaatggcagatgcctatgtgtggaaggtgagttgaaatggtgatggctatgctatagcagcaatgggtctgctaaggatattggcaagtgtatcaaaggcagctggtaaagaagggttcgagggatc

SEQ ID NO: 25130 - DNA, 1165 bp, Homo sapiens
gggatccagcagccttctatacagtggcctatagagtagccattcttttattcctctactttgttaaaatatttgctttcactgtaccgtttggacttctccttcattctttcttgtgcaagactcaaagaccttctcttccctctcttggggtctggatcaggacccctttctggtaatagtttctcaaggggaacaataactcttccgagatgagagcaaaacgtatcctgcagactcttataaaagatcctttttaatgcactgaatgacattctcaataacattctaacagcacatgtaagattcatggcattgtttttataagaagatggattaataagycttctatatctatacatgcttcaataataatatttctttgcttcttctttttttttttttgagacaggatctcactctgtcgcccagactggagtaaataataacatattttatttcttattttaaactgctttttaacattaagaataaataaacagttcagcttgaggccacgcagggttgaaaataatgtctatgaatcggccccagtctctcgaaatgctctttactaggatggacacttcagcaaaggtgaaaagatacaacaatatatttaatgagactaattcaaagaaaggaataatcacagtgtggagggatgtgtgggagacagatttacttccttaagtttctgttattagtgaatgggaaaatgatgactctgaaacagaaagcatagaaacatgctctgaagggtgcttggggccaattccacttccttcatagaagaggttctagataagaaaaaaacaaagaacacaaatgttcatattattacctgggtcaaggactcctttaagattcagacgaaaactactacatatccattgactgattaagtgtgtcaaaccttagctctcagcccaccctggctttagaaaaatgttgatgccgaggttttacagcaaggaaaaaaaaatctgaaatcctattttcttgctttgccaatctaaaaaataagagggagctggcaaatggcagatgcctatgtgtggaaggtgagttgaaatggtgatggctatgctatagcagcaatgggtctgctaaggatattggcaagtgtatcaaaggcagctggtaaagaagggttcgagggatc

SEQ ID NO: 25131 - DNA, 501 bp, Homo sapiens
tgaaacaagattattcctgaagaacataggtctcttcttatacccagctttggctctaggactctctgatgatcatgctgaaccttcttacattgcagagcaaactgtttcctttcaacctcttttcacaaggggtcagattttcatcccccagttttatccagctccctccccatttctgtcacagaggcattttttttccaataaaagccttgcctgtaagccygccttaatgtctacctcttgttggacctagacaaacataagaggtacataagttgagtgatccaaaaaaaccaggccattaaatgggtaaagagactgactcactcgccactcaacagttggagaggaacatcattctcctttataaatgagaaatggatactccttggcacaaagtgctagcacattgccaatgatgttacctgtaatgatagaaagacaaggaaggaaggaaggaaggaaggaaggaaggaaggaagggagggagggagggag

SEQ ID NO: 25132 - DNA, 501 bp, Homo sapiens
tgaaacaagattattcctgaagaacataggtctcttcttatacccagctttggctctaggactctctgatgatcatgctgaaccttcttacattgcagagcaaactgtttcctttcaacctcttttcacaaggggtcagattttcatcccccagttttatccagctccctccccatttctgtcacagaggcattttttttccaataaaagccttgcctgtaagcccgccttaatgtctacctcttgttggacctagacaaacataagaggtacataagttgagtgatccaaaaaaaccaggccattaaatgggtaaagagactgactcactcgccactcaacagttggagaggaacatcattctcctttataaatgagaaatggatactccttggcacaaagtgctagcacattgccaatgatgttacctgtaatgatagaaagacaaggaaggaaggaaggaaggaaggaaggaaggaaggragggagggagggagggag

SEQ ID NO: 25133 - DNA, 939 bp, Homo sapiens
ctctcttgagaaatagtctgatggtacacattcacagcagcttggagcagaggaatctcaaagtccacatatccaaggaacagaagaagctcaactctgtggattcagatctgactgacaaccctccaactcataccrtgaactgaaattagtaattgaccttaccatcccatctaataggcaagccaggaaatcagaggccctcctaaatttctctctttctctcaccacccattgcattttatcccatcaatttcaaattaatacttgtattctgttaactcaacctataatagtcccatccctccctttcagtgtggaacctgaagagcttttaaactcttatatagatgttagaactccaatgcccagagagtctgagttaaacggtctggcatgaggctcaggactggtatctcttaaatgttttttaggtgttttggatgtgcagctatgagtgagaatcattgctctcagccaaataaactgttagtgatttgtccattgcttccacctccatgttctctctcattctcagcccatggcatgtccttcagccatgttaaaggcatggtaagttcttgaatatgccgatttattccaagcctccctgctttgacttatgctattctctatgtctgcatttcctaccattatccttctctatacacttgagccttctctcctcaagtagaactgattattccttcattttgcctcagcccctgaggtccttcctcatattttagagtatctataacttcattgcctttgttctttacctatctatcttccccgaccctggaaatcactctctgagttgagcgatcatccagtttcattcttagaaatatttcagaaccttacatatagaacagactctctcaaatggtatgctattgatactttgggctgagaaatcctctgttgtagggatcc

SEQ ID NO: 25134 - DNA, 423 bp, Homo sapiens
ttattaagtgctttctgtgtgcatttaagttttttttatcaaacatcattctaaactcttcattaaaggttggcagaatgagacattaagcatactacctagggcatagttaaccctgtaaaatgtaaatgaatgaataataaatatctattccaatcttggtcttaaaaacttawgatgaagataaggtaatgtacttaaatattatatactactctttaaacagatagacagcagaaaaattactgtgttcactatcaaattaccctaaaacatagcaacttaaaacaacaaacgttttttatctcacacagtttctgaattaggaagtaaggaatctggaagtagcttagctgtaattctaaattatttttggtaaaattatgccacttagaaagataagtctatagattagggttatag

SEQ ID NO: 25135 - DNA, 1753 bp, Homo sapiens
tcaactatgctatgtccttgcactcactacatgtgccatatggttgtactaaggacttacctgtaattgtgtagggataatagttccaagccttctctgtcacataaaatattttggggacaacagctctagcccaactaggcagtttgctaagaggaaagaaagaaaaaagacaattggagtctgttcagagtctcaccacactaccacatctttctggataaaatgctggagaaatcagggggattctggggcatctcttttctccacagctgccctttccccatctcttcggtctttgtcatagttaactttttcccgtgcatattcaagtgctctcaaaatgtgtaaagacagaaggctacagcctggtgggggactccatcagactgtcagcctgtcctctttggatttgcaaagacatgagaattcagggcctgaagggttccatgtttggagggttggccagcctgacctttgcctcctaggagtggtatcacggaatgtttaagcccaaacactggcagggagaggaagctaatcttagagatagatgtcagcctaagcaactcatacaagtgacattttgaaaatggacaaaaccaacagagagcagcaacttagagataggaagagcaacaaaatacagttgtagtgggttgaattgtgtctgccccaaaagatggatccacatcttaatctccagtaactgtgaatatgacctgatttgaaaataggctcttcgcagatgtaattaatttaaagatcacaagatgaaatcatcctggatttagggtaagccctaactccaatgactggtatccttataagagaaaggagaaagagatttgagactcagagacacaccgaggggacagccatgcaaggacagaggcagacatggaaatgatgttgctgcaagccaaagaacacaagaagctgggacagaggcccgggacagattctctctcagtttccccagaagaaaacaacactttgattttgggtttccggcccccagaactgctagaggataaatctgtgttgttttaatccacctaatttgcagcaatttgtttcggaaagttattagaaagccaataaaatgacacagctgttcctctggagcagtcatttgcagaaaacaaattctcaaaaggcacaggtcccagggtcttttgcaaaccagaaagcaatgttttgtttttcttcagaggcaaaacttagagaacagtgcagccccagctaattccttaaatattatattgaaatatgtaatatttctattccttaagatacatctgcatgatttcacttttttgtttgttttgttttgtttwgttttgacacggagtctcgctctgtcacccaggctggagtgcactggtgcagtctcggctcactgcaagctccgcctcccaggttcacgccattctcctgcctcagcctcctgagtagctgggactacaggcgccagccaccacgcccggctaattttttgtatttttagtagagacggggtttcaccgtattagccaggatggtctcgatctcctgacctcatgatccacccgcctcggcctccaaaagtgctgggattacaggtgtgagcgactgcgcccggcccatgatttcatttttattccagcccgataaccaagtgtttctgtccttccagaggctaccatttgctacttttctactctggggcctatagctaagtgtctgggccactcatgcctagcagtcgatc

SEQ ID NO: 25136 - DNA, 570 bp, Homo sapiens
aggatacatgggagagggggaagggaacagtttgtgctcatgcaaagcttgctcttgcatacagcccctgggccgggatggagccgagtttcctctgaagcggggcccagccagtagagctgcctctgtcctaccccctcgagacacccaagccgatttggtgcagatggcaccagcagatgccagtccctaggagggtccctcctccctagctaatgaggggagcaggtgaagggaccagagaatgtgatcaggagtgagaagtgaaacaaacactagattaagagttaggaacctgggttctagtcccagctctgccacraataggctatatgactttgggcaagtcacttcacctctctgaccctaggtgtccctgttgtctgagtctgtgattctagctgtcagaagtgcaaatactgctttaaaagaaaggaaaactgggttttcacttctgctctgttgttaacctactgtgtgatgttgggtaaattccttcacctctctgggctaagattagccatcttttagaagtcacatcgcacgcaacatgcaattaaaactgagtta

SEQ ID NO: 25137 - DNA, 570 bp, Homo sapiens
aggatacatgggagagggggaagggaacagtttgtgctcatgcaaagcttgctcttgcatacagcccctgggccgggatggagccgagtttcctctgaagcggggcccagccagtagagctgcctctgtcctaccccctcgagacacccaagccgatttggtgcagatggcaccagcagatgccagtccctaggagggtccctcctccctagctaatgaggggagcaggtgaagggaccagagaatgtgatcaggagtgagaagtgaaacaaacactagattaagagttaggaacctgggttctagtcccagctctgccacaaataggctatatgactttgggcaagtcacttcacctctctgaccctaggtgtccctgttgtctgagtctgtgattctagctgtcagaagtgcaaatactgctttaaaagaaaggaaaactgggttttcacttctgctctgttgttaacctactgtgtgatgttgggtaaattccttcacctctctgggctaagattagccatcttttagaagtcacatygcacgcaacatgcaattaaaactgagtta

SEQ ID NO: 25138 - DNA, 1761 bp, Homo sapiens
taaattgaaaatgtaggactaacatgttactgtaatagggcatttttgtaaccattacatttattagtaatatcaaataagatcagattccttaccctaaaagcccattctttttaacctttttaaaaagtaatgtcaactttcatattttagggagtatatgtgcaggtttgttacctgggtatatttcatgatgcgaggtttggggtataattgatcccatcacccaggtagtgagcataatgcccagtagcttttctactattcccacctccctcccacccctctcaagtagtccccagtgtctattttttacatctttgtgtctgtgtgtacgctcaatgtttagctcccacttataagtgagaaagggcactatttggatttttaccttaaattttatctttttaaacatttctacatttaatttttatatttgaagttaaaggatcttacccaattaaagaggaaaaaaagtcaattcaatcaagtttaggagtggagtcccaggtaattttgggggttgccttccatttcttatggcgtttcttactagccagagatagtggctgggatttaagacaacatcttcagatgtcagtgtgctttatggtcctggctgccactatgttgaggatcccaaaacttagaaagacagttgataagacagcctcatatctggtttggatcagtatcatcaaatttttctgtctacttatggaagtccgcaacctttgcccatgcagcaacattttttactcaattttgtattcagctcaagttctaaacatctctgaacttgatgagaatcctacattcttttcatattccttctatcttttggcatcactactcttttagatatttaaatgacttcagtgtgaattctggatatgtgtcatgtcttagtttggtggtttaaacttcttgtgcttcgcaggcaaggtactgtgtctatctcaaactctctaattttatttataagcacaatagctcatggtgaatattttagtccagagctaaatcaaccaatttatgagctgaccaactgaatggctcttaataaaaaagaatggaagaaaactgcttggaagcaataaggcatcctacaagcctatgcatattctgataccattatgaaccatttttattttatgaattaaactgtatctgatttatctaatttaatcataatgtataacttctagtgggtcttgtaaatatttgtgcatatttacgcataatattcttaatttttcctcatttttaagttgaaatattttaagtgtttacaagcaaattatctgtgaaaataccttacaagcaaattatctgtgaaaataccttatctatttagagggagaagaactaggaagtcagaatgttgaatatggtttaataagagctccgtatatattaggtgcttagtttttccgaatagataacaatttgttgcatatttactaggcatttcacagaaataagtacacacctgtgcccttctttcttccattgatacatctgtagagtatattaaagtcattttaaataaatgctacaracactcagagaaatttatcagatagattgcctattaagcatctggaaattaataaattaagtcaaatgtttatacaatttacatcctcattttctgaactttcgtcagttgttaaatgtttcccataattacaatggcaacattcattacaacttagagcttcccgataggaaagaattaatcataagtacttacggatc

SEQ ID NO: 25139 - DNA, 643 bp, Homo sapiens
gtaattgcttatttttactctgttttattaggagtacctggaagccaatgtccatgtcttattcccagtgacatctccagctcctactacatggcctggctcggtgcaatagtaatattgggatgttatcgttgagtattctgtaaacaaattagtgtgcccagaaaactcagaggtgaattagttcatggcccaaatcttacaacccatctgtttaggttctacagtttacgatgatattgtctattgctcctctgtaattaattttaattttatattattttgagtgaagtttcatttacccagttccttaccaaaccaggacaaagccaaatctcagtagagtgtgtgtatctactcatatgccactagacaagacaaatctgcctttacatctggctgcggtagcaattcccagatgcacttaattctgacacatggccattattgaaccaaaakcaattgcctggcatgattatagttcttatttgttttcgttttaaggggcctcatccaggctgccaaatgtacaacaggtgccttagttttatacttgccaatctgttgttattcaaatgaccgccctaacagagactaatggtatctaataaaattgatctcggttctggcaagccagactcac

SEQ ID NO: 25140 - DNA, 562 bp, Homo sapiens
tcaacttaaaatagtgatacaatgtttctgaataaataaattattatctatacattaggttttcttcattagcataaggaatgttaaaaggtttttttttttttkgtggaattatgttgtaacaggacatgctgtccttggataaataagttatcagaaactggtcaggagatctctggccgtggatcccagcacttccccagggtcccatcacctaatcgtcagtgtgaatccacaggtctgcagagccctctgcacatttccatgccctgtgggctcacatgcttccaactctggactaaccccataaaaggggctggagggctgagggtggccattaactatgcagggttccccttcagcttgggcttggtcacctccagggagggggaactcaccactcccaaatattcctgtacctctcagaccacagagactaggtgctgggggatcccctgggatcctggccagtccgtctttgagccaggagccctccagtagacaggtctgtgcacggcggaaggttccccggtttatgctgctcaggcagacagacacctgc

SEQ ID NO: 25141 - DNA, 1360 bp, Homo sapiens
ccccttcctccaccagttctgtcttcagcttacagaatctgcctcccccsattccgaagcttatccttaaagatctgctccagcctagtttggactcactctcctgcccctcccactagatcgttgaactttacagcgcaatgcttaacatggaggaatgtgttgataatggtggaatttggggcatctgggagccagactagtaagcaccatttagcctcccagactccagcagaccaggaatttggcagtttaggagactgcagatttattctccgtacctagaggctaaaggaaggcatgtcttcttggcagcatgcaggtttggcaacttctcagctcatggaaaactactggggctgagactgatggggctttggcctggacctcagtggagtgccaagacaggtggagcagagtggccccaggcattcaaagagtcacacctcctctctcccctgctggctgcctcttcaaggcaggcagttgacagaagagcaggcaccttggtaactaatattgtgtagcaagggtggcaaactcacatgccttcaggagtgaaagtgtggagcaggctggagtaagtaacagggagtggtggggactggggcaactggagagtcctgatgtgtccgatgtaattcaaatgcaaatcaatgttctggccctcaggctgaccgtttgctaacctctgccaatgcattaccggttccaaagctcttttcctcatggtttcattgaattgtcatttcctttcctgcttacagtcactatcctcacttggcagatgaggacactggaccttagcaaggcgaagacattcccctgactcattccaggcagggatctatggggggggtggcttgaagacactcaaagaaaggtctgtgcccccaattctctctccatggtcagatttggaggttgacgtataactgtccaactcacccattgagactgtgctgtgttctgacttgggcttctcatttaaatgatcctccccgctcccccaccctacccagtgtagtcactgacgggagagagaggcctgaaaaggggttctgaagtctggaggatcaggggcctttgacaaccttgccagccctcaactacaatgcctgccctagtctgttgaaaagtcacaggaaagaaaagttagtcatggagacactgcctgggggtctggattcatactcactggaatatattttcttccttttatcacaatatcgtgatttggaaataataataactgctacatgctttacctgtagatactcatttaatcctcactacataattctgtgaggtaggagctgttattattcccattttacagatgagaaaactgaggcacagc

SEQ ID NO: 25142 - DNA, 1114 bp, Homo sapiens
tgcaagtggccatggaatccacccttgaacaccttcagtgttgggaagctctctcctttccctttccaaagcatcctttcctcctgctgagtgatgtctcagaagaaagagctgaaactggggggcgaggggcagggagagaagatgtcagggtgggaagcagtttagcaggatggaaaggactttcctcaacaagattctctgtggctagatttgcttgaatacaggaagactaatactccagtaagagaattacttatttgaaattaactcttgattataaactaaaattacagaaggtcttaattacccttgaaataagttagtactggggatatctcactattggtggtgggtagaatggggaggtaaggggtatctctaaacatcagagtaggactaaacactgcctgtttaggctctaatttatttttatattctcagctcttgaaaatgacctacatgtttactgaatacccacagtaggccagacactgttctatatattaactatacaaggttttgaacaggatagaaacattttctgccctcatagagcttacttgctgggagagaagacagacaataaaccagggaaccaagctgtgatataatttcacattgtcatatatgcagtggtttaaaaaagtaaatgttaaagcacttttccaacaaggtttaccctaaccaccctatttaaaatcacaaccccgtccagcacccgtgatcacccctcagctgctgtagtttttcccatagcacatgccactttctagaatagcataatttaggtatttattatatttattgtctgtctcctcccaccagaatgtactccaagaaggccaggaaaagaaagtgtggggtgctaatagtggggtctgtcttagtcactgaagcatcccaggkgggtaagagtgctgaatctgtattatttggtggcttccaaccaggggcaattttgccccccagggacattttgcaatgtctggagtcatttttaattgtcacaagtaggaggaggatgctcctagcatctagtgagtagaggccagggatgctgctgaacatgctacaatgcacaggagagcctccccatccccccgacacagaa

SEQ ID NO: 25143 - DNA, 1114 bp, Homo sapiens
tgcaagtggccatggaatccacccttgaacaccttcagtgttgggaagctctctcctttccctttccaaagcatcctttcctcctgctgagtgatgtctcagaagaaagagctgaaactggggggcgaggggcagggagagaagatgtcagggtgggaagcagtttagcaggatggaaaggactttcctcaacaagattctctgtggctagatttgcttgaatacaggaagactaatactccagtaagagaattacttatttgaaattaactcttgattataaactaaaattacagaaggtcttaattacccttgaaataagttagtactggggatatctcactattggtggtgggtagaatggggaggtaaggggtatctctaaacatcagagtaggactaaacactgcctgtttaggctctaatttatttttatattctcagctcttgaaaatgacctacatgtttactgaatacccacagtaggccagacactgttctatatattaactatacaaggttttgaacaggatagaaacattttctgccctcatagagcttacttgctgggagagaagacagacaataaaccagggaaccaagctgtgatataatttcacattgtcatatatgcagtggtttaaaaaagtaaatgttaaagcacttttccaacaaggtttaccctaaccaccctatttaaaatcacaaccccgtccagcacccgtgatcacccctcagctgctgtagtttttcccatagcacatgccactttctagaatagcataatttaggtatttattatatttattgtctgtctcctcccaccagaatgtactccaagaaggccaggaaaagaaagtgtggggtgctaatagtggggtctgtcttagtcactgaagcatcccagggkggtaagagtgctgaatctgtattatttggtggcttccaaccaggggcaattttgccccccagggacattttgcaatgtctggagtcatttttaattgtcacaagtaggaggaggatgctcctagcatctagtgagtagaggccagggatgctgctgaacatgctacaatgcacaggagagcctccccatccccccgacacagaa

SEQ ID NO: 25144 - DNA, 1114 bp, Homo sapiens
tgcaagtggccatggaatccacccttgaacaccttcagtgttgggaagctctctcctttccctttccaaagcatcctttcctcctgctgagtgatgtctcagaagaaagagctgaaactggggggcgaggggcagggagagaagatgtcagggtgggaagcagtttagcaggatggaaaggactttcctcaacaagattctctgtggctagatttgcttgaatacaggaagactaatactccagtaagagaattacttatttgaaattaactcttgattataaactaaaattacagaaggtcttaattacccttgaaataagttagtactggggatatctcactattggtggtgggtagaatggggaggtaaggggtatctctaaacatcagagtaggactaaacactgcctgtttaggctctaatttatttttatattctcagctcttgaaaatgacctacatgtttactgaatacccacagtaggccagacactgttctatatattaactatacaaggttttgaacaggatagaaacattttctgccctcatagagcttacttgctgggagagaagacagacaataaaccagggaaccaagctgtgatataatttcacattgtcatatatgcagtggtttaaaaaagtaaatgttaaagcacttttccaacaaggtttaccctaaccaccctatttaaaatcacaaccccgtccagcacccgtgatcacccctcagctgctgtagtttttcccatagcacatgccactttctagaatagcataatttaggtatttattatatttattgtctgtctcctcccaccagaatgtactccaagaaggccaggaaaagaaagtgtggggtgctaatagtggggtctgtcttagtcactgaagcatcccaggggkgtaagagtgctgaatctgtattatttggtggcttccaaccaggggcaattttgccccccagggacattttgcaatgtctggagtcatttttaattgtcacaagtaggaggaggatgctcctagcatctagtgagtagaggccagggatgctgctgaacatgctacaatgcacaggagagcctccccatccccccgacacagaa

SEQ ID NO: 25145 - DNA, 586 bp, Homo sapiens
tggcctgcagcacccagttcttcccttttgcactctgatgtgatgccggggtgttggggggcacacttggggaagtgtgatttcaggaagctatgtggccctcagagcagtgaagaaagtgtccaattctaattgcaaacctgacaaaccacagtgaccctgagtagctcagatgatggcccagagctgggggaaattctccctcccaagaccggggccctggggaggcctctggactgggattcctgagacctggtcctggggcctccctgccactagctggctgtgtctttgagcatggccagctccttctccaagcctccatttctttatctgcaaagatgccctcatcacctttaggattctaaatagcctgaccctggagctcaagatccttagtttcccaggagttatgtgagatctgggccattgtcagattttgaggctcccagtatatgatgaaatattttttwaaaaaaggcaaaatagggtgtcaaaatgatggtaactgttaatgtttatgtggaacataatccctgaaacccctcatccctgcccaacacactatatttttgctgattgtaga

SEQ ID NO: 25146 - DNA, 1332 bp, Homo sapiens
tagacaggacactactttttgactttatactctcttgttctgcttgatttttttaacaatgtgcagattttgtcagtttaattaattaaaaaataagaaattaaaaatttcttaattttaaaggagaacctgtggctctaggtctaacaacagtacaccccaaaaccggagtccttgtgtgtgggtgggtggggaggtataatgccattgctgttagcctgaatcacctttcccaagaccccaagaaaacagcaactctagccaggagcaggccagcaggctgcagactctctggccactccctaacttacaaactctcaagccactgtttacgagaagccagtgttattaaaagaaaagaaaaatcaattaaccatcatggtgagggctttggagtcagcctaggaagctctggattctggtgatgcctccagcagctgtgagatcgccagaagagtcatatcaaagcccccacatcttgtttcctcactagtgaaagcagggatcacactgcccccactcacaatgggctggggatgggctcacatttatccagcacggatcctgtgcagactctgtgccaagcacatcacaggtcacaggctctaccgcatttagtccgtaaggcagctgaactgttattgtcatctttccgatggagaaattgaagcttagggagccataaatcaatcatccaaggtcacagggttactaagtagccgtcagtgcacaaatccaggtctgtctgtttcagcctgcaacaactattatattctgcctttaaattaaatgagatagaatgagttcatccacctaaaatgccctcttagatagtggttactcaacacatgccattcatttcaatgtkacacagactcccggggtgccagggtaaaggtggccaatggtcaggacccaccgggcccagcttccacgtagccccgtgcacttcccccactggtatggctggctacagtagcctaagttgcctgctcttggcccaccaggcccttctcagacaagtagagcatgcccagctgaggaccctgggcactgcagcagcgcccttgtgccccttcttggcctgaccattaattattctagctcttctaccagcaagcagaggcctcagctttaacacccacgccaattgttcctccatcctttctgtatacagatctgcagtccctctccgtctatatctatctctgtgtgtgggcgtctctttctctgtctctcggtctctctctttctaccttctcgtgctgtttgtctgtgctatctctatctccctgtgcctctgtctccaattctgtccctctttcttattct

SEQ ID NO: 25147 - DNA, 832 bp, Homo sapiens
gccagcaaaagagaactaatacaactcctgtacctgaaaagcctagggcagcaatggcttcaggcttggctgggtctaggagctctaatggggtggccttgatgctgtccctcctcatgccttaactgctttcttttgcaatggccgtattcactgatgggctttcgctgggttgtggccaagctgaaaacagtagcctcaggcttttgcctcaccactggagcaatcccagtagcgcaaactgcacccctttcctagtaatgtctgcaaatgtcccagggctgacctgcatgggccsagcttgtgccctgaatgatcaccatgattctgattggccaggtctcatcattgtgtctcaaggtaagcggggggatcagccctacctgaacctcagtgactcttaaggtagaatggtgctttgcaaaggaaaatccagctgggcatgcaaaaacagcagatgcctaccagagggtgtgaggcaggagcactgagacttggattcttgcaggttctaagggaagccagagagacagaatagaggtttctgtctcaccagcagagacagtgaacaaaaccaaaaaaccgttcccctccatccttttgtggttcctaagtgtgatgattgggttttcatactcatgtgtgaaatgtacctccctcaagccttgttatgatgtggcgggcacattacccttacccatctgatgaaaagaaaaggaaaaacaaaaacttggaaatcagttataggcagcggttatggggtgaattcaaggtcttgttgcgatctgatggagaaagacaggtgtgaaaaggacaggaaaataaaaaggaa

SEQ ID NO: 25148 - DNA, 832 bp, Homo sapiens
gccagcaaaagagaactaatacaactcctgtacctgaaaagcctagggcagcaatggcttcaggcttggctgggtctaggagctctaatggggtggccttgatgctgtccctcctcatgccttaactgctttcttttgcaatggccgtattcactgatgggctttcgctgggttgtggccaagctgaaaacagtagcctcaggcttttgcctcaccactggagcaatcccagtagcgcaaactgcacccctttcctagtaatgtctgcaaatgtcccagggctgacctgcatgggccgagcttgtgccctgaatgatcaccatgattctgattggccaggtctcatcattgtgtctcaaggtaagcggggggatcagccctacctgaacctcagtgactcttaaggtagaatggtgctttgcaaaggaaaatccagctgggcatgcaaaaacagcagatgcctaccagagggtgtgaggcaggagcactgagacttggattcttgcaggttctaagggaagccagagagacagaatagaggtttctgtctcaccagcagagacagtgaacaaaaccaaaaaaccgttcccctccatccttttgtggttcctaagtgtgatgattgggttttcatactcatgtgtgaaatgtacctccctcaagccttgttatgatgtggcgggcacattacccttacccatctgatgaaaagaaaaggaaaaacaaaaacttggaaatcagttataggcagcggttatggggtgaattcaaggtcttgttgcgatctgatggagaaagacaggtgtgaaarggacaggaaaataaaaaggaa

SEQ ID NO: 25149 - DNA, 619 bp, Homo sapiens
tgatattgctattctgtctaagcaccaagtaaaaatctcagaatcaaatatgttatttcataacaaaaacttggcttagccaagatttcacagaagtggagtacatttgctgtggcagaaacccagtctttagccaaatgtctatttcacaatccaactttacaaatgatattaattcaacatgaaaaacaaatttgacttccatttctagtaaggcagtatactagataacctgaaaactctcttgtgactcaacacatagaagtgctgaatagagtacatttttaaaaacacctttaaatacatatgtttagctcactagaaatcaagggcaatatccagggtttggaaaatgaggagggggactgaaaaccagagcaataagcattggaactgatagttgaacactctgagttactggtctcaggaacctagaaatagagattttaacaatcacaggcatggtggtgcgtgtctgtaactccagctactcaggaggctgaggcagaagaatcgcttcaacttgggaggtgaaggttgcaatgaaccaggattgtgccactgcactccatcctgggtgacagggcaagactgtytaaaaaacaaacaaaaaaaagca

SEQ ID NO: 25150 - DNA, 1103 bp, Homo sapiens
tcctacccattttcctttccttttgtgggctgtcactgccccctttatcacttgggtttcttctcttccatgtctggtcttagagtgagacagtctctcagttctccctaacttgctgttctaaagatgagcttataaaccattttcattttaaggacttaatcatgattgcaaaagatccaaaatcataaataaaaatttcagactcatagtgtctgtcattgtcaccarctataattcccggtccccttcctagatgtctgtctctgaggtcctcacccaagattccccaccctatggaaaatggaggtcactcagcatgtctccctcagatgctggcagccatgtgaggctgtggggtctaggagaggtctcctcagcttttgtccctgaagtgtggtttgggctgatcagagtatagaacagagtgggtatccaagtatcttctaaagggtgcatggtactttccaagacctctcgcctgagcattccccatccagggggctgcagctcaggtacccttggctgagcctgactgtaaagtcttatgcatcaacctcttcagagaagagacagggattcttggagaccagagttgaggattgagggccactgtcaggaatgcgtgaggaggggagagccttggtttgtttcaagggaagagtttgaagttgagatgaagtggtggatgaatgggcatgatagctacagggtcagaataagttctagtgatgacacattgctagctgcctcctgggaatgtgcttttcaatttctgtcccttcctcctgcccctgctggtgactccagtggaacctggaacagatagatcttcattggtaggaagttcccagatgtcagggacaggacccccgggaccccagtctacaagacataagggctggggatgaggaaggaactcagggagtgttgggcaatcacaccctttcccagggaggagctacctgggcttattcacagggcgggtccccaggtgctctcagcctgggtctgttcccacttaagtttctctgggtgctgtaaacagagctggcttggagcctcagccctctgcctttctcttctcttccatcttttgttag

SEQ ID NO: 25151 - DNA, 1103 bp, Homo sapiens
tcctacccattttcctttccttttgtgggctgtcactgccccctttatcacttgggtttcttctcttccatgtctggtcttagagtgagacagtctctcagttctccctaacttgctgttctaaagatgagcttataaaccattttcattttaaggacttaatcatgattgcaaaagatccaaaatcataaataaaaatttcagactcatagtgtctgtcattgtcaccaactataattcccggtccccttcctagatgtctgtctctgaggtcctcacccaagattccccaccctatggaaaatggaggtcactcagcatgtctccctcagatgctggcagccatgtgaggctgtggggtctaggagaggtctcctcagcttttgtccctgaagtgtggtttgggctgatcagwgtatagaacagagtgggtatccaagtatcttctaaagggtgcatggtactttccaagacctctcgcctgagcattccccatccagggggctgcagctcaggtacccttggctgagcctgactgtaaagtcttatgcatcaacctcttcagagaagagacagggattcttggagaccagagttgaggattgagggccactgtcaggaatgcgtgaggaggggagagccttggtttgtttcaagggaagagtttgaagttgagatgaagtggtggatgaatgggcatgatagctacagggtcagaataagttctagtgatgacacattgctagctgcctcctgggaatgtgcttttcaatttctgtcccttcctcctgcccctgctggtgactccagtggaacctggaacagatagatcttcattggtaggaagttcccagatgtcagggacaggacccccgggaccccagtctacaagacataagggctggggatgaggaaggaactcagggagtgttgggcaatcacaccctttcccagggaggagctacctgggcttattcacagggcgggtccccaggtgctctcagcctgggtctgttcccacttaagtttctctgggtgctgtaaacagagctggcttggagcctcagccctctgcctttctcttctcttccatcttttgttag

SEQ ID NO: 25152 - DNA, 513 bp, Homo sapiens
tcccctaagatgaaccgtgtccttgacccatcatcacacccacatctgtctttctgttcctggccaaccaggctttacttgacttggaataaatggcttcctggcttctccccacgcaggctgtttctgggccagggtttgtttgaggccctgtttggatattgttaaaagtgggcagctttgctcagaaaggtcagcatgagagacaagaacaaagagatctttcaagctggcctctggcagggcagccagcaatggctcggaaaagccccagctccacctggcactggcagcttcagagctgggacgggattgctcaggctcatggccatctgcagagccctggagaagccccgtgtgctttctcatttctcagaggagtaagctgaggcagaggggcattctcaggtcagtgttagctgggaccccagatctctccctgtacagccctggccactgggacctctctatttttttttttttttttcttgaaggrcattcaataaaaattgg

SEQ ID NO: 25153 - DNA, 2191 bp, Homo sapiens
attagaccatagccttgcttgcaaacttcatatcagctggcattaggcagctaatacattgcattgattacatagatgacctattctggtccatatgacatagaaaggagacagcaatgaacaacacattcatttttctccatctcctctatcactgctctagaacaaaccaccctcatctcttgcctggattatcaggwttatcacaattgcctcctaactcatctagtccaaaccatcttagtcacaaccattacttgcctgattattactaatataaagtagcctcctaacttgcctatttcttttccagctcctcttcccccaattgattttccacatttgggagcatggagtgatatttttgaaaccaaattctgagcatctgagttttgtctaaaacctttctttggcttttcaaagctcttagagattatccattagcgatagatcaagattccttttggcacacttaaggcaactcatgatctagactttgcctacctcatacctggcaacactctctcatttgctctctatactaagagtcctattggtctcttttttcttttcccccaacatactgcaatccagcttaggtttttgtttgttttgttttgttttgtttttttgttttttgttttaaatactgttacctccaactggaaattcttctcaatctcatctcacttcactaactaaactatcactcttcatatcccaactcaacagtttttgggggtaccttcccagtgctccccagactattccaccactttctagtctactatattgctctttctactttaattttgaagtctctgtaattacatgtcaccatgatcattttaaaacctaccaccctccactaggctgtattccctaggaagccaaagattgtgtttgcttttctccccacttgaaacccagtgctttgtggttccaaaactaatgattattccactgctttctgaacatatttgtcaaagaataaatgaccatttaaatctaaaaggctctcaatataaagactgcttctaaagtctatgccactcaattcattttatatagtagaaataacaatatccatatcttccaacatgagtttgagccaagaactaaactaagagctgagggatccataatacatgttttgagtaacactttacaaaactgaagactttctttctatttttttcttctcattgaaggtatatccaaaaacctcaattctgaacttaagcagcaaggtaaaaatgaaactggccgaccttctgcttatctgatcttacgcaatttgtttggtgaaagtgaacatatacttgcttacttctgataggtcctacctgtattcctgtgtcccaattccagaagcagtcttgccctgtcacccagactatagtgaagtggtgagatcatagttcactgcagcctcaaactcctgggtttgaggaattctcccacctcagcctcccaagtagcttgggactacaggcacatgccaccatgcccaactaatttttcattttttattttttttttagagatggagtcttgctttgttatccaagctggtcttgatctcttggcctcaagcaattctcctgcctaggcctcctgagtagctgggattacaggcaaaaatcaccatgcacaatccaattccatattttcagtggcataaaaagacaaagccttgtctattacaacatcatctcttcctttcaaaaacaaacaatttccatgagactttaataagactagcttaaactcctgagctttttttaaaaaaaagcatttatgtatacttgaggaaaaagaagagtgtcactaatctaactcaattataaattcctatgaaatgtaacaagcaggaggaggagaaagacagaaagatagaaatataaaacaacattgtaaaagaggagaaattaagtctttgaactagggattctgtgcaaaaattatgttattctaatatagatacaggaaaatgtaatagtatttatatatataaactacccctacaactaactactaaattgacaagaacttaaagcacataaaaatgataaatatttgatattcagacatcacaatattaaaattctgttaaatggtgggcaacaacattatttctttcatacaggcagcaaatatttatggatcatctactatatgtcagatactg

SEQ ID NO: 25154 - DNA, 2191 bp, Homo sapiens
attagaccatagccttgcttgcaaacttcatatcagctggcattaggcagctaatacattgcattgattacatagatgacctattctggtccatatgacatagaaaggagacagcaatgaacaacacattcatttttctccatctcctctatcactgctctagaacaaaccaccctcatctcttgcctggattatcaggtttatcacaattgcctcctaactcatctagtccaaaccatcttagtcacaaccattacttgcctgattattactaatataaagtagcctcctaacttgcctatttcttttccagctcctcttcccccaattgattttccacatttgggagcatggagtgatatttttgaaaccaaattctgagcatctgagttttgtctaaaacctttctttggcttttcaaagctcttagagattatccattagcgatagatcaagattccttttggcacacttaaggcaactcatgatctagactttgcctacctcatacctggcaacactctctcatttgctctctatactaagagtcctattggtctcttttttcttttcccccaacatactgcaatccagcttaggtttttgtttgttttgttttgttttgtttttttgttttttgttttaaatactgttacctccaactggaaattcttctcaatctcatctcacttcactaactaaactatcactcttcatatcccaactcaacagtttttgggggtaccttcccagtgctccccagactattccaccactttctagtctactatattgctctttctactttaattttgaagtctctgtaattacatgtcaccatgatcattttaaaacctaccaccctccactaggctgtattccctaggaagccaaagattgtgtttgcttttctccccacttgaaacccagtgctttgtggttccaaaactaatgattattccactgctttctgaacatatttgtcaaagaataaatgaccatttaaatctaaaaggctctcaayataaagactgcttctaaagtctatgccactcaattcattttatatagtagaaataacaatatccatatcttccaacatgagtttgagccaagaactaaactaagagctgagggatccataatacatgttttgagtaacactttacaaaactgaagactttctttctatttttttcttctcattgaaggtatatccaaaaacctcaattctgaacttaagcagcaaggtaaaaatgaaactggccgaccttctgcttatctgatcttacgcaatttgtttggtgaaagtgaacatatacttgcttacttctgataggtcctacctgtattcctgtgtcccaattccagaagcagtcttgccctgtcacccagactatagtgaagtggtgagatcatagttcactgcagcctcaaactcctgggtttgaggaattctcccacctcagcctcccaagtagcttgggactacaggcacatgccaccatgcccaactaatttttcattttttattttttttttagagatggagtcttgctttgttatccaagctggtcttgatctcttggcctcaagcaattctcctgcctaggcctcctgagtagctgggattacaggcaaaaatcaccatgcacaatccaattccatattttcagtggcataaaaagacaaagccttgtctattacaacatcatctcttcctttcaaaaacaaacaatttccatgagactttaataagactagcttaaactcctgagctttttttaaaaaaaagcatttatgtatacttgaggaaaaagaagagtgtcactaatctaactcaattataaattcctatgaaatgtaacaagcaggaggaggagaaagacagaaagatagaaatataaaacaacattgtaaaagaggagaaattaagtctttgaactagggattctgtgcaaaaattatgttattctaatatagatacaggaaaatgtaatagtatttatatatataaactacccctacaactaactactaaattgacaagaacttaaagcacataaaaatgataaatatttgatattcagacatcacaatattaaaattctgttaaatggtgggcaacaacattatttctttcatacaggcagcaaatatttatggatcatctactatatgtcagatactg

SEQ ID NO: 25155 - DNA, 1168 bp, Homo sapiens
agcaatatgttaatatcccatctgtgggctgggtccatgtgagaccatcaagtcactcaggtgctaggcaccggcaaatttcaccatgaaagctgcagaatggtccaggaattagattaacaatcccacaactgtctcagttgtaggcatgacattcaacacctcctgtatgttgggtctaagctcacgaataaccctctcaacaccagactggatttgtgcatgagagtctcaattcctctgcagactgacctgtgttcccgtgagaggatgacaatagttactgttggctgggtgtgcatatgagtgtcacaatctcacctgtgtgctcggcccagttagcacgctctgtgtactacccaatggccctatacactatgcatgagagtcgtaatcaactttgacaccttcctaatggtagggacccatgatcgtacttgtagcattaagcccggtatgagagtcaacatcattacaattaactaggtcaggataggagagtcctcccttgcctatgagctgagtttagatgtgggccaccatttcaactctggttgaatgtttatatatgaacacgggcctaacaccgaggtgatgtgagtctttggcctagacacttcaagcaggaggcaaagtgacatatctctgggtctatcaactatttgatgtgaccttccttttttacctgagctttccccataaaagagatgtgacatatgtctagacaaagcacctgggtgatgtgactctcctttattgactgagccctgtgtattttgggtattctgacgtatccctggacctaacttctggaagataagaagatccaacatgggccctgcctaaaaagtttcttgtgacaaatttctacatgaatcaccttggagatttgactctcctctyttacccgagttttgcccataagagagattgttacgtacctctacagcaagcacctaaatgctgtggctcttctttcttgcccgggtcatgcccacagatgaaagagtggcttatcgctgtgtccagcacaccggttatgtgattatgctgcctgatctctgctcacaggagccattgtgacatatccctggggccagaaactatttaacacgactatcttcaatgaccttaacttggtgcctgggataagttgtgacatatctct

SEQ ID NO: 25156 - DNA, 1168 bp, Homo sapiens
agcaatatgttaatatcccatctgtgggctgggtccatgtgagaccatcaagtcactcaggtgctaggcaccggcaaatttcaccatgaaagctgcagaatggtccaggaattagattaacaatcccacaactgtctcagttgtaggcatgacattcaacacctcctgtatgttgggtctaagctcacgaataaccctctcaacaccagactggatttgtgcatgagagtctcaattcctctgcagactgacctgtgttcccgtgagaggatgacaatagttactgttggctgggtgtgcatatgagtgtcacaatctcacctgtgtgctcggcccagttagcacgctctgtgtactacccaatggccctatacactatgcatgagagtcgtaatcaactttgacaccttcctaatggtagggacccatgatcgtacttgtagcattaagcccggtatgagagtcaacatcattacaattaactaggtcaggataggagagtcctcccttgcctatgagctgagtttagatgtgggccaccatttcaactctggttgaatgtttatatatgaacacgggcctaacaccgaggtgatgtgagtctttggcctagacacttcaagcaggaggcaaagtgacatatctctgggtctatcaactatttgatgtgaccttccttttttacctgagctttccccataaaagagatgtgacatatgtctagacaaagcacctgggtgatgtgactctcctttattgactgagccctgtgtattttgggtattctgacgtatccctggacctaacttctggaagataagaagatccaacatgggccctgcctaaaaagtttcttgtgacaaatttctacatgaatcaccttggagatttgactctcctctcttacccgagktttgcccataagagagattgttacgtacctctacagcaagcacctaaatgctgtggctcttctttcttgcccgggtcatgcccacagatgaaagagtggcttatcgctgtgtccagcacaccggttatgtgattatgctgcctgatctctgctcacaggagccattgtgacatatccctggggccagaaactatttaacacgactatcttcaatgaccttaacttggtgcctgggataagttgtgacatatctct

SEQ ID NO: 25157 - DNA, 1168 bp, Homo sapiens
agcaatatgttaatatcccatctgtgggctgggtccatgtgagaccatcaagtcactcaggtgctaggcaccggcaaatttcaccatgaaagctgcagaatggtccaggaattagattaacaatcccacaactgtctcagttgtaggcatgacattcaacacctcctgtatgttgggtctaagctcacgaataaccctctcaacaccagactggatttgtgcatgagagtctcaattcctctgcagactgacctgtgttcccgtgagaggatgacaatagttactgttggctgggtgtgcatatgagtgtcacaatctcacctgtgtgctcggcccagttagcacgctctgtgtactacccaatggccctatacactatgcatgagagtcgtaatcaactttgacaccttcctaatggtagggacccatgatcgtacttgtagcattaagcccggtatgagagtcaacatcattacaattaactaggtcaggataggagagtcctcccttgcctatgagctgagtttagatgtgggccaccatttcaactctggttgaatgtttatatatgaacacgggcctaacaccgaggtgatgtgagtctttggcctagacacttcaagcaggaggcaaagtgacatatctctgggtctatcaactatttgatgtgaccttccttttttacctgagctttccccataaaagagatgtgacatatgtctagacaaagcacctgggtgatgtgactctcctttattgactgagccctgtgtattttgggtattctgacgtatccctggacctaacttctggaagataagaagatccaacatgggccctgcctaaaaagtttcttgtgacaaatttctacatgaatcaccttggagatttgactctcctctcttacccgagttttgcccataagagagattgttacgtacctctrcagcaagcacctaaatgctgtggctcttctttcttgcccgggtcatgcccacagatgaaagagtggcttatcgctgtgtccagcacaccggttatgtgattatgctgcctgatctctgctcacaggagccattgtgacatatccctggggccagaaactatttaacacgactatcttcaatgaccttaacttggtgcctgggataagttgtgacatatctct

SEQ ID NO: 25158 - DNA, 1536 bp, Homo sapiens
agtccaaagagctctgctataaccaagttgtcccaaatcctgccttggggcctcagtctagcaaagagagaggcatactgacttttccaaaagaggcccagcatgagtaagtggactagrttgtaaacatggataaaatacaataaaacaaaacaaaacaaaataaaataaaataaatgacagtggcagatcagtgagggattcaagtcatgcactggccaaaggctgatggcttcatccagtatggaaacactgtactaagaaaaagtgtagttacggaaggtttctaatttgggacacatatgcatgcatgtgcagatctgtatggtttcacttgtgtgagcatgtaagcactgttgttcagtgcatgtatcttatcaaaacttggtatttcacgagaatgtatatttgtatgaatctacatatttaaaatactcgagccattgtgtacctttgtatgtattcatgatcatatgcacttatttaaagttatgcaaaagcggttatgtttgcagttgttttctttggtgtcttcttcacagggaaagaagaggctctaaaatagatctttattaatttttaaaaagttttattaaaagttattgcttttaaaaaatttgtataattttaaagggtacaagtgcagtgttgttacatagatatattgcatagtggtgaagtctggccttttactgtaaccatcacctgagtaatgtgtattgtacccattacgtaatttctcatgccttactgccctcccattctcctacatttctgagtcaccagtgtttattatttcgaacactatgtccaggtgtaaacattatttagctttcacttataagggagaacatgcagtatttgactttctgtttctgagatgtttcacttaatggccaacaagcatatgaaaaaatgatcaacttaattgataatttttagtgtaggtaacttgcttctagctctactagttaaatttacttcttcttcatggtgaatttcacatttttatgttttccttctggtgactttcctttctggaatctagagtcaagacaaggtaactagaaagagaagaaattgctgtttaaaaccctctccttctcatgactccacataaagtcatagcagaaaatacctctacctacatgaatatataaagagttactaagttcactccctatgtatctagatatatgtgataatgtacagaaatgaattcacacaaactggccaactaggatatatgtaccaacacaaacaagcatgacacagcagatttatatgccaaggaatatcagaatacaccaagaaagaaaaacagcagtatttgtttcttcatgcagactttgtttgatatggctagatacagagatgagagaaacgtcttacaaataagcacaaaataacacataattttcttttacatttttactcttttaccttcatatctaaaggaagaaatcaaggcttttccccagttactcaggtgataatcctcaatctcaattacatcttttgaggattatccatgca

SEQ ID NO: 25159 - DNA, 606 bp, Homo sapiens
gctgattgaagaagtctaagatgggagccaggaagttggatttctaaycattaccagctgcggctggtccaggggacacaccgaaaagcaagctgtttagagtcctacaataaatagtttggagatcttaccatatgccacattattttatcctgaaatgtttccattcatttcatcctctttctcaactgatgagattcattccagtctttttttttttttttttcagacagagtcccgctgtgttgcccaggctggagtgcagtgctgcgatctcggctcactgcaagctccacctcccaggttcacaccattctcctgcctcagcctccagagtagctgggactacaggcgcatgccaccacgcccggctaattttttgtatttttagtagagacggggtttcaccatgttaaccaggatggtctcgatctcctgacctcgtgatccgcccgcctcagcctccagtctttttttatctgagggctttcctgagcccaacacagagaccagcgtccaacccactccacccacctgaaaggccaggataatggtctcactgcaccctttgaatacctccgtcactaattctcatttctcttacct

SEQ ID NO: 25160 - DNA, 606 bp, Homo sapiens
gctgattgaagaagtctaagatgggagccaggaagttggatttctaaccattaccagctgcggctggtccaggggacacaccgaaaagcaagctgtttagagycctacaataaatagtttggagatcttaccatatgccacattattttatcctgaaatgtttccattcatttcatcctctttctcaactgatgagattcattccagtctttttttttttttttttcagacagagtcccgctgtgttgcccaggctggagtgcagtgctgcgatctcggctcactgcaagctccacctcccaggttcacaccattctcctgcctcagcctccagagtagctgggactacaggcgcatgccaccacgcccggctaattttttgtatttttagtagagacggggtttcaccatgttaaccaggatggtctcgatctcctgacctcgtgatccgcccgcctcagcctccagtctttttttatctgagggctttcctgagcccaacacagagaccagcgtccaacccactccacccacctgaaaggccaggataatggtctcactgcaccctttgaatacctccgtcactaattctcatttctcttacct

SEQ ID NO: 25161 - DNA, 606 bp, Homo sapiens
gctgattgaagaagtctaagatgggagccaggaagttggatttctaaccattaccagctgcggctggtccaggggacacaccgaaaagcaagctgtttagagtcctacaataaatagtttggagatcttaccatatgccacattattttatcctgaaatgtttccattcatttcatcctctttctcaactgatgagattcattccagtctttttttttttttttttsagacagagtcccgctgtgttgcccaggctggagtgcagtgctgcgatctcggctcactgcaagctccacctcccaggttcacaccattctcctgcctcagcctccagagtagctgggactacaggcgcatgccaccacgcccggctaattttttgtatttttagtagagacggggtttcaccatgttaaccaggatggtctcgatctcctgacctcgtgatccgcccgcctcagcctccagtctttttttatctgagggctttcctgagcccaacacagagaccagcgtccaacccactccacccacctgaaaggccaggataatggtctcactgcaccctttgaatacctccgtcactaattctcatttctcttacct

SEQ ID NO: 25162 - DNA, 944 bp, Homo sapiens
aacattttgcagaaagacaacccatcatgaagccccacagactcggggacacagcactacagccagggcagccccctaggtgtgcaacccgccccsccaatccagtcccctacagacagctaacaggtctacaggcaaggtacataaatgaaggcgttttcaaagaaaaggacatgaaagcttggctacccataatcttaccaaaagaagaatgaaagaagatgaaacggaggccaggtgcggtggctcaagcctgtaatcctagcactttgggaggccgagatgggtggatcacaaggtcgaggttcaagaccagcctggccaatatgacgaaaccccgtctctactaaaaatacaaaaattagccgggcatggtggtgcgtgcctgtagtctcagttacttgggaggctgagggagaagaatcgcttgaacccgggaggcaggggttgcagtgagccaagatcgtgcctctgcactccagcctgggtgacagagtcagactctgtcacaaaaaaaaaaaaaaacaataaaaaataagagatgaaactgaaatacatttattattctgtctcaagaaagcattttctgtatagcctctcattttaatagcagaaatggttttggaataatcataataggaataaaaaaacaacttttaataaaattacacttcatcaacttagggaggggaattatccaccacgttatggctgcggtatttctgagaatcaccaaggccagtcaacatacacatggtctaaatttttggaagtagagttttaaattaaaactgaaaacgagtttaagtgagcacttttattccagtactttcaggacaaccaaatgataggctgtaggtatatagcgtatctaactggctctgcatttttttcaatggtgtccaatgagaaatgtccctatacacacagtcgcatatacccat

SEQ ID NO: 25163 - DNA, 944 bp, Homo sapiens
aacattttgcagaaagacaacccatcatgaagccccacagactcggggacacagcactacagccagggcagccccctaggtgtgcaacccgccccgccaatccagtcccctacagacagctaacaggtctacaggcaaggtacataaatgaaggcgttttcaaagaaaaggacatgaaagcttggctacccataatcttaccaaaagaagaatgaaagaagatgaaacggaggccaggtgcggtggctcaagcctgtaatcctagcactttgggaggccgagatgggtggatcacaaggtcgaggttcaagaccagcctggccaatatgacgaaaccccgtctctactaaaaatacaaaaattagccgggcatggtggtgcgtgcctgtagtctcagttacttgggaggctgagggagaagaatcgcttgaacccgggaggcaggggttgcagtgagccaagatcgtgcctctgcactccagcctgggtgacagagtcagactctgtcacaaaaaaaaaaaaaaacaataaaaaataagagatgaaactgaaatacatttattattctgtctcaagaaagcattttctgtatagcctctcattttaatagcagaaatggttttggaataatcataataggaataaaaaaacaacttttaataaaattacacttcatcaacttagggaggggaattatccaccacgttatggctgcggtatttctgagaatcaccaaggccagtcaacatacacatggtctaaatttttggaagtagagttttaaattaaaactgaaaacgagtttaagtgagcacttttattccagtactttcaggacaaccaaatgataggctgtaggtatatagcgtatctaactggctctgcatttttttcartggtgtccaatgagaaatgtccctatacacacagtcgcatatacccat

SEQ ID NO: 25164 - DNA, 588 bp, Homo sapiens
aaaaatgaaaaacataacaattggtaaacagaacagtacaatgtaaacaactgacaagaaaatgagcaagctgaagatcaagctgaagaattcttcccgagaggaaaaagtcatgggaaaaatgaaaaagaaaacctaagagacatagaagacagatcaaagagtcaatagacccttcctttattgaaaagatgttccaaaacagaatagagaggaagcaacaggagaaaccgtccaagaaccgaagcaagaaaaagaactctttagaataaaaaggcctcagctactgaaccaaataaataaataaatatcataaagaaaaaaacagatatatttgcctacaatgaaatgaaaaacttctaaaggacaaaagaggccatacaattaaggataagcaacagactgggagaaaaatatttgcaatatataactaatgtcaatgctgaaaattatgaagaattataaaaatttagaagaaaacactcaattgaatactggacrttatataagttaatgcctgccatcttcccaacagcctgtaaggtaggtgaatcttactatccttgttttacaaataaacaacccaag

SEQ ID NO: 25165 - DNA, 522 bp, Homo sapiens
atgagcagggttagaatgacctggaaacttgttagaagtgcaaatgcttggagcctgcctcatacctactgaatgagaaactctgggttaaagcccagaatctgttttcgcaactccaccaggtgcttctgatgcgagtttgaggaccactgacctagagggtaaattcaagctgcttaaccaggctcataggaccctagatccaaaactaaactccctaaattcaaatcccagctcsaccacagtttaactgtgagaccttatatgacccttaggcaaattacttctccatcctaaaactcagttttcttgtctgtttccatctcataggattcttgagagtattacatgaaataatccatgtaaatcacctagcacaatgcccagcatagaatagtgttcataaatgttaaattttcttaattagagaactattttctgttccttgattaagttgtgctctttcatacctccattccttaacatacattgttgctttggcctagaatgcccttctccacc

SEQ ID NO: 25166 - DNA, 522 bp, Homo sapiens
atgagcagggttagaatgacctggaaacttgttagaagtgcaaatgcttggagcctgcctcatacctactgaatgagaaactctgggttaaagcccagaatctgttttcgcaactccaccaggtgcttctgatgcgagtttgaggaccactgacctagagggtaaattcaagctgcttaaccaggctcataggaccctagatccaaaactaaactccctaaattcaaatcccagctcgaccacagtttaactgtgagaccttatatracccttaggcaaattacttctccatcctaaaactcagttttcttgtctgtttccatctcataggattcttgagagtattacatgaaataatccatgtaaatcacctagcacaatgcccagcatagaatagtgttcataaatgttaaattttcttaattagagaactattttctgttccttgattaagttgtgctctttcatacctccattccttaacatacattgttgctttggcctagaatgcccttctccacc

SEQ ID NO: 25167 - DNA, 499 bp, Homo sapiens
aaaatggaatcaatatgaaagatgtgggacccatcaagggaggctggatagagacaagagggacaaatggagaaacagagcactaagagttgtaatgaaactggctcttctgtgcatagttcattcagtggaaagttcagatgagagaggctgagccctccaactgggggaaggatctaccccatcaatgctatgggatgaacgattgttcttggccctacaattagctggtggcaaggccaattccccaattgtcacattttctccacatcacccacagatgggtaayatgcttcatcaacaactaagaacagccttaattagataccattctctaaggggtagctgtgtatttttttcttatattgggcataaaattattgacccaaactctaatggtgtctatttgtttacagagtttgaaggaagccttttactcaaggactaaaagtaacaataagaaggatgaagtgagactagctagatctatctgtacata

SEQ ID NO: 25168 - DNA, 499 bp, Homo sapiens
aaaatggaatcaatatgaaagatgtgggacccatcaagggaggctggatagagacaagagggacaaatggagaaacagagcactaagagttgtaatgaaactggctcttctgtgcatagttcattcagtggaaagttcagatgagagaggctgagccctccaactgggggaaggatctaccccatcaatgctatgggatgaacgattgttcttggccctacaattagctggtggcaaggccaattccccaattgtcacattttctccacatcacccacagatgggtaatatgcttcatcaacaacyaagaacagccttaattagataccattctctaaggggtagctgtgtatttttttcttatattgggcataaaattattgacccaaactctaatggtgtctatttgtttacagagtttgaaggaagccttttactcaaggactaaaagtaacaataagaaggatgaagtgagactagctagatctatctgtacata

SEQ ID NO: 25169 - DNA, 571 bp, Homo sapiens
actgtgccacccaggaggctgcagctgcctgggaccaggactctggctttggacttgggaaactgrcgctggcactggctgctggctccagatccgtgctgctctgctgtgctctacacctgccaaatgaggacccagaagcttagtgacaggacttgaggattcctgccctgagcctcttggcagcagaaacagcagaaccacagcccttgctccagccctgccttcacatatcagagcatccaataggaggagccagaattgtttttggaatcctagctgcaaaggagtcagggaagtgtaactgttagctttccagcctccgtagcacaacagggcatcccaggaggaggttggatgttcagataatagagtagaatggaggcgagtcctggggagaagcagcctcagccccgggggtttaggaggaggagcctgcagaagtggccaaaccaggagtgggcaatagccagacaaggagaatctgatttggaagccctgggtctttggcacatagaaatcagctggaaaacttgtcatggtgcaggtgcgaggccccaccctcagagac

SEQ ID NO: 25170 - DNA, 555 bp, Homo sapiens
gcgctttacaggacaactgcaaagaggaacagaggcgaaayacagggggagaccatgtgaccacgcgtggcactggccaatcccacagcagttggtgttaatgtgtgtcaccggaggcatacggggcgacggcgaaacgaagggtggggtccaggcatatgccggtggaagggggaaacgggtgacatttccgtcaacgccaaggaaaaacaaacaacacctgggaaccgtggggtaggggggcctcctgtgcctgacccaagccacgttttcaaatgcctaccagaggagcaaagaggtttctgccaatttcgcaacacccccaatcctccaccgaactggtagccctgacgcaacttcggctggtacaaacccacagagagtgggaaagaaacacacagagagtgagagacagagagagaagagagaatgggagacacacacacagacacacacgcacacacacgcagagtcatacatcggaggcattgaaccctgagaaccctgaggcaacccctgaggatccggggttctgctctggaggagaacgaccct

SEQ ID NO: 25171 - DNA, 555 bp, Homo sapiens
gcgctttacaggacaactgcaaagaggaacagaggcgaaacmcagggggagaccatgtgaccacgcgtggcactggccaatcccacagcagttggtgttaatgtgtgtcaccggaggcatacggggcgacggcgaaacgaagggtggggtccaggcatatgccggtggaagggggaaacgggtgacatttccgtcaacgccaaggaaaaacaaacaacacctgggaaccgtggggtaggggggcctcctgtgcctgacccaagccacgttttcaaatgcctaccagaggagcaaagaggtttctgccaatttcgcaacacccccaatcctccaccgaactggtagccctgacgcaacttcggctggtacaaacccacagagagtgggaaagaaacacacagagagtgagagacagagagagaagagagaatgggagacacacacacagacacacacgcacacacacgcagagtcatacatcggaggcattgaaccctgagaaccctgaggcaacccctgaggatccggggttctgctctggaggagaacgaccct

SEQ ID NO: 25172 - DNA, 555 bp, Homo sapiens
gcgctttacaggacaactgcaaagaggaacagaggcgaaacacagggggagaccatgtgaccacgcgtggcactggccaatcccacagcagttggtgttaatgtgtgtcaccggaggcatacggggcgacggcgaaacgaagggtggggtccaggcatatgccggtggaagggggaaacgggtgacatttccgtcaacgccaaggaaaaacaaacaacacctgggaaccgtggggtaggggggcctcctgtgcctsacccaagccacgttttcaaatgcctaccagaggagcaaagaggtttctgccaatttcgcaacacccccaatcctccaccgaactggtagccctgacgcaacttcggctggtacaaacccacagagagtgggaaagaaacacacagagagtgagagacagagagagaagagagaatgggagacacacacacagacacacacgcacacacacgcagagtcatacatcggaggcattgaaccctgagaaccctgaggcaacccctgaggatccggggttctgctctggaggagaacgaccct

SEQ ID NO: 25173 - DNA, 546 bp, Homo sapiens
tttttcattttcccagagccagtgctggctggcgtggcgagtgacaacattgcagcatttgcaaagtgactacgtcgtagcatttgcattatcttccttgstgtgcatatctttcaaccatgtcagggaagcggttggaaggaaaaatcacagagcacataagaaggacttctgggcctgctccggaggcttgcagaggacatgcccgaaggggtgcatgaagccttctgtcccatacctgtcccttgcctcgatgggattctgtacaccacaggtttctgtcaccactttgccttgaaattggaggcctcagttatgaattttataacaacatcctcaaataaggcctcactttgcagtgggtgcctaacttaaggatgatttttaaatgactgtgtcatgtttgtaaagacactttgtacttatcgaagtgcttgcatatataccatctcatttaatgcttgccaagattctgttaggtatgcgaggcaggtactgttatcttcactttatgaatgaggaaaaggcacacagaagctaataaca

SEQ ID NO: 25174 - DNA, 546 bp, Homo sapiens
tttttcattttcccagagccagtgctggctggcgtggcgagtgacaacattgcagcatttgcaaagtgactacgtcgtagcatttgcattatcttccttggtgtgcatatctttcaaccatgtcagggaagcggttggaaggaaaaatcacagagcacataagaaggacttctgggcctgctccggaggcttgcagaggacatgcccgaaggggtgcatgaagccttctgtcccatacctgtcccttgcctcgatgggattctgtacaccacaggtttctgtcaccactttgccttgaaattggaggcctcagttatgaattttataacaacatcctcaaataaggcctcactttgcagtgggtgcctaacttaaggatgatttttaaatgactgtgtcatgtttgtaaagacactttgtacttatcgaagtgcttgcatatataccatctcatttaatgcttgccaagattctgttaggtatgygaggcaggtactgttatcttcactttatgaatgaggaaaaggcacacagaagctaataaca

SEQ ID NO: 25175 - DNA, 560 bp, Homo sapiens
tggtgaaagagcctcatctttcctgggtgcaccctattccatgtagctaggtgaagctggattcctcaagacacacccagcacccactcttcagataggtgtgggcctgggacccaagctccactcctaagagtgtcccatgcctccagccacagcgattggtccaggaatgaaaacttactgggcaggaccaatagagtcctttatttaagggagttgaggggaacaccaaaggagagaggatctttctccttctgaggacaaggtcactggggcctatgaaaacctggaacttcagattctcgatcaccagaggacgctggaggatggagaagtagatacaccarttgtagtgaacacagccaacaccaagatcttagcttctaaatacctttccccactaaaaggaacaaggctccttggagaaaaggtcgattccaggactcaagcagggaaagtccaggatgaacctgagacacctgaatgataaagacatgtcaaatgtcaaagggacacaaaagcttgttttttttttgttttttttttttttttagagctga

SEQ ID NO: 25176 - DNA, 560 bp, Homo sapiens
tggtgaaagagcctcatctttcctgggtgcaccctattccatgtagctaggtgaagctggattcctcaagacacacccagcacccactcttcagataggtgtgggcctgggacccaagctccactcctaagagtgtcccatgcctccagccacagcgattggtccaggaatgaaaacttactgggcaggaccaatagagtcctttatttaagggagttgaggggaacaccaaaggagagaggatctttctccttctgaggacaaggtcactggggcctatgaaaacctggaacttcagattctcgatcaccagaggacgctggaggatggagaagtagatacaccaattgtagtgaacacagccaacaccaagatcttagcttctaaatacctttccccactaaaaggaacaaggctccttggagaaaaggtcgattccaggactcaagcagggaaagtccaggatgaacctgagacacctgaatgataaagacatgtcaaatgtcaaagggacacaaaagcttgttttttttttgttktttttttttttttagagctga

SEQ ID NO: 25177 - DNA, 1046 bp, Homo sapiens
atatctgtcttctgtccatcttagtacctgaggcatgtgtgtatgtattgactttttgcatgtttttgttaaattttaacctcttaagatctgagtctacctctccattacctgcagctttaactaagagttgaaactcaaagatgtcattaatataaatgagtaacataatgacacagttaccttattctgggggattaaaccctccttaaatcgcatacttaatgatcaagataagaatcttttaagttatgtgcaataaatttttagcaagcactttattacatcttaatgcaatctaagtatttaaacatcacagatgccaaattagactgtatttattaagctaggttttgacaaacactaagctaaataaggcatcatgctcatgctcaatactttattcgttccttaagtttcagaattaaatgtgccatccttttaagttataaaccatttgtgattatttttgaaatgcttattttaaaatagaagaaaactttccaagcaagcattttctttcctcaggaaaaggaatttgtgtctagacaagagcagatggatgctccctgattcttttagggtagttgtcgtgaatggaatttagagagtttttttttttttttttaccccctccttctaggcagtccttyttcatcttttatcaaacaattcatctcatgggttatgtattgccttctggaacttaaatttgatttatgtttgaaatatacatttataattttcccaacatgaatttatggaaatggcagcctttagaaactcccacagaggtaacagatgattgactcggatgaaagaaagtccaagaatgtatgcaggaagaattgggactggccaagatgatgatagttgtctggagaggtagaaacagctgacaaatagcagcaaatagggagcagattaagccagggtactgttgttcttgctcctggattccaattttcaacttcgaacctgatgtctcaagacagaagagaagctagtatatcattggtctaggcagaggaagattgaaatttaga

SEQ ID NO: 25178 - DNA, 427 bp, Homo sapiens
cccagggttcaccrgaggagatgggatatggagctgggcagaggggatgccatgaccagagagggcacaacatgggtccaagatacccaggatggactcggcccagaattggctatccttgggcaaaacggccaagagactgtggtgcagtatgaggctccagcccctgctacagacagagacaccgagccaccctctgccctgccaggagcaggcatgacctctgccactccacacccccaaggatgacgttcaaacctgttcttagattcggcccatcagaacagacactgacatggatgtcccgcaggactgtgcctatgtgtgctagctgtgtgtcactgcgtgtgcccatctgtgggcagggagcatcctggagctgaacatgggcccacccgctgccttctgcaaacagggccctgttccc

SEQ ID NO: 25179 - DNA, 632 bp, Homo sapiens
tgcatgtttctcttcagcagattgtgcacgaatgattttactaatgaggtaaggaggacacacctcaataaagccaagtaattactctaactcaaartacttgcacagcacctccaatatggattataaactagcatgttcagataaactgaagcccactcagcttctgtgttggatgtggaaatcctccagcattcagcatgggcatgcacagagccggacgcagggtttttttgcaagaaagtcgtgagacatgaagactgtaaaacaagcctagtttctgggatacagaagtacagaccatcagtttgtgtttgtcctcgagtctttgtcttcttataactgaagggccttggacaggtgatccccatgagcccccatctcttcaggatattcctcatgtaaaacagaagtaacaagatggatctcgcagtacaacggagggggttagagtagataaggcgtgcaacagtgctgtgaaatctgtaaaatcctacaaacacgttgattacaaagatgactgtgctaagctcaagaatagctacatgtagtattcccaacaggaaactccccccaatgtccagacacgtccaatctgacccaaattaatggattctcaaagagaatgtaat

SEQ ID NO: 25180 - DNA, 632 bp, Homo sapiens
tgcatgtttctcttcagcagattgtgcacgaatgattttactaatgaggtaaggaggacacacctcaataaagccaagtaattactctaactcaaaatacttgcacagcacctccaatatggattataaactagcatgttcagataaactgaagcccactcagcttctgtgttggatgtggaaatcctccagcattcagcatgggcatgcacagagccggacgcagggtttttttgcaagaaagtcgtgagacatgaagactgtaaaacaagcctagtttctgggatacagaagtacagaccatcagtttgtgtttgtcctcgagtctttgtcttcttataactgaagggccttggacaggtgatccccatgagcccccatctcttcaggatattcctcatgtaaaacagaagtaacaagatggatctcgcagtacaacggagggggttagagtagataaggcgtgcaacagtgctgtgaaatctgtaaaatcctacaaacacrttgattacaaagatgactgtgctaagctcaagaatagctacatgtagtattcccaacaggaaactccccccaatgtccagacacgtccaatctgacccaaattaatggattctcaaagagaatgtaat

SEQ ID NO: 25181 - DNA, 579 bp, Homo sapiens
tgagaaagattaacaatgtgtgcagagttgtacaaagataaatacatacctgtttatctttcctacagctctcaggtgaagctttaattatttggtgaaacagttaaaaatttggctaaggtcatgctagaatataayttattgatttctatgagggtggatactttttttcaatttcccagtttctatgaggagagatttttccctagacaatctggccaacctttaaggttttctaccaaagtagaataccttgtcatgtagagaatgtacaatgcccatctgcttactctaaacaatcttgtatcgccctccttgcctcctccatctggcccttctcacttgggccacctgcccacaacatgcactcctgtggcctgtctctgtggcctgtaattcttacagggacccaccccagaggaggcctgaggcttcctggagctgctcgttgaggtggtagaaagtctacttctgggattcagtgttagaatttctatcattcctgcaccacaaagccacacttgtaaacagttctgccagtaataaagtggatgtttttgtcttcatctgccttccacc

SEQ ID NO: 25182 - DNA, 622 bp, Homo sapiens
ataatttataacactgaacaaatggaaacatttaaatgttcagcaacagaatattggtcatctaaattgtgatataaatgatataatgaaatattacatagccattaagaataatgttttcttagaatgtgaaggatgctcatggtacaattttagggaaaaaataggaggaagtaaaggcgtttacatatgtataaatacaaatatgaaatatatcattcaaaatgtggcaattttgtactatacatayatacacacacccttgcatagaaagaaagacatcataatattaccagagattaactatgagtggtaaaattatggaggattttattttccttttagaactttcctttattttccatttttctcccaagattagaaaacaagtatcaatcaaaaattgccataaaaacagtataagtttttgaactttagcaaaaagttacacaatgtctgaaagattctggtaattcactttttgaaaaactttaaagcagaatacactcataattatgcataattattatcaccaacgcagtttccaagatccgtgatttgtaccatgttgctcaggcctgcgatggtggtctctgatcctccctatagtgctacagtagtt

SEQ ID NO: 25183 - DNA, 622 bp, Homo sapiens
ataatttataacactgaacaaatggaaacatttaaatgttcagcaacagaatattggtcatctaaattgtgatataaatgatataatgaaatattacatagccattaagaataatgttttcttagaatgtgaaggatgctcatggtacaattttagggaaaaaataggaggaagtaaaggcgtttacatatgtataaatacaaatatgaaatatatcattcaaaatgtggcaattttgtactatacatacatacacacacccttgcatagaaagaaagacatcataatattaccagagattaactatgagtggtaaaattatggaggattttattttccttttagaactttcctttattttccatttttctcccaagattagaaaasaagtatcaatcaaaaattgccataaaaacagtataagtttttgaactttagcaaaaagttacacaatgtctgaaagattctggtaattcactttttgaaaaactttaaagcagaatacactcataattatgcataattattatcaccaacgcagtttccaagatccgtgatttgtaccatgttgctcaggcctgcgatggtggtctctgatcctccctatagtgctacagtagtt

SEQ ID NO: 25184 - DNA, 622 bp, Homo sapiens
ataatttataacactgaacaaatggaaacatttaaatgttcagcaacagaatattggtcatctaaattgtgatataaatgatataatgaaatattacatagccattaagaataatgttttcttagaatgtgaaggatgctcatggtacaattttagggaaaaaataggaggaagtaaaggcgtttacatatgtataaatacaaatatgaaatatatcattcaaaatgtggcaattttgtactatacatacatacacacacccttgcatagaaagaaagacatcataatattaccagagattaactatgagtggtaaaattatggaggattttattttccttttagaactttcctttattttccatttttctcccaagattagaaaacaagtatcaatcaaaaattgccataaaaacagtataagtttttgaactttagcaaaawgttacacaatgtctgaaagattctggtaattcactttttgaaaaactttaaagcagaatacactcataattatgcataattattatcaccaacgcagtttccaagatccgtgatttgtaccatgttgctcaggcctgcgatggtggtctctgatcctccctatagtgctacagtagtt

SEQ ID NO: 25185 - DNA, 1309 bp, Homo sapiens
catctgtttctaatttatggataatagttagcatatagtagcctcagctcaatcccagtgtgactttattcaaatatgaaaagcacagaccacttagaattttgcttaaggtctggaaaactttttcaaccattagagtcaataaatcctcagtgtgattgattatttattattaggtcagaagtttaccttgtatacctattgctgtgtccacagaacccgaagactcagttactatttcttccctacacacctcatatttgctgctttgtgcattatgatccccaggataaaagcagggacaatttatttagtttgggatttttaatttctcccatcaccggtttggcagagggctttgaaagagaacaacctcttagaatcgggaaaggagaattaatctataaaaattcaattaacctgtacaatgcttgttgagtcctcatggaacttaatcagagttttcttaacttattagccgcttcacctattttgcatcttgtagcctatgacgctggcactaaacaatcagaataatgctgacaggttaaacaaactaataaactaaatccaaggattagactcttccatcacttgcagaagacatccaaataaatctcacctgtgagttccaatagcaagactctgagagctggtgggctgtcaggacaggccatcacaccctgcctgactcaggaatccacaaagcaggttattgcctactccactcctgacttgctgtatccacttggggaaagctccagacgatactaaacctatgagttgaagcttggggaccccatttaatgaagtttatctcagacttagcattctcaataatgaaggagaatacttaatgatgataaattgttctaagctcttcaaatgaagagctaagagatctgaatggaattaggagctgtttggataagttattcagggattccaagctcagtgtcttctctaatcagataaaggctgaacagttaaaggctgtttagcaaccaactatgcatcagacacagatttgtggggaacatatttgaaagaaaagaaggtrgatttagttttgaatatttagggcttgtgatgcctagagaatgttcaagtggaatgcccagcgggcagacagatttgcagctctggagagatttttgacttggggataagatttggggacatcagtgtctaagggggagttggacctttgggtataaaagagggattatgtatatagagaaaagaagagtgaattaaggaaagaacttaaggaatgtggaattgggaatttaattaaagaagagcagga

SEQ ID NO: 25186 - DNA, 1040 bp, Homo sapiens
tgcagtaaaatgcaacttatagaaaatacatataattctacttaaaattacctgggatcttaagagcttgaggaaaatttgaggccatataatacagagatttcccaaaccggttacacattaaatcacttgggaagtttatttctaatgcattttccaataccctctctcaggttctggtaaggccttaagatccaccagggtgattctgcttcagctaaaccatggactactgttttggaggcagtgctctaatgcatcatccttgcccctactctactaggctggtaactctttctagtaaatgtgaaacttcaaaggatttccttcctatttgtgggcgctaggcactttaataaaggtaggatatcttatttaatccagataaacaatgttgtcatttactttcattttattttaagtcctattttgattaaaactttagtaagtaaattacagcattatttttctggggctataagttgctaattcatgggcttgcttactagtcttttcactgcctgtattagtccattcttgcattgctataaagaaatacctgagactgggtaatttataaagaaaagaggtttaatcgactcacagttctgcaggctatataggaagcaaggctgcatctgcttctggggaagcctcggggagattttactcatggcagaaggcgaagcaggagccagcccttcacatggctggaacaggtggaagaaagagagtgtagagggaggtgctacacacttttaaacaaccaggtctcatgagaactgactacacagtaccaggaaaggatggtgctaaaccattcatgggaactccacacccatggcccaatctcttcccaccagccccacctccaacactggatattacaacttgacatgagatttgggagggacacaggtccaaaccatatcactgccaatatttattttgcagacattccactttgatctgggaaactgaaatataagtaatagaattagtcccagtacaatttactttctgccytacagagggtaata

SEQ ID NO: 25187 - DNA, 1157 bp, Homo sapiens
ggagctttctggatgaccccatctggcgcgggcctctgcccagcaatggggtcatgcatgtggacgagtgtgtggagtttcacagactgtggagtgccatgcagtttgtctactgcattcccgtggggacacacgagttcacagtcgagtaagtgtgtgctgagagcaggacaaagccccagaggaggggaggagctgtgggggaggggaggcgtgttaggctaacaagcagccagccatgctcaggaagtggaccagaaactcactgagcggcttttaagcctcctgtagtggggattcttacttgatgccaaagagctgactcaggactctagtattcagggagtctctgaacccacggcaattgtatgcacgttgggcgtgcatttttctaggtgggaggtycatagagtcattcatcacagaggggatatgatctaaaaagggacaggaagcagcacaccagaagagcccaaaaaagttatttatcaaaaccagggaacagccacctggctgcccggcattctcttcctggctgtggaaggtgactgtgtaggcacagacagtaatgcagatggcttggtcactgacatctggagacagactgagaaaagacttcataacgtatcactcatctcccattctgtttctgcttcttgttcctaggcagtgctttggtgatgggctacactgggctggctgtatgatcatcgtacttcttgggcagcagcggcgttttgctgtgctggatttctgctaccatctacttaaagtccagaaacatgatggcaaagatgagattattaaaaatgtggtatgtggatgaaaatctcgcaccatctatggaccttttgcaaaagcatactttctttgtgttataagttcttgtttctggcaatgtttttcatcctagtacgtaaggtgccaccaacagaaactttcttttcgttcccaaaatgaatctaaatataattggccagtaaagcagtctggcagagaaaatactcattgttccgttttccttctcaaggtacttagatttacttccagtcttacaggatctgcattgtcagaatattggcaactatagtcttcgggcccctggaagtctgtgctttcttggctgctttaaaggccttttgtctttgttgctttat

SEQ ID NO: 25188 - DNA, 1157 bp, Homo sapiens
ggagctttctggatgaccccatctggcgcgggcctctgcccagcaatggggtcatgcatgtggacgagtgtgtggagtttcacagactgtggagtgccatgcagtttgtctactgcattcccgtggggacacacgagttcacagtcgagtaagtgtgtgctgagagcaggacaaagccccagaggaggggaggagctgtgggggaggggaggcgtgttaggctaacaagcagccagccatgctcaggaagtggaccagaaactcactgagcggcttttaagcctcctgtagtggggattcttacttgatgccaaagagctgactcaggactctagtattcagggagtctctgaacccacggcaattgtatgcacgttgggcgtgcatttttctaggtgggaggtccataragtcattcatcacagaggggatatgatctaaaaagggacaggaagcagcacaccagaagagcccaaaaaagttatttatcaaaaccagggaacagccacctggctgcccggcattctcttcctggctgtggaaggtgactgtgtaggcacagacagtaatgcagatggcttggtcactgacatctggagacagactgagaaaagacttcataacgtatcactcatctcccattctgtttctgcttcttgttcctaggcagtgctttggtgatgggctacactgggctggctgtatgatcatcgtacttcttgggcagcagcggcgttttgctgtgctggatttctgctaccatctacttaaagtccagaaacatgatggcaaagatgagattattaaaaatgtggtatgtggatgaaaatctcgcaccatctatggaccttttgcaaaagcatactttctttgtgttataagttcttgtttctggcaatgtttttcatcctagtacgtaaggtgccaccaacagaaactttcttttcgttcccaaaatgaatctaaatataattggccagtaaagcagtctggcagagaaaatactcattgttccgttttccttctcaaggtacttagatttacttccagtcttacaggatctgcattgtcagaatattggcaactatagtcttcgggcccctggaagtctgtgctttcttggctgctttaaaggccttttgtctttgttgctttat

SEQ ID NO: 25189 - DNA, 1157 bp, Homo sapiens
ggagctttctggatgaccccatctggcgcgggcctctgcccagcaatggggtcatgcatgtggacgagtgtgtggagtttcacagactgtggagtgccatgcagtttgtctactgcattcccgtggggacacacgagttcacagtcgagtaagtgtgtgctgagagcaggacaaagccccagaggaggggaggagctgtgggggaggggaggcgtgttaggctaacaagcagccagccatgctcaggaagtggaccagaaactcactgagcggcttttaagcctcctgtagtggggattcttacttgatgccaaagagctgactcaggactctagtattcagggagtctctgaacccacggcaattgtatgcacgttgggcgtgcatttttctaggtgggaggtccatagagtcattcatcacagaggggatatgatctaaaaagggayaggaagcagcacaccagaagagcccaaaaaagttatttatcaaaaccagggaacagccacctggctgcccggcattctcttcctggctgtggaaggtgactgtgtaggcacagacagtaatgcagatggcttggtcactgacatctggagacagactgagaaaagacttcataacgtatcactcatctcccattctgtttctgcttcttgttcctaggcagtgctttggtgatgggctacactgggctggctgtatgatcatcgtacttcttgggcagcagcggcgttttgctgtgctggatttctgctaccatctacttaaagtccagaaacatgatggcaaagatgagattattaaaaatgtggtatgtggatgaaaatctcgcaccatctatggaccttttgcaaaagcatactttctttgtgttataagttcttgtttctggcaatgtttttcatcctagtacgtaaggtgccaccaacagaaactttcttttcgttcccaaaatgaatctaaatataattggccagtaaagcagtctggcagagaaaatactcattgttccgttttccttctcaaggtacttagatttacttccagtcttacaggatctgcattgtcagaatattggcaactatagtcttcgggcccctggaagtctgtgctttcttggctgctttaaaggccttttgtctttgttgctttat

SEQ ID NO: 25190 - DNA, 601 bp, Homo sapiens
agggatgataataggattccttcctcatacgattgttgacaggagtgagyaattaatgtagagagggttgggatggggcctgacatacagtaaatgctgtatgatatttcctattgttacttttacttgagttggattttctgttacttcaactgcaagatcaagacaaaaccttccttggttgcctctgggttaaaatgttcctaagcacccacatgtcccaggaacgggaaattaccaagccactcaggtatgccaggaagtgccaatcagaagcgctttccccatgccaggccctggcatctaccacccactgctgggctgtcctgtttccatgcagaaagggtacagccgtacagctctctccctgcccttcggcccacttaggctgttctcacgctccggccctctgatttggaaaccagacccgctccttcctgggcagcacctggccctgcctcggtctctgtacctacaggaaaccagatgtgaggctggtttatggaggagtgagaagaaaatacaatctctcaggatgtttgttctagttcctttctaaccctagcttatcttgttacttggcctctatttttgtttgtta

SEQ ID NO: 25191 - DNA, 305 bp, Homo sapiens
acccacctcggcctcctaaaatgctgggattacaggtgtgagccactgcacctggccaatcataaaaaatatctgttagacaccagctgtgtgcctgcaactgtctaggcactttattttatttatttatttattttttgagatagactcttactctgtcacacaggctggagtgcagtggcacgatctcaactcactgcaacytccgtctcaggggttcaagtgattcttagcctcctgagtagctggactacaggcatgtgccaccacacccagctaattttggtatttttggtagagacagg

SEQ ID NO: 25192 - DNA, 598 bp, Homo sapiens
taaaagtaaaactagattgaatcagatttcccccttttttattccagggggagggggaaaggtctttgtttctttcatatgtttaaagaatcttcaaaatattttaatgatagagttgtctatctgtttcatattatcatatctccattagccttctaaactcagccatattatttgattccttgaaaaccatctaatgtttaagaacactatattttccccttttttcttaattgtttaacttctccaccagtcacaaacactgttattcagccttaatttttttttttttttttttttttttgagacagtgtttcactcttgtcactcaggctggagtgcataggcaccatctcggctcactgcaacttccgcgtcccaggttcaagcgattctcctgcctcaacctcccgagtagctgggattaccggcacccaccaccactcccagctgatttttgaatttttagtagagacgatgtttcaccatgttgtctaggctggtctcaaactcctgacctcagatgatccacctgcctcggcctcccaaagtgctgggattacaartgtgagccaccacacctggcctattcagccct

SEQ ID NO: 25193 - DNA, 844 bp, Homo sapiens
gactaataatgatatttacatttaatgagtgcttgagtctgtgccaggctaatcctcacaatgacctcatgaagtaggactattattatctccattgtttttattcttttttgagacggagtctcgctctgtcacccaggctggagtgcagtggtgcaatctcggctccctgcaaccctcgcctcccgggttcaagcaattctcctgcctcagcctcccaaatagctgggataacaggcaccttccaccaagcctggctaaattttgtatttttagtagagacagggtttcatcmtgttggccaggctggtctcgaactcctgaccttgtgatctgcctgcctcggcctcccaaagtgctgggactacaggcgtgagccaccacgcccggccagttatgatccccattttatagacaagaacattgaggcagaacattcacacaggaagtggcagagccagggctccacatgggcagtcagcgctttgtcttggaagagtaatgatccttgagaagaaaatttcacttgactttaccccttaaagatgaaggagaaattgaactcaaacattaggatttcaggttccgtgctttgatcattatctgcacacctagaactggacttgctgcacatttttgttcagatggagtaaagtgcttttctgctccatgacacccctgtgtcccgcctgcagccaccctgtgatgggtggggctgcttcctacctgcccctgcaagtgattcacagctcctctctcctcttggtagtagaagttttcctctctcccaaaggaacatttctcgccaagaatactttcccttgcatggcgtggatgcttattt

SEQ ID NO: 25194 - DNA, 479 bp, Homo sapiens
agctggtggagaggcacttcatcccccaagggcgggtttcattctcagcagcacagggaccctggcgctgggcctctgaaggttcaccctgcggggtgcaggaacagacatgggatctccagcggctgcagggaagaggtgcaagccccagccagcagagcctctggaaggggttaggtcgctgcgggcgagggcctgggcataaatgcggcattctcggtttcgatgctcccctgtaactggcatctgaagtttcckgtgaattccaagggaggcctcctgccaggctttgctcccttggggaatgttctctgtaagagccgaggccatcacggtctctgcctgcctctgacaattgtcacactcactgacctgtgccttgtgagcttggttcaattatctaacacacacctggtatttaattctaccttttacaaaacacccagccacggtggatcaaggaatcaaatttgctttta

SEQ ID NO: 25195 - DNA, 526 bp, Homo sapiens
aagaacatagatttttttgatactgaatgtaagatggggccaatttataggaggctttgaaagccaatagagggaagtttgtcagattgagaagacaatagggcgaygctttgttctgtttagtttttcagagtcaaacaaatatcatcactattgtttctagagcagagtgtgccgtatgcttgtctaaaagcaggccatgtggaggagctttcaagtaatcaagaggcaacatcttcactccttttgtatacatgaagaaattgaggtgttgaaattttaagtaacttcctcaaatttccacaaatttataagacagaaattgaattgaaattcatgaatcttttccaagagcccacagtactaagcactatatcacccagcttcctcttgggcagtaactaaaaataagatgagaagaatcatgaatagcatgtaggactatattatatttaattaggtataagtttgtttgcagggttgttgaagtgaagaaaacatgcatataagacacaattcagggtaa

SEQ ID NO: 25196 - DNA, 483 bp, Homo sapiens
cctgctcaatctcacttaatgcctcccagctttcagaatcaagtccaaaccctgcaacagcatgtaaggcatctaacaatrtgccttcccccttttgctgactcttcctttaaacatccttggcctcttctctcacaatgagccttttaaatgatacattatacacccactgaactatttgttattttctaccatactgtgcactctcaactctctcttgctagactactctttctaggctgtacagagccagagaaaactgtccttgaactctcaaaatatagaagaattttaaaattaataagtattgatcagtagctcaggtctacgagcaaggcattttaggaggtagatgttaagtgggtgattgagctacaccttatccaaaatgagagaaaatagacaagtctcaactccaccctgcctaaggcaagaaagttactgcaaatctataaaagaatattctttcctaccatcatttac

SEQ ID NO: 25197 - DNA, 1471 bp, Homo sapiens
ccctacccttggtgtcttttcttagtaattttccatccactgaccccttcactcttctcattggctataaatctccacctgtttttactgtattcagaattgagcctgatctctttcacctgttgtgttagtcttgacacccatcagaataatcctgaataaagtctttcttcctattttaacaaatgtcagaataattttttctttagcaatagctttgttgtaaaagcatcaagtaatatgtcaattagcatatgtactatgtatgctttttcctgtcatcagaaaatttgatatgcagtycatcaatgtcctttttcaagctatcaataacaacatgtggtgaaatatattattaatatatgataatacactattattaacagaactcaacttatgtctttcttactgacattgatctatttttagtacttattaagtagagttaaatcactagttagttaaactaatcctatagcctctcctctttccttatttataactcctttccctggcagtgagaaatctggcccgcatcatccacaatatatttacctattggcataatgtagtttgatatttgcttgctcatattcccataaaaaatgctaactagattataaaacttgtgtacaggtttgtttttctttttgtctttagccttacaatatgaaaatctagatactgtttaccaaagtcatttaagttagtccttttgttctccatttctctcagaatggttatgtaatttgtttgtgatacagttaggcttaattttactttttgcattctacattcatttctctccacatctcaatttatgtgacaattttgggggaggtgtgagagggtatgtgaaaaattatcatagttctaagagtcaaaaccatatcaataaaaagttaaaccaaaagaagttttactcacatttatccctactaccctgttcacatttcctagtttttttatttttattttatttactttatgtatttatttattttgacaaggtctctctccgtcacccagatggcatgcaatggtgccatcatcgctcactgcagccttgaaatcctgggctcaagggatcctccctccttagccttctgagtacctgggatttcaggtgtgcaccatcacacccagctaattattttatttgttgttgagatgggggtctcttcatgttacctactctggtctcaaactcctggcctcaagcaatccttccacctcagcctcccaaagtgctgggattacagatatgagccaccacctttggcctcacatttcctgattctttcaacccacctcccacccacaaatgtaaatgaaagtcgttgccattattttatgacctattatttttggaacaatttttttttctttgagatagagtctcactctgtcacccaggctggagtgcaatggcacaatctcggctcactacaacctccgcctcccagtttca

SEQ ID NO: 25198 - DNA, 539 bp, Homo sapiens
cattcctttcctgctatataaacccctaattttagtcagtcagggagatggacttgaagctgattttccatatcttaggcttcattcagcacccaattaaagccttcttcttggggaatactccttgtctcaatcattagctgtctgtgttgcaagcagcaggatctagaccaaatagcctgtgtatcagaaacaaattcaggtatttacgtatttctgcctccaagaatgtgttcatgaaatagaattaagaaggtacatagtgatrttttttggcagtattcattttctccacagccaaaatacaccctagagaggaacttagtcctcagacacaatgctttagggattgaaaagacagaaaaagtgatctcagaggactggaaaagagactgtatgtaacatatggtgatgatcatttattcttctttaatacatggcagattatttgggaagagcatagtcacatgacaatgcaagtgaggctcattcggtgctcctcaatctttaccaaatgggcttttgagaatttctttgtt

SEQ ID NO: 25199 - DNA, 526 bp, Homo sapiens
acataagaggtgcagtcaacactctggaccttgctttacttacccaatagatccacgactaggctagctgcactgacagcacaagttctggaaaaaatactctccccagaaagcatgcaggcttagccaatttgttattcacatctttaaaattattcctccaccatagtcagatttctaaaagtgcagggtatttctcttagtcttatggttgacacaaaatcactgatttatagagttgtgccttgtcctgttaggtgctaggcacactgtcccccttcagtgtaggtgccttgccagtaatatttgtcatttcctcctccactggtgttttcctcttattttggctccaaatatcaagtaggtcatccacagacaatagcacaggaaaacatgttwtgaattttagtcttttttcctcttcttataaaattgactaatgataggaaaactttctggctcattattcgtatcctaaaatttttcacatacctttgttttcagcattgaaatgtttccatcatca

SEQ ID NO: 25200 - DNA, 521 bp, Homo sapiens
atgagtgtcctgagataattgttgttaactggtggagttggtgatattttgcatgtcactcctagtctttgcccctgtggtatattaagaacgtgctttgagcaaatgctctcgcatgttaattgcaagtcaacctttaaaaaagaatttttcttgcggtaaacatctcttctatgagcacatctttagaagtttacatgaaaaattgacttaggtgtatatttggtattgtgttgtcaataggattgaatagaagagcatttacaaaaaaagtatactgtaaaatacaaagtggatttaacatatcaccttgataccatctgtcatgttccagaaataatcttatatttgtcatttatrtatagctgtttaacttgaagattaaaaaaaaactatttcatgccatttctgcaaggttaagatgtcctattacttagaaaaagtaactataaatataagactcataaatgaaattgtattcaaatgtattaaggggaagcatactattaatagatacttga

SEQ ID NO: 25201 - DNA, 970 bp, Homo sapiens
aagcgactctcctgcctcagcctcccgagtagctgggatcacaggcgtccacgaccacacctgcccggctattttttgtgtttttagtagagacgaggtttcgccatgttggccaggctggtttcgaactcctgacctcaggtgatccacctgccttggcctcctaaactgctgggattacaggcgtgagccaccgcgcccagcccagaatattcaaattttaaataaagacaggaccagtaacaatgtaccctgtggagccattttaagagtctgaggcgaaaggaaaaaataggactgaattttttcattacttttgacttttttttagagactgcattaaaatattatttatcttgattgctattttggcagcctctgaaatcctgtgctcatgacaaatgcctcactggcctcaccctagtcgcggcccgaccctgctaacggtatttctagaagatgggcagaggacaagccaaaccccgggagggaccacgcggcctgggaaacagttcggcaaggaggccgggcccctgtcccgcctctgagggcggaggactcggcctgcaccggacccaagcgaggggcagtctggcctctgctggcagaagcagcgcttccaagtattttcatatggtgactttgcagagctgcgcggtccagacgagggtttcaggctgcaaagcgggaaagtcttgggggccgctctgcgctccaagacagacgcccacaatctcttctacgtcgtgcaacattcaagcaggcggcctccttcccgcgctttcgcgcccacaggctgggccaatcacagtgccgcacttttcatactgcccgacaggcggtgggcgggccgctggtgactgttacccaacaggcgccgcggctgctccggtggcgccactgactcggaggcggctgcggagagcggggcgctggccygtggaggcggcagcggcggcggctttctagc

SEQ ID NO: 25202 - DNA, 632 bp, Homo sapiens
aattttttttttttttttgtaaagacgaggtcttcctatgctgcccagtctgatcttgaactcctcaagtgatccttccgctttggcgtcccaaagtactgggattataggcatgagccacctcaaccagcctaggactacatatgttgagtagccaggtgggagactacagattgccatgatgaaaagctgggaggtgtgggctgtcggtaaagctcttctgacactcaccacctgtgcaaacttggccaaattgcttcatcttgaacctcaactttctttgacataaaccagaggtctctttgggcagctggtgccctgcacaactccccgacgggcacaccaatatgggctacaggtgaatggcatcctctagagttgtgtggtacacaacctcaccaaatgtatgcagagttcttgaaagggctggattagacagtggttgccaaccctggctgcacaataccatcatctgctaagatttaaaaatgtcratacctgcccctgccccctgtgattctgacataattgtcctaggatgagacctgggccttggtactgttttcgtttttcctttttttcctggatagatagatggaaagaagggttgtttctttgctccccagagatta

SEQ ID NO: 25203 - DNA, 924 bp, Homo sapiens
tagccctctctccagacgcgctgctctgtccactgtccccgcctccaggacctgcgtcctcccagccccacatttgtgcgcaaagttgacggtcaccgggcccgcgcgcttcggcatctcgcgaaggcgctgcccgcgccctgagtccttccctggggctgtacgttggaaaggacagaggtctcctctgcttcgcagttgcaaaaggcttcacgttttcaccaaggggcagrtggggcagtaggggccctgggaggcctggtccaccaaggagggggaacccgcgcgcgcgcgcgcacgcacgtggcccggcgcgcccgggagacctccgtgtgatcaccgcgcgcagcagctcccgggcggaaacacctcccccctccacgggaaagtgggctcaaccgggggcggaaagcgacacggctgggggacgactacgtgctcccttaacccccttcccgctgtcagtaaggaagtggagataaaccgaagagaggccttggagaaaggagcagggcggggtgagggagttgtggggggattatttgagagtgaggtcaagctcaagagccccaggaccctctcagatcccccgtgcccgtgggaactgcgcgtccgccaccgatcctgcccgcgccgggttgagttcagtttgtgtctccgcgcgctgcgactttgcgcgcctgggggcctcccagctattgcctggctatgctggcgggaaaagtgtaagaaacgctgtttgccctgcaggagaagccagatacgcatggggtgcttcaggctggggaaaggtgcctgcctctgtggggtttttggaatcccaggtggcgcccttcctacagcccggcagaaggcagccatgccttcaggtggggaaagatctggaggtgcgggtgggaggaggacgaagcaggagggacaccc

SEQ ID NO: 25204 - DNA, 924 bp, Homo sapiens
tagccctctctccagacgcgctgctctgtccactgtccccgcctccaggacctgcgtcctcccagccccacatttgtgcgcaaagttgacggtcaccgggcccgcgcgcttcggcatctcgcgaaggcgctgcccgcgccctgagtccttccctggggctgtacgttggaaaggacagaggtctcctctgcttcgcagttgcaaaaggcttcacgttttcaccaaggggcagatggggcagtaggggccctgggaggcctggtccaccaaggagggggaacccgcgcgcgcgcgcgcacgcacgtggcccggcgckcccgggagacctccgtgtgatcaccgcgcgcagcagctcccgggcggaaacacctcccccctccacgggaaagtgggctcaaccgggggcggaaagcgacacggctgggggacgactacgtgctcccttaacccccttcccgctgtcagtaaggaagtggagataaaccgaagagaggccttggagaaaggagcagggcggggtgagggagttgtggggggattatttgagagtgaggtcaagctcaagagccccaggaccctctcagatcccccgtgcccgtgggaactgcgcgtccgccaccgatcctgcccgcgccgggttgagttcagtttgtgtctccgcgcgctgcgactttgcgcgcctgggggcctcccagctattgcctggctatgctggcgggaaaagtgtaagaaacgctgtttgccctgcaggagaagccagatacgcatggggtgcttcaggctggggaaaggtgcctgcctctgtggggtttttggaatcccaggtggcgcccttcctacagcccggcagaaggcagccatgccttcaggtggggaaagatctggaggtgcgggtgggaggaggacgaagcaggagggacaccc

SEQ ID NO: 25205 - DNA, 924 bp, Homo sapiens
tagccctctctccagacgcgctgctctgtccactgtccccgcctccaggacctgcgtcctcccagccccacatttgtgcgcaaagttgacggtcaccgggcccgcgcgcttcggcatctcgcgaaggcgctgcccgcgccctgagtccttccctggggctgtacgttggaaaggacagaggtctcctctgcttcgcagttgcaaaaggcttcacgttttcaccaaggggcagatggggcagtaggggccctgggaggcctggtccaccaaggagggggaacccgcgcgcgcgcgcgcacgcacgtggcccggcgcgcccgggagacctccgtgtgatcaccgcgcgcagcagctcccgggcggaaacacctcccmcctccacgggaaagtgggctcaaccgggggcggaaagcgacacggctgggggacgactacgtgctcccttaacccccttcccgctgtcagtaaggaagtggagataaaccgaagagaggccttggagaaaggagcagggcggggtgagggagttgtggggggattatttgagagtgaggtcaagctcaagagccccaggaccctctcagatcccccgtgcccgtgggaactgcgcgtccgccaccgatcctgcccgcgccgggttgagttcagtttgtgtctccgcgcgctgcgactttgcgcgcctgggggcctcccagctattgcctggctatgctggcgggaaaagtgtaagaaacgctgtttgccctgcaggagaagccagatacgcatggggtgcttcaggctggggaaaggtgcctgcctctgtggggtttttggaatcccaggtggcgcccttcctacagcccggcagaaggcagccatgccttcaggtggggaaagatctggaggtgcgggtgggaggaggacgaagcaggagggacaccc

SEQ ID NO: 25206 - DNA, 924 bp, Homo sapiens
tagccctctctccagacgcgctgctctgtccactgtccccgcctccaggacctgcgtcctcccagccccacatttgtgcgcaaagttgacggtcaccgggcccgcgcgcttcggcatctcgcgaaggcgctgcccgcgccctgagtccttccctggggctgtacgttggaaaggacagaggtctcctctgcttcgcagttgcaaaaggcttcacgttttcaccaaggggcagatggggcagtaggggccctgggaggcctggtccaccaaggagggggaacccgcgcgcgcgcgcgcacgcacgtggcccggcgcgcccgggagacctccgtgtgatcaccgcgcgcagcagctcccgggcggaaacacctcccccctccacgggaaagtgggctcaaccgggggcggaaagcgacacggctgggggacgactacgtgctcccttaacccccttcccgctgtcagtaaggaagtggagataaaccgaagagaggccttggagaaaggagcagggcggggtgagggagttgtggggggattatttgagagtgaggtcaagctcaagagccccaggaccctctcagatcccccgtgcccgtgggaactgcgcgtccgccaccgatcctgcccgcgccgggttgagttcagtttgtgtctccgcgcgctgcgactttgcgcgcctgggggcctcccagctattgcctggctatgctggcgggaaaagtgtaagaaacgctgtttgccctgcaggagaagccagatwcgcatggggtgcttcaggctggggaaaggtgcctgcctctgtggggtttttggaatcccaggtggcgcccttcctacagcccggcagaaggcagccatgccttcaggtggggaaagatctggaggtgcgggtgggaggaggacgaagcaggagggacaccc

SEQ ID NO: 25207 - DNA, 563 bp, Homo sapiens
tgtaggccagcccacaagtgctagccttggggctacagagccccgtgccatcatggtggcccacaaatgctgcccacttgcccaagagcagcctcctggaggcaggagctgtccagctgcctctgcccctcaccgctcctgccccagggctctgtctgaagcccttgctctgtaacagctgcctggtttcacgaatattctccgtttcctttcagatggatgcaaatgcatgggataggcccctgacacgtgagaccttgaaacccagaagcccagaatactagggccagctttctggttaagtctgcgttggacattttagactttctagagtttaggtagggtggccatagtatttattgtttgaactaatgcttctcgttgtttgctaatgtattttcttgggcaaattttttctttttttttcttttcagacagagtttcgctcgtcgccccggctggagygcagtggccctatctccgctcactgcaacctccacctcccggattcaagtgattctcctgcctcagcctcccaagtagctgggattacaggcaagcgc

SEQ ID NO: 25208 - DNA, 587 bp, Homo sapiens
gacctactcttgcatctgaggtgcctcagaagcagtgtcatatcatacacgtcctgctgctgcttgatcagcttcgcttctctatcaagccttctcattgtgacctggagagcttcttcaaataccacctacgagctgcctttcctccccatttcccactttgattttgctgaaaactcactttccttaacttaaactaatttaatctttttgctgttttctatgtgccctggatatcggagggattatttaagctgttttaatttttaatataaagaatatagggctctgattataatcatctactgagtacctaggaatgaatgtcatactctgctctgtttggacaatttgtgttttctttgtacagataattcagctccctcatgtaatacccatgttaacccagagaggtacatattatwatccctattgtacagaagaggaatctgacccttccaagttaagttagaaatgggtgggacagtgataatgattgaaacctaagatttgactcctgaatcccactgctcttaacctttggaaaatattgcccatcaacttctctttattcaaagtgcctaata

SEQ ID NO: 25209 - DNA, 1793 bp, Homo sapiens
aaagtttgggaaataattaaagatcatcacccatatccctgccaccttaaaacaattatcacttgtaatattctcatatagtcttagtttttcatatatataaaatgccattttttacatcaataggaatatattacatgcaccttgctttttttcacctaaaatgtttcttagagagaatttaatattggcatgtagagctgtctcattctttctaacagctacgtatttgtttgatgtatggatgtagcataatttatttacccaattcttacagaataaaatgaattgggtacgttttgctgtgacaaataatgctgcaacaagcattctagtacttaaatctttatgcagatatgcaagatattggtgggataaaatcctagatgtggacctttcacttgaagctttatgtaattaaagtcattgaatagacacatagcatctattcaattttgcttcctggatatctcatattggatattacacacagtgaacattttccgtggtgttgtacagcctccaagattaaagttttaatggtttattatttcttattatgcggatacactcaacctttcctctattgtgagacagttcaactgtttctaattatttgcctcataaagaatgcaatgactatccacatcccctgtgtcttacccttggcccatttgcgctgtcttctcactgcatttttcttcacagggagaggcacccccattctagaacatgggagaggcacccccattctagaacatgctccaggtccccatgaccctggaattccctaattgaaccccagtccagtttctaggcccatgcatcccttttcccagcatgccaggggtggctgtttggggaggtgcagagggatgtggaactagggctgccacctgggtctccacttgcatgcaaacaaggcctatgtccagtaggacataagctaggagtggcaggagaagcagggagcagtccctggacctccatttatactagcttacccaggccccctaaatgttggaatggttctgctatgacacccttaccttcttttcccagattcaatagagttctctaaagtagaccgctggattaaaartaaaaccgatcaaccaaccaacaacaacaacaaaaaacccaaaacttcattttccaaagttatttgtaaacttacctcttttgcacacctgttatatattgccaaaatttatcatttgcgaaatttaaagacctgtgccatgagagatgatttgaaattgcaaaaaggacagtgtcagggggagcagttgacttcacttctgatctgtactatcaaaatcctgctctagggctgggcgcagtggctcacacctgtaatctcagcactttgggacaccaaggtgggcagatcacctgaggtcaggagttcgagaccagcctggacaacatggtgaaaccctgtctctactaaaaatataaaaattcgttgagtgtggtggtgcacacctgtagtcccagctactagggaggctgaggcacaagaatggcttgaatctgggaggcagaggttgcagtgagccaagatcacatcactgcactccagcctgggctacagagcaagaccctgtctcaaaaacaaacaaacaaaaaaccaccttgctctatgaattagagatcacttttcatgcctgcattttgtttattttttattgtttatttttttttggagattttattatatgaactccagtgtccttttttatttttaatttctatgattctacataaccaattcaaacttaaattttaaa

SEQ ID NO: 25210 - DNA, 480 bp, Homo sapiens
gcttttatttccctaatgttcagagacatagtgattttgtactattatatttctttgagggcttgatgcccttwtgagccacaattagacaaccattattatctttttcttttctgttttgacttctccttactcctttctctcttttatatgttaaaaatcacagagctagaaagcattatttcctaataaagttagacaaaattaacttctacattttaacagcaaaattaaaatatactgaccacattcatgaatatatttttaatatgtaaattgcaaatttgaaacttacagaaaaaactgtaagaatgcaaaacttggagaattttttataataataagatgctattttcttcaaattttgaagattattattctctcattattataaatgttacccaaactaatatatagaacattttgttttgacttaataaaacaaaataacttattatattagctgttcatagtaataaa

SEQ ID NO: 25211 - DNA, 480 bp, Homo sapiens
gcttttatttccctaatgttcagagacatagtgattttgtactattatatttctttgagggcttgatgcccttatgagccacaattagacaaccattattatctttttcttttctgttttgacttctccttactcctttctctcttttatatgttaaaaatcacagagctagaaagcattatttcctaataaagttagacaaaattaacttctacattttaacagcaaaattaaaatatactgrccacattcatgaatatatttttaatatgtaaattgcaaatttgaaacttacagaaaaaactgtaagaatgcaaaacttggagaattttttataataataagatgctattttcttcaaattttgaagattattattctctcattattataaatgttacccaaactaatatatagaacattttgttttgacttaataaaacaaaataacttattatattagctgttcatagtaataaa

SEQ ID NO: 25212 - DNA, 1171 bp, Homo sapiens
tctgtggcccattccagagaactgccagatagtcccccagggtaaagtggctgtgtctcctaagacttgtttgtaaacagatggctcagagcctcaagcttgttttctcggggacaccatgatggtgagggtttcaggctagcccacagtggcyccatcaacccaagacaggggccaaagactgtggtcccagagccagctcaattcaaaaggccactgagctccaaggacctctgcaggctcccaggccccatccaggcttccccttctcaaggcttcaaaccgaaaatgcccctcagtggactgacctcagggagatagtaattgaaaaaccatctgatggcgttaaaagatactgacgtgtaaataacagatatgacagccacagagcccacacaggaatattgctctttatcccaaaaggacatttagtaagccaagtgcacttctcttttggtggaatatcacaccaaggtaaagtggcaatgcgtaggctctgcgaggacaggggaggcggtcaccggctggaaataagcccgaactgcagctttcagacctgcttctgcctttactcctcctctactaatagaaggagtttttgaaagccactgctgagggcttcagttttgggaagtgggctagggaggctgagtgttgggtagttggggtggatgatttcacagagaggcggtttgcaaactgggcgtttctaaatcaaggctgccagaagctctgggtgcacacagatgctagtgggcttctatgggtgcccccaggtgaaccagggctcatggctctcacactcaccgtctgcttgggggttcacagtccacgctctaagtacagggaaacctaagagaaaacgagagcagaaaagcacgttaagggggcttgtattttccaagtcacaaactgggggccagggattcagatctgactgaaacagttttaaacgtactgtttgagccaatcccagtatagaaaccagaggatttcatgcaaagtcaggctttctggctccgctggggagggctgcatctctgggccaggtgccagcaggatgggctcccctctgctctggtgtctgatgctgtgacctgcacagctcagttgcgcctccttcctggagacaaatctcccaggcttggctgggcatcctcccctctttgct

SEQ ID NO: 25213 - DNA, 1830 bp, Homo sapiens
cattggtgcataggagttaagagcaggatcttcagagtcaaatagatctcagatttctaccacagctacccactagctgtgtgaccttgagcaagtctttaagtacctgtgaggcttaggtcctacaactrcaaaatacagggcacctacctcaatagggatgttactgtgatattgtgaaagaagaagtacatatttggtctcggcccctggtttctgagacaaagctcctaaaactcttatggataagggtatagaaagattctatagatacagaatgttttgttctactatttggtctttgaccctggcttctagcaggcagttcctaaaacccttggaatctctggagtgatgagtgtcttttgtacgctaatgagttgactggcagttgggggccccaagatagcttcaagatggggactggtcaccagaaagaccaaggaatgaatagagggttgggactttcagtcccaccccaacctctcggctggagagaagggctgcaggttgagttgatcaccaatggccaatgatgtgatcaatcacgcctatgtaatggagcttccataaaacccacaaaagcagggttcagagaacttttggattgttgaacacaatccaaaagggtggtgcaccccaagaggacatggaagccccgccccctgccacacaccttgtcctatgcatctccttacctggctgttcatctgtaccctttgtaatatcctgtataataaatgggtaaatgagagtaaagtggttccctgagttccatgagcaggtttagcaaattaatcaaagctgagaagagggttatgggaaccccaatttatagccaatcagtcagaagcacagatcacagcctggggcttatgactggcatccgaaggggggtccatcttgtgagagtgagcccttaacctgtgggatccaatggcaactccaggtagacagtgacagaattaagttaaactgtaggacatccagttagtgtctgctggagaatcaggtgttggtggggagaaatcctcacatattgtggtgactaaaggtgagttattctgtattgagtgtgttgagtgtgttgagagtagagagaaaaaacagggctttttttttaatgcttcagactaaaaatcagggacaatcaaagtgtttcacccagtgtctggcaaataataagtttgcaatatattgcaactaatacgtgaatgatggtgcaatttcttagaatccctttaaaccataattctttccagattagttttattaattcaacaaacataagctgaatatgtactatgtgtcaggcactgtggattcttctggacagaagcagacagcaggaattgtgcatcaactttggcctgatttgcctgcatagtgcctgattaacaatcttatcttggtcaggtgagaagcccatatggttacttttttagtccatgactgacctagaggccctgggccaaaggcaaggagacttagtcctttcaaaatgcatttccagaatttcctaaatttgtattttgtgtgttgccagattgctttaccctgaagctgagcttccttgcagtagacaatgtcagaggctcacttcttgcacgtggataacagcctcaagcggttggctggacaaagacgctgcacagtctattgaaatagaaaactggggagagtagggtaaacataaccccaagcttagcctctgacctcccagactcaagctgctgctgaccagggggcaggtgctcagccaggtctaggggaggtcaaggccatgagtcttggtttcaatgcactgcagaggcctctgcaaatcactgt

SEQ ID NO: 25214 - DNA, 1830 bp, Homo sapiens
cattggtgcataggagttaagagcaggatcttcagagtcaaatagatctcagatttctaccacagctacccactagctgtgtgaccttgagcaagtctttaagtacctgtgaggcttaggtcctacaactacaaaatacagggcacctacctcaatagggatgttactgtgatattgtgaaagaagaagtacatatttggtctcggcccctggtttctgagacaaagctcctaaaactcttatggataagggtatagaaagattctatagatacagaatgttttgttctactatttggtctttgaccctggcttctagcaggcagttcctaaaacccttggaatctctggagtgatgagtgtcttttgtacgctaatgagttgactggcagttgggggccccaagatagcttcaagatggggactggtcaccagaaagaccaaggaatgaatagagggttgggactttcagtcccaccccaacctctcggctggagagaagggctgcaggttgagttgatcaccaatggccaatgatgtgatcaatcacgcctatgtaatggagcttccataaaacccacaaaagcagggttcagagaacttttggattgttgaacacaatccaaaagggtggtgcaccccaagaggacatggaagccccgccccctgccacacaccttgtcctatgcatctccttacctggctgttcatctgtaccctttgtaatatcctgtataataaatgggtaaatgagagtaaagtggttccctgagttccatgagcaggtttagcaaattaatcaaagctgagaagagggttatgggaaccccaatttatagccaatcagtcagaagcacagatcacagcctggggcttatgactggcatccgaaggggggtccatcttgtgagagtgagcccttaacctgtgggatccaatggcaactccaggtagacagtgacagaattaagttaaactgtaggacatccagttagtgtctgctggagaatcaggtgttggtggggagaaatcctcacatattgtggtgactaaaggtgagttattctgtattgagtgtgttgagtgtgttgagagtagagagaaaaaacagggctttttttttaatgcttcagactaaaaatcagggacaatcaaagtgtttcacccagtgtctggcaaataataagtttgcaatatattgcaactaataygtgaatgatggtgcaatttcttagaatccctttaaaccataattctttccagattagttttattaattcaacaaacataagctgaatatgtactatgtgtcaggcactgtggattcttctggacagaagcagacagcaggaattgtgcatcaactttggcctgatttgcctgcatagtgcctgattaacaatcttatcttggtcaggtgagaagcccatatggttacttttttagtccatgactgacctagaggccctgggccaaaggcaaggagacttagtcctttcaaaatgcatttccagaatttcctaaatttgtattttgtgtgttgccagattgctttaccctgaagctgagcttccttgcagtagacaatgtcagaggctcacttcttgcacgtggataacagcctcaagcggttggctggacaaagacgctgcacagtctattgaaatagaaaactggggagagtagggtaaacataaccccaagcttagcctctgacctcccagactcaagctgctgctgaccagggggcaggtgctcagccaggtctaggggaggtcaaggccatgagtcttggtttcaatgcactgcagaggcctctgcaaatcactgt

SEQ ID NO: 25215 - DNA, 1606 bp, Homo sapiens
tcatttaagttcaatagctcccattaatgcactccacaggttgaggaatgaaggatggcagtgttactacatgtctattttatgggttacactgaagaatataattatgtcaggcatcttctggacaggacagagaacggtcttgctgtaaattctaactaacccatatgaggaaagactgaatccatttcactatagcatttcataaatgaatattattcaacccttttttagagattgttaaaacctgaaagaccctataaatgtaaacagaggcccaaacttaagcacactgacttaggtctagaatcacatagtattccaaggcagcaggaactctcatgaaaagttgacatggccaggcccagtggctcacacctgtaatcccaacactttgggaggctgaggtgggtggatcacctgacgtcaggagtttgtgaccagcctggccaacatggtgaaaccatatctctactaacaatacaaaagtagctaggtgtggtggcacatgcctgtagtcccagctacccgagaggctgagacaggagagtcgcctgaacccgggaagcagaggctgcagtgagccaagatcgcaccattgcactccagcctggacaagacggagcaagactctgtctcaaaattaattaattaattaattaattaattaattaatttttaaaaagtcaccataaagatcatggtaagaaagtgacaaaccatccatgtccaggatgaaggaggagggttggtgttagtgggagaggaagaaacagagactggtagcaaataagactccagttattgttttattttctacagctgatcaacaaagataaaactatatttctccatttatctcacttattaaatattccactaagatagtattgaaacctgtgaaattattggcactcgatggctggtgcaaaggaatttaactattaatgctttagagatattctgttcagataagcatcaatgaaaaagaaaatatgttttacatatacatatatacacattttatatataatatatattattaaagatatatttattatatattactatatgtttttcatacacataaatatgccaagascactccactctataatgcatcttccaatgaaataattaagtctgcttaacatgaaatgacaaaatattcttgctataatttgggtgattaagtctcttcatcacagatgatcatagccaactacagaacctatggttccagcccattttgaataagaacctgaattttcttttactataccatagccccaaaatgactgatgcaatttagctcaaatattcaccagggatttgcctttcaagaggtgcctatttaatctccaaggaatgtcaaagctgactctgaggaaaagatggggtggcagaaccaaatgaaaacccaattgccttggcacccaattatgaagatgataatgtaatttattacatactacagcttcagatgctacagatcaaacacatttagttctcatgaaacagatcgtttctccttcatacatattttagctaagctgtttgaaccctgccgtttcatctgatgattacctgagataatattaataca

SEQ ID NO: 25216 - DNA, 1606 bp, Homo sapiens
tcatttaagttcaatagctcccattaatgcactccacaggttgaggaatgaaggatggcagtgttactacatgtctattttatgggttacactgaagaatataattatgtcaggcatcttctggacaggacagagaacggtcttgctgtaaattctaactaacccatatgaggaaagactgaatccatttcactatagcatttcataaatgaatattattcaacccttttttagagattgttaaaacctgaaagaccctataaatgtaaacagaggcccaaacttaagcacactgacttaggtctagaatcacatagtattccaaggcagcaggaactctcatgaaaagttgacatggccaggcccagtggctcacacctgtaatcccaacactttgggaggctgaggtgggtggatcacctgacgtcaggagtttgtgaccagcctggccaacatggtgaaaccatatctctactaacaatacaaaagtagctaggtgtggtggcacatgcctgtagtcccagctacccgagaggctgagacaggagagtcgcctgaacccgggaagcagaggctgcagtgagccaagatcgcaccattgcactccagcctggacaagacggagcaagactctgtctcaaaattaattaattaattaattaattaattaattaatttttaaaaagtcaccataaagatcatggtaagaaagtgacaaaccatccatgtccaggatgaaggaggagggttggtgttagtgggagaggaagaaacagagactggtagcaaataagactccagttattgttttattttctacagctgatcaacaaagataaaactatatttctccatttatctcacttattaaatattccactaagatagtattgaaacctgtgaaattattggcactcgatggctggtgcaaaggaatttaactattaatgctttagagatattctgttcagataagcatcaatgaaaaagaaaatatgttttacatatacatatatacacattttatatataatatatattattaaagatatatttattatatattactatatgtttttcatacacataaatatgccaagagcactccactctataatgcatcttccaatgaaataattaagtctgcttaacatgaaatgacaaaatattcttgctataatttgggtgattaagtctcttcatcacagatgatcatagccaactacagaacctatggttccagcccattttgaataagaacctgaattttcttttactataccatagccccaaaatgactgatgcaatttagctcaaatattcaccagggatttgcctttcaagaggtgcctatttaatctccaaggaatgtcaaagctgactctgaggaaaagatggggtggcagaaccaaatgaaaacccaattgccttggcacccaattatgaagatgataatgtaattkattacatactacagcttcagatgctacagatcaaacacatttagttctcatgaaacagatcgtttctccttcatacatattttagctaagctgtttgaaccctgccgtttcatctgatgattacctgagataatattaataca

SEQ ID NO: 25217 - DNA, 1606 bp, Homo sapiens
tcatttaagttcaatagctcccattaatgcactccacaggttgaggaatgaaggatggcagtgttactacatgtctattttatgggttacactgaagaatataattatgtcaggcatcttctggacaggacagagaacggtcttgctgtaaattctaactaacccatatgaggaaagactgaatccatttcactatagcatttcataaatgaatattattcaacccttttttagagattgttaaaacctgaaagaccctataaatgtaaacagaggcccaaacttaagcacactgacttaggtctagaatcacatagtattccaaggcagcaggaactctcatgaaaagttgacatggccaggcccagtggctcacacctgtaatcccaacactttgggaggctgaggtgggtggatcacctgacgtcaggagtttgtgaccagcctggccaacatggtgaaaccatatctctactaacaatacaaaagtagctaggtgtggtggcacatgcctgtagtcccagctacccgagaggctgagacaggagagtcgcctgaacccgggaagcagaggctgcagtgagccaagatcgcaccattgcactccagcctggacaagacggagcaagactctgtctcaaaattaattaattaattaattaattaattaattaatttttaaaaagtcaccataaagatcatggtaagaaagtgacaaaccatccatgtccaggatgaaggaggagggttggtgttagtgggagaggaagaaacagagactggtagcaaataagactccagttattgttttattttctacagctgatcaacaaagataaaactatatttctccatttatctcacttattaaatattccactaagatagtattgaaacctgtgaaattattggcactcgatggctggtgcaaaggaatttaactattaatgctttagagatattctgttcagataagcatcaatgaaaaagaaaatatgttttacatatacatatatacacattttatatataatatatattattaaagatatatttattatatattactatatgtttttcatacacataaatatgccaagagcactccactctataatgcatcttccaatgaaataattaagtctgcttaacatgaaatgacaaaatattcttgctataatttgggtgattaagtctcttcatcacagatgatcatagccaactacagaacctatggttccagcccattttgaataagaacctgaattttcttttactataccatagccccaaaatgactgatgcaatttagctcaaatattcaccagggatttgcctttcaagaggtgcctatttaatctccaaggaatgtcaaagctgactctgaggaaaagatggggtggcagaaccaaatgaaaacccaattgccttggcacccaattatgaagatgataatgtaatttattacatactacagcttcagatgctacagatcaaacacatttagttctcatgaaacmgatcgtttctccttcatacatattttagctaagctgtttgaaccctgccgtttcatctgatgattacctgagataatattaataca

SEQ ID NO: 25218 - DNA, 526 bp, Homo sapiens
ttacttacttgctgtctctcccacttgaatgtgagcaccatgagaggagagaaattgtctccttccctgctatattcctggaacctagaacagtacttggcacatagagggtgcctaataaatatatgtcaaatgaatgacttaatcaattaatttttaaaagcccacagtctatgtactttctgattgagagttttcattctcttagttgggagaaaagaaaagaagaactatagtataattttaaattttgacttcagaattaggtggtctgcaytcaatgcccagctctatcttttactagaaaataatttaattctttaggcctcagttactatattttgaagatgtgggacagtaacataacttacaagtttgcaaagatcaaatgaggtaatggatgttaagccatttcaaaaactctaaaatgttatataatgttatcatctcagtaaaatggtacctaacaaatatgtaaagaaaatatcaaaaattgatttaaatttgacattcaaataataatttc

SEQ ID NO: 25219 - DNA, 1293 bp, Homo sapiens
taataagtaaggagggacttcagacattcaaaggaagacttccagttcctgcaggtaatatttttgtgtaaacaggaactatctcttgaatatatgttaaatatttctatctaggaagtactcccaatacccaaaataagcccaattatggaattattctaaagcagaagaacaaatgtaaaacaaagaagcgtttccaggacaatttaaggagaaagtgttcctcccaacagggcataattttacttccgaattgtccccaaatcctgctccacagagaaaaacatctcgcttaagattcatccaggtcatcagtaaggtctgaccaggtttcacacatgtgccaaaaaacatctgtggcctgtacaaccagccaggaaatctattataattgcagcagtcttactacagaaactatagcaatcaactggtttctatttttaaaacctaaaactttcagagtcaaaataaggtaaagccagcatctttgagattttagtttctatggatacattttatttcacaaaaagaagagtgttaaagccttcatcaggaagaaaaatatgttgctaataatagttttaaagtatatgtgtgaaaattaaaaatctatattcgcaaatgctatgggttctgttgacatgcatttgatacataaatggagctaatcttacatgacctattagggctaccatcttagacacctaaatcttattcaaattgaaaagatccttgcagtgttttcttgctaaccttgcttctctatctaatgagaaaaccagttattttaaatatgtttatggccaaatggtatgatgacaaggagagcttttaaagcacataggccctaggtgactacatgtctcttttttatttctaaattaaattaaacacaagtgagactacattccataggaacctagtctgttagttgccacctrcgtgaccttaagcaaattcttaatctcccgaagaaagaggcaggatgagagaagagtccatacacatggctgttttgagactcaactaacaataatgtacataaaagagctttccataattgggtgacattatttttatcatctaacatcattgcccattagcctgcccatctgcgccttaaaagcttctaggatctcagttacctatgagtaaatggaacatacttctcaccttccaaggtgactattgaggatctccgacatttatttaagcctgtgttctcttggtccttattcttaaagcagctgcatcaatttgctacctaatataccctgatcctaagattatgtt

SEQ ID NO: 25220 - DNA, 1293 bp, Homo sapiens
taataagtaaggagggacttcagacattcaaaggaagacttccagttcctgcaggtaatatttttgtgtaaacaggaactatctcttgaatatatgttaaatatttctatctaggaagtactcccaatacccaaaataagcccaattatggaattattctaaagcagaagaacaaatgtaaaacaaagaagcgtttccaggacaatttaaggagaaagtgttcctcccaacagggcataattttacttccgaattgtccccaaatcctgctccacagagaaaaacatctcgcttaagattcatccaggtcatcagtaaggtctgaccaggtttcacacatgtgccaaaaaacatctgtggcctgtacaaccagccaggaaatctattataattgcagcagtcttactacagaaactatagcaatcaactggtttctatttttaaaacctaaaactttcagagtcaaaataaggtaaagccagcatctttgagattttagtttctatggatacattttatttcacaaaaagaagagtgttaaagccttcatcaggaagaaaaatatgttgctaataatagttttaaagtatatgtgtgaaaattaaaaatctatattcgcaaatgctatgggttctgttgacatgcatttgatacataaatggagctaatcttacatgacctattagggctaccatcttagacacctaaatcttattcaaattgaaaagatccttgcagtgttttcttgctaaccttgcttctctatctaatgagaaaaccagttattttaaatatgtttatggccaaatggtatgatgacaaggagagcttttaaagcacataggccctaggtgactacatgtctcttttttatttctaaattaaattaaacacaagtgagactacattccataggaacctagtctgttagttgccacctacgtgaccttaagcaaattcttaatctcccgaagaaagaggcaggatgagagaagagtccatacacatggctgttttgagactcaactaacaataatgtacataaaagagctttccataattkggtgacattatttttatcatctaacatcattgcccattagcctgcccatctgcgccttaaaagcttctaggatctcagttacctatgagtaaatggaacatacttctcaccttccaaggtgactattgaggatctccgacatttatttaagcctgtgttctcttggtccttattcttaaagcagctgcatcaatttgctacctaatataccctgatcctaagattatgtt

SEQ ID NO: 25221 - DNA, 760 bp, Homo sapiens
tctgggcatgcataggaggctcacccttctctagtaatggttcccacttcctatgctggaagatgctacagaagtctcacccccatgatacagcaggaatcccactgaagagctttgcaggaactagctggcacgtccccataggrggccgaggagcacttctgggattggaatttgagggtgtttgatcaaggaaccagaatttcaagctggaagaataaaaatcctttggcttggaggcactttctcaaggcatgggtttatcaaacaccccaggactttgataaggggggggccaaacccaccgctggggtgaatccatatagactagaaaaaatgatgcctaactctcaacaaggtagacgtgacttagttgccctggaacttgcacaggatggaataacaaggctgagggaagtgggcatggtgaaggcccaccagtaccatgctccacaagacggtccaaaggaaacaccttccaccagagcctcagaaacgtgatggtgagagggacctgcatcattaagaaatgtcggggtgttgtcctctgcaggctggatgtgatggtagtaaagatgacccagagttgcatttattaatatccctggggagagtgtggccctgaagagacaaagaccaaatggtggcagtgacctgaaaaagccagagggcagagttactatggcaaactaaaaggagtagccaataggactcaagctgcagggaatgtggggaaggatagtagagggtggtgtcccag

SEQ ID NO: 25222 - DNA, 732 bp, Homo sapiens
ttttggtacacaaaaaatatttgtttataaatactcttcatataaatattttaaacatctctatataaataattctgtgtcatttattagttctacctatttaatataaaatataagtatataagtatatttatttagctgaatttataatctgtattttaatggttactttattctgtttatgttgattggatatattgcagtcatagaggctgctgagcagacttattggaagttgtcatggcaacacagttgattgattatttccaactgctgcaaattaagatccaccatatcattcatgccaaagttacacttcccctggactgttaccagcaataactgcacagtatactattgctaagccgtggatgcctaacacaggactcctccaatagacatctctcacatgaggtatcgacaaggaccacgacttttctcagaagtacacagtaacctcccctccaattcagttcttgctcccttttctccattcactttggtaagcccttattctgtaaaagcctccttttcattcttcaaagacattacttgtgtgccaatttaggtaagcatcagcctttagaagatttaaagtggcacatcttactagatagatgagratttattttttcacccactatcttgtgccttttaaatcttctttttatttacctgttcatttcttccttcccgcttctgtttaaattgataaagcttctgtataacaaa

SEQ ID NO: 25223 - DNA, 606 bp, Homo sapiens
gctggggaagcattgtaaagcactagacatctcgctagaagagcgtctctcgggagtttgctccgggaaagaagcggtgggtggaattgctgagctcctaggtctgttaagctgatgcctgccttcccacacttgtcttctttacataagcatttttcttttgaggcagcccacgacagcaccaggagagaagccgtcaggcataccggtcagatctaaatattctagggaggagataaaaataaaacagtgtacctgagtgaataaccttccaatagttaaaatcttgaacagccttatgaaagtgctttcatttcccaccatattccccaccyccattttctgatctacttgtaaattttaactttcagaaggcagaatatgtttcagattgttaacagctagaatagcaaaaagactgggttggccttttttttttttttttttttcatgaagtgtttcatcctaactaaaagctgtgaaggaggtcatccctcaagtacaaatcactgggactgtacatccccaaggactactcatccagacaagcatttttttaaaaatataaattaaacctcttttgtttttgaggtgtggctgacttat

SEQ ID NO: 25224 - DNA, 1586 bp, Homo sapiens
gtgaaatgcttaatatggtgtctggtacatagtaaacattcagtgaatattagctgtggtaatattaataggaacaataatctcctcttcagtaagaagaggattgaggtaattaattaattgtcactaagaaaatctgtgtatgattaaaaagtaaaaatcaatttctagaaaatacttttgatactgctatttttctctataattttaaatgctgtttcaaaatttatctgtgaaaaatccatacctcttttgacacaggatttaagaggattgtaataaaaacaaagaaacatttttatatacaatagaaatagaaaagaaaataatatacacagggtgagttacatgtttttgctcggttgaatttcagattggcctcagaacttggcacaactaggataagaggaccatttagttctgacctcacatccatgaaaaggccttgaatttagacttttagtattatctgttagtaagttatataaagagccccagaaaaatcctaacagactcacatctccatcatagaactttactcctgtgtctttttttctgaacttgccttcagtgttctaattacttaattaatttttgtaaatcctgcaattatcttggaataaggtatttaaatttattgtatttgggcatgtgtgccaaaggcaaatcattaatttgctaaatataagcattttagaaagctgttttgtaagtcgttgttgtaactctgttttgacttccttcttttttttaatttaaatatacgtggtgtctccaaaagtggaaattttctaggcttttattttgaccctcaggagtgcctagcaaggaatccaagtggaattgcacttaacagatagctttagaaggcatgagtggagtatagaaaatggaggggagcaagactggtcacggtggctcatgcccgtaatcccagcactttgggaggccgagacgggccgatcacgaggtcgggagatcaagaccatcctggctaacatggtgaaaccccgtctctactaaaaatacaaaaaaattagcctggcgtggtggtgggtgcctgtaatcccagctactcgggaggctgaggcagaacaggagaagcacttgaacccgggaggcggaggttgcagtgagctgagatcttgccattgcactccagcctgggtgacagagagagactccgtctgaaagaaagaaaagaaaagaaaatggagggttacagagaaaccagggaagtttgggacagccwtaaaggcccattgacaattgctgcagaaacaatgattgtttattgttgtgtggataaagttagagtcaaaaattttcctatagaacatagtagtaaatattacatgccttacctaaaattattgaagatcctcttttgaagtttaaagtcattaaactaaaaagttaacattctgttgcaatgtgcctagtagagatatactggtgaaagacaaatgcaaaagagaatgtaaaaaaaatcagtgatggatttgcaactgagatatttgaataacttgagttatttctcttcacaacatatacaaaaagcctattacctgccttgagtacaaagg

SEQ ID NO: 25225 - DNA, 1586 bp, Homo sapiens
gtgaaatgcttaatatggtgtctggtacatagtaaacattcagtgaatattagctgtggtaatattaataggaacaataatctcctcttcagtaagaagaggattgaggtaattaattaattgtcactaagaaaatctgtgtatgattaaaaagtaaaaatcaatttctagaaaatacttttgatactgctatttttctctataattttaaatgctgtttcaaaatttatctgtgaaaaatccatacctcttttgacacaggatttaagaggattgtaataaaaacaaagaaacatttttatatacaatagaaatagaaaagaaaataatatacacagggtgagttacatgtttttgctcggttgaatttcagattggcctcagaacttggcacaactaggataagaggaccatttagttctgacctcacatccatgaaaaggccttgaatttagacttttagtattatctgttagtaagttatataaagagccccagaaaaatcctaacagactcacatctccatcatagaactttactcctgtgtctttttttctgaacttgccttcagtgttctaattacttaattaatttttgtaaatcctgcaattatcttggaataaggtatttaaatttattgtatttgggcatgtgtgccaaaggcaaatcattaatttgctaaatataagcattttagaaagctgttttgtaagtcgttgttgtaactctgttttgacttccttcttttttttaatttaaatatacgtggtgtctccaaaagtggaaattttctaggcttttattttgaccctcaggagtgcctagcaaggaatccaagtggaattgcacttaacagatagctttagaaggcatgagtggagtatagaaaatggaggggagcaagactggtcacggtggctcatgcccgtaatcccagcactttgggaggccgagacgggccgatcacgaggtcgggagatcaagaccatcctggctaacatggtgaaaccccgtctctactaaaaatacaaaaaaattagcctggcgtggtggtgggtgcctgtaatcccagctactcgggaggctgaggcagaacaggagaagcacttgaacccgggaggcggaggttgcagtgagctgagatcttgccattgcactccagcctgggtgacagagagagactccgtctgaaagaaagaaaagaaaagaaaatggagggttacagagaaaccagggaagtttgggacagccttaaaggcccattgacaattgctgcagaaacaatgattgtttattgttgtgtggataaagttagagtcaaaaattttcctatagaacatagtagtaaatattacatgccttacctaaaattattgaagatcctcttttgaagtttaaagtcattaaactaaaaagttaacattctgttgcaatgtgcctagtagagatatactggtgaaagacaaatgcaaaagagaatgtaaaaaaaatcagtgatggatttgcaactgagatatttgaataacttgagttatttctcttcmcaacatatacaaaaagcctattacctgccttgagtacaaagg

SEQ ID NO: 25226 - DNA, 701 bp, Homo sapiens
tgcatcaaaaatagtcatgacctagattagatgagctttctttcagatattagttgttaattataaatgacaaaatataaatatgttgaaattcaggtgtaatcgttagaaatctactccaagtgctgttcttgatagggaaatcactaatgttccaagcaaaacactgtagtcacaatagctggtatttcaaataataacaataaaaataatagtgatatattaactaaaccaattataattatagcacagttttcaaagtcagtgttctagtatgtaatctcataacatctaagaaatgaagaaatatttgctaaacmaatactaattttgatataattaataggatttgtgttgttcgttgcaccacacagaaccaaaaattatttgtagtatagaattactaagggccaaatacctaggctcattcttcacattccacattgtgcaactttagacactgtccatagtgaccttatggagcataaagcatggcacaaataagtgttcaaagcatttacttctatttttaatctattttttcagttgaaatggatacatgagcattttacgtttttaaggtgcatattggtaatatctaatgatattaacagtaactcattaaagagataaagggttctgtagtcataataatcaaatacagttattagaaagtgatatttacacatttggggcataaa

SEQ ID NO: 25227 - DNA, 607 bp, Homo sapiens
aatgttctcttgcttcagcccttactgtgccactgcatttgaccctgaatgaggaaatcaataataaaaggaaaggatgaatattgtgagatggttttaggatttagcgggatcttttaaattacttacagtttgctgctttagttttcatttgttcatttactcattattttctatttcaacaaatatttattgaaaatttttcctgtatcaggtacgcatgaagttctagggatatgaaggaaatatagcatcctgttccttgtaccttttgctctgaaatccattcagttataagtcctataaggctcagaagacagacttggctctcaaatctgaccagattgtatttcagaactcttgcttcttaccttgttttagaattttttacagactctcctggagtttttgaacctcagattttctacaggtttttacttttattttgattccttctatttttaaaaactactttttctawcccaaagcctcagaggttgaggagtgcagacttgacagggaggcagagaggaaattatatgttatcagaaaatgcaataaatgaaactaaagcttcatataaaaaatttgtttcagatcagaaatt

SEQ ID NO: 25228 - DNA, 607 bp, Homo sapiens
aatgttctcttgcttcagcccttactgtgccactgcatttgaccctgaatgaggaaatcaataataaaaggaaaggatgaatattgtgagatggttttaggatttagcgggatcttttaaattacttacagtttgctgctttagttttcatttgttcatttactcattattttctatttcaacaaatatttattgaaaatttttcctgtatcaggtacgcatgaagttctagggatatgaaggaaatatagcatcctgttccttgtaccttttgctctgaaatccattcagttataagtcctataaggctcagaagacagacttggctctcaaatctgaccagattgtatttcagaactcttgcttcttaccttgttttagaattttttacagactctcctggagtttttgaacctcagattttctacaggtttttacttttattttgattccttctatttttaaaaactactttttctaacccaaagcctcagaggttgaggagtgcagacttgacagggaggcagagaggaaattatatgttatcagaaaatkcaataaatgaaactaaagcttcatataaaaaatttgtttcagatcagaaatt

SEQ ID NO: 25229 - DNA, 1207 bp, Homo sapiens
taatcaataactgttttctattttttctccatgttgtcgggtggttcatacctgactttcatcatttccaatgattcctgtttgttttgtttataaatttcaaaatcatcatgaaaagtttcactgaatgaaaacctgaaaattgggaaataaacatttttctgcaaaaaaaaaaaaacaatgaacactgacttctyctatttctcaaagtcatctcaaagccatatgaggattaccacaaacttgcaggtgagaaaattctttgcaatgtaagaagtgccatgcaaattagttgatgctattataattagtctcagggatcaaaaatgcttgaaccctaaatctaacacttcaaaggaaagcattatttttcattcattttacaagttacacctcccttcttccccacatctttgtttagaatctggaccctgaagttagaggaccaagattcaaatcccagcctcatcagtactagctatgtgatattgggaatgttacttgatccctgcttatcttactttctgcatttattaaatggggatgagaataatatctacccaaataaggtgcccaatgcagtgcccaacagcatgaagcccaataaaggttagttaacatcacatccataattgacacctttaggtattagattttcatcatcccagaacattttccttctttaagcctttttctttctaagtggcactttcttggatactgattgcactcctcacaaacttgaaacgttcaaacacacaagatgccatttaggagacattggaacttgggtttccttctctgtaaaactgagtaatgacagtcacctcccagggctgttgtaagaatgaatgagctagagtatgtaaaatatcttagcacagagtgcttaagaaattattagttccagccaagcgtggtggctcacgcctgtaatcccagcacttagggaggccaaggcaggcggctcatctggggtcaggagttcaagaccacctggtcaacatggtgaaaccccgtctctactaaaaatacaaaaattagccaggcgtggtggcatgtgcatgtaatcccagctactcaggaggctgagacaggagaatcacttgaacccaggaggtggaggttgcagtgagccgagatcgtgccattgcactccagcctgggcaacaagagtgaaactctgtctcaaaaaaaaaaaaaaaaa

SEQ ID NO: 25230 - DNA, 1207 bp, Homo sapiens
taatcaataactgttttctattttttctccatgttgtcgggtggttcatacctgactttcatcatttccaatgattcctgtttgttttgtttataaatttcaaaatcatcatgaaaagtttcactgaatgaaaacctgaaaattgggaaataaacatttttctgcaaaaaaaaaaaaacaatgaacactgacttctcctatttctcaaagtcatctcaaagccatatgaggattaccacaaacttgcaggtgagaaaatkctttgcaatgtaagaagtgccatgcaaattagttgatgctattataattagtctcagggatcaaaaatgcttgaaccctaaatctaacacttcaaaggaaagcattatttttcattcattttacaagttacacctcccttcttccccacatctttgtttagaatctggaccctgaagttagaggaccaagattcaaatcccagcctcatcagtactagctatgtgatattgggaatgttacttgatccctgcttatcttactttctgcatttattaaatggggatgagaataatatctacccaaataaggtgcccaatgcagtgcccaacagcatgaagcccaataaaggttagttaacatcacatccataattgacacctttaggtattagattttcatcatcccagaacattttccttctttaagcctttttctttctaagtggcactttcttggatactgattgcactcctcacaaacttgaaacgttcaaacacacaagatgccatttaggagacattggaacttgggtttccttctctgtaaaactgagtaatgacagtcacctcccagggctgttgtaagaatgaatgagctagagtatgtaaaatatcttagcacagagtgcttaagaaattattagttccagccaagcgtggtggctcacgcctgtaatcccagcacttagggaggccaaggcaggcggctcatctggggtcaggagttcaagaccacctggtcaacatggtgaaaccccgtctctactaaaaatacaaaaattagccaggcgtggtggcatgtgcatgtaatcccagctactcaggaggctgagacaggagaatcacttgaacccaggaggtggaggttgcagtgagccgagatcgtgccattgcactccagcctgggcaacaagagtgaaactctgtctcaaaaaaaaaaaaaaaaa

SEQ ID NO: 25231 - DNA, 1207 bp, Homo sapiens
taatcaataactgttttctattttttctccatgttgtcgggtggttcatacctgactttcatcatttccaatgattcctgtttgttttgtttataaatttcaaaatcatcatgaaaagtttcactgaatgaaaacctgaaaattgggaaataaacatttttctgcaaaaaaaaaaaaacaatgaacactgacttctcctatttctcaaagtcatctcaaagccatatgaggattaccacaaacttgcaggtgagaaaattctttgcaatgtaagaagtgccatgcaaattagttgatgctattataattagtctcagggatcaaaaatgcttgaaccctaaatctaacacttcaaaggaaagcattatttttcattcattttacaagttacacctcccttcttccccacatctttgtttagaatctggaccctgaagttagaggaccaagattcaaatcccagcctcatcagtactagctatgtgatattgggaatgttacttgatccctgcttatcttactttctgcatttattaaatggggatgagaataatatctacccaaataaggtgcccaatgcagtgcccaacagcatgaagcccaataaaggttagttaacatcacatccataattgacacctttaggtattagattttcatcatcccagaacattttccttctttaagcctttttctttctaagtggcactttcttggatactgattgcactcctcacaaacttgaaacgttcaaacacacaagatgccatttaggagacattggaacttgggtttccttctctgtaaaactgagtaatgacagtcacctcccagggctgttgtaagaatgaatgagctagagtatgtaaaatatcttagcacagagtgcttaagaaattattagttccagccaagcgtggtggctcacgcctgtaatcccagcacttagggaggccaaggcaggcggctcatctggggtcaggagttcaagaccaccyggtcaacatggtgaaaccccgtctctactaaaaatacaaaaattagccaggcgtggtggcatgtgcatgtaatcccagctactcaggaggctgagacaggagaatcacttgaacccaggaggtggaggttgcagtgagccgagatcgtgccattgcactccagcctgggcaacaagagtgaaactctgtctcaaaaaaaaaaaaaaaaa

SEQ ID NO: 25232 - DNA, 1207 bp, Homo sapiens
taatcaataactgttttctattttttctccatgttgtcgggtggttcatacctgactttcatcatttccaatgattcctgtttgttttgtttataaatttcaaaatcatcatgaaaagtttcactgaatgaaaacctgaaaattgggaaataaacatttttctgcaaaaaaaaaaaaacaatgaacactgacttctcctatttctcaaagtcatctcaaagccatatgaggattaccacaaacttgcaggtgagaaaattctttgcaatgtaagaagtgccatgcaaattagttgatgctattataattagtctcagggatcaaaaatgcttgaaccctaaatctaacacttcaaaggaaagcattatttttcattcattttacaagttacacctcccttcttccccacatctttgtttagaatctggaccctgaagttagaggaccaagattcaaatcccagcctcatcagtactagctatgtgatattgggaatgttacttgatccctgcttatcttactttctgcatttattaaatggggatgagaataatatctacccaaataaggtgcccaatgcagtgcccaacagcatgaagcccaataaaggttagttaacatcacatccataattgacacctttaggtattagattttcatcatcccagaacattttccttctttaagcctttttctttctaagtggcactttcttggatactgattgcactcctcacaaacttgaaacgttcaaacacacaagatgccatttaggagacattggaacttgggtttccttctctgtaaaactgagtaatgacagtcacctcccagggctgttgtaagaatgaatgagctagagtatgtaaaatatcttagcacagagtgcttaagaaattattagttccagccaagcgtggtggctcacgcctgtaatcccagcacttagggaggccaaggcaggcggctcatctggggtcaggagttcaagaccacctggtcaacatggtgaaaccccgtctctactaaaaatacaaaaattagccaggcgtggtggcatgtgcatgtaatcccagctactcaggaggctgagacaggagaatcacttgaacccaggaggtggaggttgcagtgagccgagatcrtgccattgcactccagcctgggcaacaagagtgaaactctgtctcaaaaaaaaaaaaaaaaa

SEQ ID NO: 25233 - DNA, 574 bp, Homo sapiens
gggagagaaactcttaactgttgtaccctccttttggcttggctgggggaggaaagactctgggcatgtggtgcgaggagacagtgagcgagaattgctagccagctggccacgccggggccttgatccctgagactgccctggggcatgggcagctaccagtgtgcattcccacccagcgtggtcattggacgcagcatgcacatgyagcagacatggggagcagatggcagtctctgcagctgtaccattcattcttaattggctaacagagacctggtgctccatttgttttcagaaaaagtctgagaggaaggctcggaaatgaaaaagtgaaagaggtttcttcttgggtctgcattttactcaccttttcttaggtccccatatgggccaccaaaatgatacaagatttttctccttagctcagctagttccgggttcttgtctcacaaccaggaagaattaggcatgcagacacttgaagagtgaatggaatagaatttattaagtgaaacgaagacaaggtctaaggaaacgaaagatcttagcaaagagaggagtcctaaaagca

SEQ ID NO: 25234 - DNA, 517 bp, Homo sapiens
ggagccaatatttgaagaaataatgcctgaaatatcccttaaacatacaagtcctcagattcaaatgatttatcaggggaatatctaaagaatggattaaaagaaagaaattccccccacatcccagaagaaacattacagggaaatataagaatcctgagagcaaagaaaattctaaaagcattgagagacaaaaaatagattatctataaaaaccaaccaaaacaacatcagacttttcaatagcaacaatatttacatatttttgaagaaaaatatttcaaactagaattttattcatcactgccttaatgcaaggggaaaattttaaaatgatatttttagacatataaataagcccttacacttgtatcaaagatcaattgacaattrtttaaagatcaacaactttgaaagaactattagagaaaatagcccataaagagaaaaatgaatcaaagaggatgctaaaagtatttggggggtaagtgtcagtatattacttagaaaagtttat

SEQ ID NO: 25235 - DNA, 1145 bp, Homo sapiens
ccttgtggtgatggaaccattctgtatcttgactgtatcaatgccaatatcctggttgtgatactgtatggtgttgcaagacactgtcattgggggaaaccgggaaaatggtacatggtttctctttgcagtatttcttacaacaactgcatgaaaatctgtatctaaggtaacaagcataatttaaaaaaaaaacctcttttctcttatagcatgggatttcagtgtcaaaaatgtggagcacttctcccgtgtgtgtttgtgtgtgtgtgcgtgtgtgtgtctgtgtgtgtacataccactcctatgccaagagtctgcatatccgtgtttttacctgtctctaaagtagaatatctgctggtgtccacatgtgataataattgccttttatattgtgtgccatagatattacggatgtcctatgacgttgttataaaaattctgctgatgactcactctgctttctctaagtcactttgtcattgatattgtgcctggttttataagcttcttggcaatgaagtgatttgtacttgttttgccaagaggtctaataacgttgaatgaaacccccatagcttttrtatcttccctgccttcgtcacaatattcatcaacttcatacagcaaagaattacttcgtgcttgctttcaaaatattcaattggtttatcacagggttaactgtactttgattaataattatgtaaaagcggccgtgggccgaggagagctctaggtggccagccaaagacctggggcgtcgtgggcttcggcgagcatgcagggatgagcgggtccctcggccgagcggcgggctcgggtgcgggcggtggtgtttcaggggagcggctggacgcactggtgaaggacaaagtggttgtcttccctcaaggggacggcggagcaaccccagtgcggcttcagcaacgccatggtgcagatcctgtgggtgcacggcgtccgcgactatgcggcctacgaagtgctggacgaccccgagctgcgacaaggcattaaagactattccaactggcccaccatcccgcaagtgtacctcaacggcgagtttgtgcggggctgtgacattcttttgcagatgcaccagaatgggggtctggtggaagaactgaaaaagctgg

SEQ ID NO: 25236 - DNA, 830 bp, Homo sapiens
tgaactggttaaaggaggaatacaatgaccctccaatttatgtcacagagaatggagtgtcccagcgggaagaaacagacctcaatgacactgcaaggatctactaccttcggacttacatcaatgaggccctcaaaggtacgacgggcccgcccttccccagcgtgcaccttyccctgttggaaacatctgctatttgcaggagtgtgatacagcgtccttgggccacagtaagaagagaacgataagccttcttgctcctgtgggggttaagctttgctttagggccgcactctgagtttttttccttcctatgtctaagctcagcaagcaagcccagtggcctgatgccaccaaaccctagttcctggcctgagtcacttgctccccttgatcctccctgatgtcggaacagcagtgccctcctgagaatggtctgggtagggcccaggaggagtaggctgtgtggttgcctgtagggtctcttagtctccgagcaaaagtttgaggctcttggctcagccctaacaacttgagatgggaccatgaggataagagaatggaacaaatgctgagtaaaagagcaagcaatgcaccagcaaaggaaatgattagaaaaatcctacccagctgaaatatattctatctaagggctattttctacagggagaagcattaacattctaaggcactgaccaagatcatggatagaagtgtaggtgacccagggaaattagtccacccatgttcccgactcccattcagggctgagcctttctaaagatgctggtggctctacatctccatccacagaggacccgctaacagtc

SEQ ID NO: 25237 - DNA, 830 bp, Homo sapiens
tgaactggttaaaggaggaatacaatgaccctccaatttatgtcacagagaatggagtgtcccagcgggaagaaacagacctcaatgacactgcaaggatctactaccttcggacttacatcaatgaggccctcaaaggtacgacgggcccgcccttccccagcgtgcaccttcccctgttggaaacatctgctatytgcaggagtgtgatacagcgtccttgggccacagtaagaagagaacgataagccttcttgctcctgtgggggttaagctttgctttagggccgcactctgagtttttttccttcctatgtctaagctcagcaagcaagcccagtggcctgatgccaccaaaccctagttcctggcctgagtcacttgctccccttgatcctccctgatgtcggaacagcagtgccctcctgagaatggtctgggtagggcccaggaggagtaggctgtgtggttgcctgtagggtctcttagtctccgagcaaaagtttgaggctcttggctcagccctaacaacttgagatgggaccatgaggataagagaatggaacaaatgctgagtaaaagagcaagcaatgcaccagcaaaggaaatgattagaaaaatcctacccagctgaaatatattctatctaagggctattttctacagggagaagcattaacattctaaggcactgaccaagatcatggatagaagtgtaggtgacccagggaaattagtccacccatgttcccgactcccattcagggctgagcctttctaaagatgctggtggctctacatctccatccacagaggacccgctaacagtc

SEQ ID NO: 25238 - DNA, 830 bp, Homo sapiens
tgaactggttaaaggaggaatacaatgaccctccaatttatgtcacagagaatggagtgtcccagcgggaagaaacagacctcaatgacactgcaaggatctactaccttcggacttacatcaatgaggccctcaaaggtacgacgggcccgcccttccccagcgtgcaccttcccctgttggaaacatctgctatttgcaggagtgtgatacagcgtccttgggccacagtaagaagagaacgataagscttcttgctcctgtgggggttaagctttgctttagggccgcactctgagtttttttccttcctatgtctaagctcagcaagcaagcccagtggcctgatgccaccaaaccctagttcctggcctgagtcacttgctccccttgatcctccctgatgtcggaacagcagtgccctcctgagaatggtctgggtagggcccaggaggagtaggctgtgtggttgcctgtagggtctcttagtctccgagcaaaagtttgaggctcttggctcagccctaacaacttgagatgggaccatgaggataagagaatggaacaaatgctgagtaaaagagcaagcaatgcaccagcaaaggaaatgattagaaaaatcctacccagctgaaatatattctatctaagggctattttctacagggagaagcattaacattctaaggcactgaccaagatcatggatagaagtgtaggtgacccagggaaattagtccacccatgttcccgactcccattcagggctgagcctttctaaagatgctggtggctctacatctccatccacagaggacccgctaacagtc

SEQ ID NO: 25239 - DNA, 572 bp, Homo sapiens
aacagcgcgccaggcgcggtagctcacgcctgtaatcccagaactttgggaggctgaggcgggcggatcatgaggtcaggagttcaagattagcctggccaacatagtgaaaccccgtctctaccaaaaatacaaaaattagccgggcttggtggtgggtgcctgtaatcccagctactcaaggctgaggcaggagaatcacttgaacccaggaagcggaggtcgcagtgagctgagaccgcgacactgcactccagcctgggcgacagagcaagactccgtctcaaaaaaaacaaaacaaaacaacaamaaaaaaaacagcagtattgttttagatcataacacttaacatagaccacgtgatacacagaaggcagctctttgaataggagcagcctgggacatttgctggcttgtattcatgaatttacataccaagtggaaagaactcagactggttgggtagaatatgcgttcaaatgctaacaactccactacttattagttatctggctctgggcatattactcatctccaaatttcggtctttcatctttaagtagaaacagcta

SEQ ID NO: 25240 - DNA, 2117 bp, Homo sapiens
cggggctgctggcctcactgccagtctgacagccccactgcggcctcagaggtggccgggagcctgaggcgaccccaggggccagagaaaagcaggtggaaccagacagcagtgcccaagctggtcaagctcatggttaccaccaacgaatttgttttagtctccacatttgtgatttcgacctagtattttatatatatatatataatatatatataccaaagtatatatatatattatctatataccaaagtatatatatataaaatatatataccaaatatatatataatatatatataccaaatatatataaaatatatatataccaaatatatatataaaatatatataccaaagtgtatatatataataaatatatatcaaagtattttatataccagtattttatatatataccagatagtataccaaaaatgaatatttgagcattctgaagagyggttgtcaaactgcattagttgtggccttcagtgggttatgaaaatttgtttcaaatttgaaaaaatttaatgggtcataaccagcattttgtaaatgaaaggattagaacagcatggatgacagtagagtcatcagtttgaaatgcttttgttttgtttttgtgtgtgtgtgtgtgtgtgtgtgtgtgtgtgaatgcattgaaccatgatagtttcttaccataggttgatgtcaaaaatgtttgagaaacacaatttatgattctagccttcaaagaaaatgatagaatcatgaaataaaagagcagctgaccttagaattggagataagtgggtttgaatcccgacctccccacttgctcactgtatgacttcgggcttgccgcttccaccttcagtctgccatctgagagtgagtgtgaaacacctgcttcagcagggctcttgtgagaatgtggcgggttaatgtgcactgtggaaagagcagcaggtctgaaatcagaacccgtgggtgtctgctcagccctgtgattcattagccgtgattgagcagagtactttatctctctcggcgtcaatctcatcatctgtaacatgtgggtaatgacatccaccgcacaggtttgttgtgaggattaatgagataaaaagatgtgtatgtgcgttgcaaatggaaaagtgctgtaaaatgtgaggcttgttatttctgctttatctaacgttgatgctgttcctagtggattctggtggtcctatctcaaaagctaccggtgaaggccacagccaggcatagcctgggatgtgctaaggtggaagcatcagtgagtggcagggcctcagacagaaaaccagaatgttgaggactctccctgagacttcctctctcctctaaggacctgaaggacttcagatgtgcttcagggcactgctatcaatacgaaaatgaggactttccacagagataaactgcatgtcaggcagaggcagccctgagaccccattccaaatgtgtcagatgatataattacaatttattctctttgctgacggcagccttttaaaaatccattccagtctggtttcaacagagccgtaggagccttaatgaatatcagggccttctacacaccatttccaaataaagattccagggctgctctgaggagaaactgtcaattggtctggtggcacttagcggtgtgttctttcttaaaagtggtgtgacttttcttaaaagctccttggcggctatgagaatacacccagtttcggagcatttgcctgtggaaaccagaaagcttggccatccagagactaagattcgttttctgtagaggcagggaacatttctcatactttgttatgcttaagaatttccccagagtgttaggaagtttgaaggatcctgggcctcattccccagacattccagttaaggtggggccaaggactctgcaggactgctaagtatccctaggtgcctcagagggagatgcaacagaaaccagtccccccaaacacactgcaaattactgtcaaatcatttctctgagcctgcttcatcaactgcaaattggaacgatgctactccctgtatgtctctgtcacagggctatgtgggggccaaatgagaatactaatttgtaaattgca

SEQ ID NO: 25241 - DNA, 1090 bp, Homo sapiens
ccggcgatgatcattgtggaaagaatggacagcaccctggttgatgtgcagagtgaccctgcagtcaagtctgtttgcctcccactagcattttctcatctccagcacggtgtcaatggtgccactccagccgggccaccctgcccacaaggtcttccacggggctcctccccagctcacggggaaatcccctttaatttcaaacagggcccttccacctgcccttgattccctgtggcaccttgggagcatggggctgccctactgtggagttagtgggtccacttcgagaagacagagacagagtgaagcctcaagaacagtgttcactggcagtgggaaccgtcggtcctgccatgggacgatgtgactgggggctcgtccatgccttgtcgtggacatctctggtctcagccggcaggggtgggtgggacctcagacctcagcgggtgatggcagtgggagcctgggcaggggcgggcagggctctgtggtaagacacagagggcaggggctggggtgggcagggctccatgggaagacacaggtagcgggtcaggtgctggggaggtgttgctgggcatggtggatttgcaaatttccagggcggkggggggtctggcaagtgtagacacagggcagaagtgggcgcagtgtctgtgggtgaagagctgtgcgggcgggcactgagaagaggtgcccacgtccatccccagcccctcaggcatgttcaccatcatggcgcacatgtctgggagtgagcagaggaccagggtatggaacaagccctagtcagaaatgcctcctgacgcctgtgacctctgggcagggctagtgaggggctggggagagcagagggtgtttctggataagaactcacactaaaggcctggcccggaccctgcctccatcagcagggtgcagcccaggcccagcacattctcctcctcctgggacctcgatcttggcttcccctaggcctttctggggccccccagttcctgccaacactgctgtccacgctggggccctccagttcctgccaacactgctgtccactctcttgtccaccccatgattccaaccactg

SEQ ID NO: 25242 - DNA, 1016 bp, Homo sapiens
catgaaggttctgtaagccagagctgaagtgagtggggcccctgtccgcaggctgccacctctggcaggtcgtccacaggaacgcttgtcctgaatggtggcccgcaccctgcagtgagcccacggctatagtggtgcagccagcagccccgacgcctctgcagtcccagacccagggaagccccgtgtgcaccacggtgtgccctggaccactcacttggccgctgccaccctgggaggatcacaggggctgccttctggacatatgtcaggctctcactgccccartgagaggactggctctggtcctgatccacaagctctgaaccaatagcgggtcttgggatgacgtctgcggagcccctcggtcccagcgtggctggcgtccaggaccccagcacctctacacccaggtccttctcagttcccaccggccgggctgacgctggtctccagggtgatggagctgattcttcgggtttccctcagctcagatcaaatttaacacagcaagaggacacccactgttcccaccgaagaggcagaaagctggagttcgcggtgcctttctcccccaggctgggatggaggaggcagcatgaggccaccgtcattcccagtgtgtgagctggggccatccggaagttgcgattcatgtcagacactacggggccgaggctcatgtgggtgtgcgtcctctcagggtcacacctcagcaaggaagctcagcagaaggtctcccaggtccctgagccaccgttcctctgactgcttgtacccttcccgagatgctgctgcagccccacgccactcagagtgaccagcctgggccaacccctgggttctgacaagatgtgctgtttaggactaaattcagctgcatataacagaaaacttctgacaaggttggtgtgaacacctgaggcttttcttccctcccacacaaaacccatctaaatgggcagtctgggtcccgcatcctggccagggacatttacgggaaccacatcagccta

SEQ ID NO: 25243 - DNA, 1016 bp, Homo sapiens
catgaaggttctgtaagccagagctgaagtgagtggggcccctgtccgcaggctgccacctctggcaggtcgtccacaggaacgcttgtcctgaatggtggcccgcaccctgcagtgagcccacggctatagtggtgcagccagcagccccgacgcctctgcagtcccagacccagggaagccccgtgtgcaccacggtgtgccctggaccactcacttggccgctgccaccctgggaggatcacaggggctgccttctggacatatgtcaggctctcactgccccagtgagaggactggctctggtcctgatccacaagctctgaaccaatagcgggtcttgggatgacgtctgcggagcccctcggtcccagcgtggctggcgtccaggaccccagcacctctacacccaggtccttctcagttcccaccggccgggctgacgctggtctccagggtgatggagctgattcttcgggtttccctcagctcagatcaaatttaacacagcaagaggacacccactgttcccaccgaagaggcagaaagctggagttcgcrgtgcctttctcccccaggctgggatggaggaggcagcatgaggccaccgtcattcccagtgtgtgagctggggccatccggaagttgcgattcatgtcagacactacggggccgaggctcatgtgggtgtgcgtcctctcagggtcacacctcagcaaggaagctcagcagaaggtctcccaggtccctgagccaccgttcctctgactgcttgtacccttcccgagatgctgctgcagccccacgccactcagagtgaccagcctgggccaacccctgggttctgacaagatgtgctgtttaggactaaattcagctgcatataacagaaaacttctgacaaggttggtgtgaacacctgaggcttttcttccctcccacacaaaacccatctaaatgggcagtctgggtcccgcatcctggccagggacatttacgggaaccacatcagccta

SEQ ID NO: 25244 - DNA, 1016 bp, Homo sapiens
catgaaggttctgtaagccagagctgaagtgagtggggcccctgtccgcaggctgccacctctggcaggtcgtccacaggaacgcttgtcctgaatggtggcccgcaccctgcagtgagcccacggctatagtggtgcagccagcagccccgacgcctctgcagtcccagacccagggaagccccgtgtgcaccacggtgtgccctggaccactcacttggccgctgccaccctgggaggatcacaggggctgccttctggacatatgtcaggctctcactgccccagtgagaggactggctctggtcctgatccacaagctctgaaccaatagcgggtcttgggatgacgtctgcggagcccctcggtcccagcgtggctggcgtccaggaccccagcacctctacacccaggtccttctcagttcccaccggccgggctgacgctggtctccagggtgatggagctgattcttcgggtttccctcagctcagatcaaatttaacacagcaagaggacacccactgttcccaccgaagaggcagaaagctggagttcgcggtgcctttctcccccaggctgggatggaggaggcagcatgaggccaccgtcattcccagtgtgtgagctggggccatccggaagttgcgattcatgtcagacackacggggccgaggctcatgtgggtgtgcgtcctctcagggtcacacctcagcaaggaagctcagcagaaggtctcccaggtccctgagccaccgttcctctgactgcttgtacccttcccgagatgctgctgcagccccacgccactcagagtgaccagcctgggccaacccctgggttctgacaagatgtgctgtttaggactaaattcagctgcatataacagaaaacttctgacaaggttggtgtgaacacctgaggcttttcttccctcccacacaaaacccatctaaatgggcagtctgggtcccgcatcctggccagggacatttacgggaaccacatcagccta

SEQ ID NO: 25245 - DNA, 1016 bp, Homo sapiens
catgaaggttctgtaagccagagctgaagtgagtggggcccctgtccgcaggctgccacctctggcaggtcgtccacaggaacgcttgtcctgaatggtggcccgcaccctgcagtgagcccacggctatagtggtgcagccagcagccccgacgcctctgcagtcccagacccagggaagccccgtgtgcaccacggtgtgccctggaccactcacttggccgctgccaccctgggaggatcacaggggctgccttctggacatatgtcaggctctcactgccccagtgagaggactggctctggtcctgatccacaagctctgaaccaatagcgggtcttgggatgacgtctgcggagcccctcggtcccagcgtggctggcgtccaggaccccagcacctctacacccaggtccttctcagttcccaccggccgggctgacgctggtctccagggtgatggagctgattcttcgggtttccctcagctcagatcaaatttaacacagcaagaggacacccactgttcccaccgaagaggcagaaagctggagttcgcggtgcctttctcccccaggctgggatggaggaggcagcatgaggccaccgtcattcccagtgtgtgagctggggccatccggaagttgcgattcatgtcagacactacggggccgaggctcatgtgggtgtgcgtcctctcagggtcacacctcagcaaggaagctcagcagaaggtctcccaggtccctgagccaccgttcctctgactgcttgtacccttcccgagatgctgctgcagccccacgccactcagagtgaccagyctgggccaacccctgggttctgacaagatgtgctgtttaggactaaattcagctgcatataacagaaaacttctgacaaggttggtgtgaacacctgaggcttttcttccctcccacacaaaacccatctaaatgggcagtctgggtcccgcatcctggccagggacatttacgggaaccacatcagccta

SEQ ID NO: 25246 - DNA, 1082 bp, Homo sapiens
ccaggtctcccggggcctggtgtgtgcaccacagactacatattccacaaggaagctgtgagaaagaagcacagacagtcctgcaccatctcacatccaccaaatccagaattctcctttctcaaaccatccacagactaacttattcagctccccacaatatgagtctgttttgaggccagggggtgggtcctggaccctccaattccttgacagacaaaaggtgtagaatagcctgggattccaggttcctgggagtcctgcagggcaggtgcaggctggggcatggaggcggaagcttcttcacaccacaagcggccacggtagagttgacgggagaaaccaactttaaattcatgcrggatcaggaatgctgtgccacatcaatgtgtaaaatacaatcttcatgtgggagaacgaatggtcatctctgaaatatgctttgcacattaggatttttcagatcttccctattcttggtttacccaaagcaaagcgagttcttgctggggtgaagggtggaagagaaaagcagcggaatgggcgggctgtcgaacaaaaggcggcgagggaggtaccgtgcagagcctgctgggccttctgtcccatggccccgcacaccggactcacccagcctccagccgctcctgtgcctttctgcctaataaatatctgtgataattaccaacccccaaaaagggttctctaacgagggtgcattttatcagtcccttaacgaggctgtttgggttcctgcctcctatagagtggcggttaatgcttaatcagcaaatgcactgtttaaataataacaagaatatcagcagagaatctaaattatcccttaacttctcaaaataatcataacaggcatttgaacattcatacaaatatggctcatgaataaaaatgcgctttctttaatacaaatatagtctgatggaaagtctctgaaacccaacctacggaggcccctccctgtcatctcctggtgcatggaacagcgactttgccatcactgaggttccgggcacagaacctgcctcagtccagcgtccctatccgctgtaagaaagggtgaa

SEQ ID NO: 25247 - DNA, 1082 bp, Homo sapiens
ccaggtctcccggggcctggtgtgtgcaccacagactacatattccacaaggaagctgtgagaaagaagcacagacagtcctgcaccatctcacatccaccaaatccagaattctcctttctcaaaccatccacagactaacttattcagctccccacaatatgagtctgttttgaggccagggggtgggtcctggaccctccaattccttgacagacaaaaggtgtagaatagcctgggattccaggttcctgggagtcctgcagggcaggtgcaggctggggcatggaggcggaagcttcttcacaccacaagcggccacggtagagttgacgggagaaaccaactttaaattcatgcaggatcaggaatgctgtgccacatcaatgtgtaaaatacaatcttcatgtgggagaacgaatggtcatctctgaaatatgctttgcamattaggatttttcagatcttccctattcttggtttacccaaagcaaagcgagttcttgctggggtgaagggtggaagagaaaagcagcggaatgggcgggctgtcgaacaaaaggcggcgagggaggtaccgtgcagagcctgctgggccttctgtcccatggccccgcacaccggactcacccagcctccagccgctcctgtgcctttctgcctaataaatatctgtgataattaccaacccccaaaaagggttctctaacgagggtgcattttatcagtcccttaacgaggctgtttgggttcctgcctcctatagagtggcggttaatgcttaatcagcaaatgcactgtttaaataataacaagaatatcagcagagaatctaaattatcccttaacttctcaaaataatcataacaggcatttgaacattcatacaaatatggctcatgaataaaaatgcgctttctttaatacaaatatagtctgatggaaagtctctgaaacccaacctacggaggcccctccctgtcatctcctggtgcatggaacagcgactttgccatcactgaggttccgggcacagaacctgcctcagtccagcgtccctatccgctgtaagaaagggtgaa

SEQ ID NO: 25248 - DNA, 564 bp, Homo sapiens
tgcaatggtgcaatctcagctcactgcaacctctgcctcctggattcaagtgattctactgcctcagcctcccaagtagctgggactacaggtgcacaccaccacgccctactaatttttgtatttttaatagagatgaggtttcactgtgttggccaggctggtctcaaactcctgacctcaagtgatccactggcctcggcctcccaacgtgctgggattacaggtgtgagccactgtgcctggcctgtatctcctttcttaagaataataataattaaaaaacccagcatttacattgagtagagggaagactacaccattgttctagatggttcaaaatttggcttatctatagtaaccaggtcattttattmatttacttgtttctattatatattcatgaatacttcaattttcatatgtatttcatatatataccattcaaattaaacaatatacaacaggttattgttaacaattataaacatttattaagcaccaagaatatactgtggtggttgctatatgaaaacataattaccaatatagtatccctaccat

SEQ ID NO: 25249 - DNA, 564 bp, Homo sapiens
tgcaatggtgcaatctcagctcactgcaacctctgcctcctggattcaagtgattctactgcctcagcctcccaagtagctgggactacaggtgcacaccaccacgccctactaatttttgtatttttaatagagatgaggtttcactgtgttggccaggctggtctcaaactcctgacctcaagtgatccactggcctcggcctcccaacgtgctgggattacaggtgtgagccactgtgcctggcctgtatctcctttcttaagaataataataattaaaaaacccagcatttacattgagtagagggaagactacaccattgttctagatggttcaaaatttggcttatctatagtaaccaggtcattttattaatttacttgtttctattatatattcatgaatacttcaattttcataygtatttcatatatataccattcaaattaaacaatatacaacaggttattgttaacaattataaacatttattaagcaccaagaatatactgtggtggttgctatatgaaaacataattaccaatatagtatccctaccat

SEQ ID NO: 25250 - DNA, 569 bp, Homo sapiens
catacctggctaatttttgtatttttagtagagacagggttttaccatgttggccaggctggtctcaaactcttgacttcaggtgatccgcccaccttggcctctcaaagcgctggaaagtttaaacagtaacaaaagaggggaaattactgcataacgaagtaaaaggcattgagttttgtcatttttgtgagggttatgatactggtagaagagatgcaagaggaagtayctggaggtgaggagttctgtgtccatggacagacttggtcagggagtgtctgatacatgtctaagggctgtggttctatcactctaattccagttgattcctgcttctgctataattgccctgcataatccccaaaactttcaataaaattttattactgacaacaacctgctgtgagtggtgtttggaggaataatggagaagagatggagccttgaagtttcagatagtggcagatatttgcatagatctataatatatagtgcagcatgggctgtcttctaaatagcaaagaatatgcattatagcagtgcagaggagggaccaatcactttca

SEQ ID NO: 25251 - DNA, 569 bp, Homo sapiens
catacctggctaatttttgtatttttagtagagacagggttttaccatgttggccaggctggtctcaaactcttgacttcaggtgatccgcccaccttggcctctcaaagcgctggaaagtttaaacagtaacaaaagaggggaaattactgcataacgaagtaaaaggcattgagttttgtcatttttgtgagggttatgatactggtagaagagatgcaagaggaagtatctggaggtgaggagttctgtgtccatggacagacttggtcagggagtgtctgatacatgtctaagggctgtggttctatcactctaattccagttgattcctgcttctgctataattgccctgcataatccccaaaactttcaataaaattttattactgacaacaacctgctgtgagtggtgtttggaggaataatggagaagagatggagccttgaagtttcagayagtggcagatatttgcatagatctataatatatagtgcagcatgggctgtcttctaaatagcaaagaatatgcattatagcagtgcagaggagggaccaatcactttca

SEQ ID NO: 25252 - DNA, 472 bp, Homo sapiens
gttcacagacctaaaagatagcataattgtcttgtaactatctttttaaagggaaaaggaaatgattgggtttttttgttgtcttatttcttttcaggttttgaacgaagaatgtgatcagaactggtacaaggcagagcttaatggaaaagacggcttcattcccaagaactacatagaaatgaaaccacatccgtaagttragctccattagtcttggaagggttggacccacctccttgtttcaaacactctttttaaaattgagatcactgggatggatgtcatactttttattcacgtttctagggaattaacaaaggatattgattgtgcatgttaatagtatataataatatatcatagtcaataatattatatgttttagattgataataactgtcagtgatcttcaaaaataaaacgatagttggtgcaggtccgtaattctttttctgttaaatatgtctta

SEQ ID NO: 25253 - DNA, 1208 bp, Homo sapiens
tgccagctgcctggaaggccgcctgatcctgtgctggaagaaaagcccctttttgaaatggtaaagacctcgaggtcattgctctaaccctggcagcatatcccgagtgggtcaaggagaaagggggtagaaggctcaaataaggaaagggccaaactggcattcttaggaaaacacttgcttggtcattagccacratgagtcatttcttattttccacctccctcttctactgccgcccaccttcagctcccactccatgtcccagtctctgttcttacgactttcctgttgctttgtttcactgaatctttcagaaagttgcactgctctaaatcacttcctggaggcaaaaatattcactaaatagatataaatttgaatttaaagaatccctcttgtgctgggaatctaaaaaaaaatgatagcaaagtgaggaagatatgctcagaaaaccagaatgaaatcagagtcaatagccattggaagagaagcagaaggaagatgacatttgagagacggttaggaagatgtgaacaggaagctcatgtcttttaatatttgaaataaagatatgaaaaaagcccaattctgatatagggcaatattaaagagaaaaaactacatgccaaagagtttctctgcctaaaaagaccacaggagcacaaaatgagggagaaaacagactccgaacccctgcaccaaagaaggggacagtgctgactatcttcttcaggtgcattaggaagcagagatgccccacagaaaattcagctgtcagcctcacacctagtcctagatgaacagaatcctcaacaacccttgagtgaagtcatggtgagaacacatatcaagatttatttctggaaaagagcaaagaatgaaactaaaggtgacgctcccaaaggagatattgagctatactcttaggaagtgcagacttcctgctaactgtgcaagcatctgtgcagagcccttctcatgcttggatgatctttccagaacactcataaagtgacagaccatccaactgtctgtcagaagttagctcagcatgcaattctgaccgttcagctagatccagcactgagttagacagagtagaagcttggctgaaccttaaaggaggcggtttctaaaaaagaatagttgtctacatacacatcaaatggtaaagcaattaattcgaggttaacctaactaccaga

SEQ ID NO: 25254 - DNA, 1208 bp, Homo sapiens
tgccagctgcctggaaggccgcctgatcctgtgctggaagaaaagcccctttttgaaatggtaaagacctcgaggtcattgctctaaccctggcagcatatcccgagtgggtcaaggagaaagggggtagaaggctcaaataaggaaagggccaaactggcattcttaggaaaacacttgcttggtcattagccacgatgagtcatttcttattttccacctccctcttctactgccgcccaccttcagctcccactccatgtcccagtctctgttcttaygactttcctgttgctttgtttcactgaatctttcagaaagttgcactgctctaaatcacttcctggaggcaaaaatattcactaaatagatataaatttgaatttaaagaatccctcttgtgctgggaatctaaaaaaaaatgatagcaaagtgaggaagatatgctcagaaaaccagaatgaaatcagagtcaatagccattggaagagaagcagaaggaagatgacatttgagagacggttaggaagatgtgaacaggaagctcatgtcttttaatatttgaaataaagatatgaaaaaagcccaattctgatatagggcaatattaaagagaaaaaactacatgccaaagagtttctctgcctaaaaagaccacaggagcacaaaatgagggagaaaacagactccgaacccctgcaccaaagaaggggacagtgctgactatcttcttcaggtgcattaggaagcagagatgccccacagaaaattcagctgtcagcctcacacctagtcctagatgaacagaatcctcaacaacccttgagtgaagtcatggtgagaacacatatcaagatttatttctggaaaagagcaaagaatgaaactaaaggtgacgctcccaaaggagatattgagctatactcttaggaagtgcagacttcctgctaactgtgcaagcatctgtgcagagcccttctcatgcttggatgatctttccagaacactcataaagtgacagaccatccaactgtctgtcagaagttagctcagcatgcaattctgaccgttcagctagatccagcactgagttagacagagtagaagcttggctgaaccttaaaggaggcggtttctaaaaaagaatagttgtctacatacacatcaaatggtaaagcaattaattcgaggttaacctaactaccaga

SEQ ID NO: 25255 - DNA, 1208 bp, Homo sapiens
tgccagctgcctggaaggccgcctgatcctgtgctggaagaaaagcccctttttgaaatggtaaagacctcgaggtcattgctctaaccctggcagcatatcccgagtgggtcaaggagaaagggggtagaaggctcaaataaggaaagggccaaactggcattcttaggaaaacacttgcttggtcattagccacgatgagtcatttcttattttccacctccctcttctactgccgcccaccttcagctcccactccatgtcccagtctctgttcttacgactttcctgttgctttgtttcactgaatctttcagaaagttgcactgctctaaatcacttcctggaggcaaaaatattcactaaatagatataaatttgaatttaaagaatccctcttgtgctgggaatctaaaaaaaaatgatagcaaagtgaggaagatatgcycagaaaaccagaatgaaatcagagtcaatagccattggaagagaagcagaaggaagatgacatttgagagacggttaggaagatgtgaacaggaagctcatgtcttttaatatttgaaataaagatatgaaaaaagcccaattctgatatagggcaatattaaagagaaaaaactacatgccaaagagtttctctgcctaaaaagaccacaggagcacaaaatgagggagaaaacagactccgaacccctgcaccaaagaaggggacagtgctgactatcttcttcaggtgcattaggaagcagagatgccccacagaaaattcagctgtcagcctcacacctagtcctagatgaacagaatcctcaacaacccttgagtgaagtcatggtgagaacacatatcaagatttatttctggaaaagagcaaagaatgaaactaaaggtgacgctcccaaaggagatattgagctatactcttaggaagtgcagacttcctgctaactgtgcaagcatctgtgcagagcccttctcatgcttggatgatctttccagaacactcataaagtgacagaccatccaactgtctgtcagaagttagctcagcatgcaattctgaccgttcagctagatccagcactgagttagacagagtagaagcttggctgaaccttaaaggaggcggtttctaaaaaagaatagttgtctacatacacatcaaatggtaaagcaattaattcgaggttaacctaactaccaga

SEQ ID NO: 25256 - DNA, 1208 bp, Homo sapiens
tgccagctgcctggaaggccgcctgatcctgtgctggaagaaaagcccctttttgaaatggtaaagacctcgaggtcattgctctaaccctggcagcatatcccgagtgggtcaaggagaaagggggtagaaggctcaaataaggaaagggccaaactggcattcttaggaaaacacttgcttggtcattagccacgatgagtcatttcttattttccacctccctcttctactgccgcccaccttcagctcccactccatgtcccagtctctgttcttacgactttcctgttgctttgtttcactgaatctttcagaaagttgcactgctctaaatcacttcctggaggcaaaaatattcactaaatagatataaatttgaatttaaagaatccctcttgtgctgggaatctaaaaaaaaatgatagcaaagtgaggaagatatgctcagaaaaccagaatgaaatcagagtcaatagccattggaagagaagcagaaggaagatgacatttgagagacggttaggaagatgtgaacaggaagctcatgtcttttaatatttgaaataaagatatgaaaaaagcccaattctgatatagggcaatattaaagagaaaaaactacatgccaaagagtttctctgcctaaaaagaccacaggagcacaaaatgagggagaaaacagactccgaacccctgcaccaaagaaggggacagtgctgactatcttcttcaggtgcattaggaagcagagatgccccacagaaaattcagctgtcagcctcacacctagtcctagatgaacagaatcctcaacaacccttgagtgaagtcatggtgagaacacatatcaagatttatttctggaaaagagcaaagaatgaaactaaaggtgacgctcccaaaggagatattgagctatactcttaggaagtgcagacttcctgctaactgtgcaagcatctgtgcagagcccttctcatgcttggatgatstttccagaacactcataaagtgacagaccatccaactgtctgtcagaagttagctcagcatgcaattctgaccgttcagctagatccagcactgagttagacagagtagaagcttggctgaaccttaaaggaggcggtttctaaaaaagaatagttgtctacatacacatcaaatggtaaagcaattaattcgaggttaacctaactaccaga

SEQ ID NO: 25257 - DNA, 1208 bp, Homo sapiens
tgccagctgcctggaaggccgcctgatcctgtgctggaagaaaagcccctttttgaaatggtaaagacctcgaggtcattgctctaaccctggcagcatatcccgagtgggtcaaggagaaagggggtagaaggctcaaataaggaaagggccaaactggcattcttaggaaaacacttgcttggtcattagccacgatgagtcatttcttattttccacctccctcttctactgccgcccaccttcagctcccactccatgtcccagtctctgttcttacgactttcctgttgctttgtttcactgaatctttcagaaagttgcactgctctaaatcacttcctggaggcaaaaatattcactaaatagatataaatttgaatttaaagaatccctcttgtgctgggaatctaaaaaaaaatgatagcaaagtgaggaagatatgctcagaaaaccagaatgaaatcagagtcaatagccattggaagagaagcagaaggaagatgacatttgagagacggttaggaagatgtgaacaggaagctcatgtcttttaatatttgaaataaagatatgaaaaaagcccaattctgatatagggcaatattaaagagaaaaaactacatgccaaagagtttctctgcctaaaaagaccacaggagcacaaaatgagggagaaaacagactccgaacccctgcaccaaagaaggggacagtgctgactatcttcttcaggtgcattaggaagcagagatgccccacagaaaattcagctgtcagcctcacacctagtcctagatgaacagaatcctcaacaacccttgagtgaagtcatggtgagaacacatatcaagatttatttctggaaaagagcaaagaatgaaactaaaggtgacgctcccaaaggagatattgagctatactcttaggaagtgcagacttcctgctaactgtgcaagcatctgtgcagagcccttctcatgcttggatgatctttccagaacactcataaagtgacagaccatccaactgtctgycagaagttagctcagcatgcaattctgaccgttcagctagatccagcactgagttagacagagtagaagcttggctgaaccttaaaggaggcggtttctaaaaaagaatagttgtctacatacacatcaaatggtaaagcaattaattcgaggttaacctaactaccaga

SEQ ID NO: 25258 - DNA, 1208 bp, Homo sapiens
tgccagctgcctggaaggccgcctgatcctgtgctggaagaaaagcccctttttgaaatggtaaagacctcgaggtcattgctctaaccctggcagcatatcccgagtgggtcaaggagaaagggggtagaaggctcaaataaggaaagggccaaactggcattcttaggaaaacacttgcttggtcattagccacgatgagtcatttcttattttccacctccctcttctactgccgcccaccttcagctcccactccatgtcccagtctctgttcttacgactttcctgttgctttgtttcactgaatctttcagaaagttgcactgctctaaatcacttcctggaggcaaaaatattcactaaatagatataaatttgaatttaaagaatccctcttgtgctgggaatctaaaaaaaaatgatagcaaagtgaggaagatatgctcagaaaaccagaatgaaatcagagtcaatagccattggaagagaagcagaaggaagatgacatttgagagacggttaggaagatgtgaacaggaagctcatgtcttttaatatttgaaataaagatatgaaaaaagcccaattctgatatagggcaatattaaagagaaaaaactacatgccaaagagtttctctgcctaaaaagaccacaggagcacaaaatgagggagaaaacagactccgaacccctgcaccaaagaaggggacagtgctgactatcttcttcaggtgcattaggaagcagagatgccccacagaaaattcagctgtcagcctcacacctagtcctagatgaacagaatcctcaacaacccttgagtgaagtcatggtgagaacacatatcaagatttatttctggaaaagagcaaagaatgaaactaaaggtgacgctcccaaaggagatattgagctatactcttaggaagtgcagacttcctgctaactgtgcaagcatctgtgcagagcccttctcatgcttggatgatctttccagaacactcataaagtgacagaccatccaactgtctgtcagaagttagctcagcatgcaattctgaccgttcagctagatccagcactgagttagacagagtagaagcttggctgaaccttaaaggmggcggtttctaaaaaagaatagttgtctacatacacatcaaatggtaaagcaattaattcgaggttaacctaactaccaga

SEQ ID NO: 25259 - DNA, 566 bp, Homo sapiens
gggacaaattctcattcttctactgtgtgccaagcatggtattgtagtctttatcttataacatttatttaccgtgaactggatcttcacctgtgaccgcaagtatccaagatgatcttgrtgtcccttacctgctcacgctcacacactcgtgttttctcttccatgttgaattaggactagctcgtaatgaatagaatattgcaaaaatgatgtttcgtgacttctttggatggatcattttaggaaatggaggtttctaactcgaattcagatatttatatcactgatcaacattttgcttgcaacctcatgagagaacctgacccagaaccactcagctgagtcactattttctcaattttttttttttttttaaagaacaggtatcactctcacccaggctggaggggcagtggcatgatcatagctcactgtaaccttgagctccgggactcaagtgatcctcctgcatcaacctccctgatagctaggactacagatgtgttagtagtcctgtaagcctgtttagatttcttaattctggatatatgacattacataag

SEQ ID NO: 25260 - DNA, 719 bp, Homo sapiens
cgcattcatgtaataatcttatctcgattttatatgagataaaatatttgtttgaaactataagggaaaccataacgacaaaatgcaaaaatccccaatatttgggacttcattccaagacacatgctaaaaactacctgtatagttttacaaatattccatctgtgaaggatagtatatatgatctattctccagatatttgttcaatccattttcctcactgtaattacagaaaaatttgtaatttttgcaaacatcatggaatattaaaatagagacagttttacctaattttcagcttagggttttcagattgcctatttcttcttcatttcaaagtattccagtattgagaaactaattgagtggaggtattttcatcaacccagtcagtgtaaaatgatcccattgcttaacattggtataaagcctattaaagttaatggaagaaagaattacaccactgaactagaggtgatggcaatgactcaaatagagaaaaatgggaagaatgggcaagaactgttgcccttacytaggatttgtttttatatgacattttatttggggaagaaggaagaatggaggcactattatctacctagaagtgcattttgaattgcttgtgagtatttataaactattttagtttctgagtattttttccttcggcaattgaataactgtttgtgaacattttttcttccttttataatat

SEQ ID NO: 25261 - DNA, 794 bp, Homo sapiens
tcctaccaatagagtttgtcattaactccaaagtgcattctttgctacccctggtatttcctacactgtagatactgccaagagcactgtttgcaccatagcctggacctactgcagagttcttccttgccctaggcctccttaaagcaaatagccttccatatcacctgctatatatccaggtagtattctttggggtgaactgtattgtctccagaaccttgagatgtttactaggtggtatccatgcttcatcgtggtagggaatgcaagacgctgcattttgccttttgtttgggaggggatattccagcatgctcctaaccattcaggctcctgaagattttactgaaatggtagtttctcgttatccataaggtttatttctcatactccggaattcacatattttattaaagtctccatcctgctagcccttgttgatcacactgccaattcttcrtgatgatatagggatgaaagaacctcgtctgtcatctcttgaggtttgatatttgagtctgagaaataaactgacaatagaccgataagcaagaacaagtgcatagaaatttacttacgtgcttaggagcatcacaggaaggtgagtgttcaatatcccaatgaggtctagaagtttaaatacttttcttcatagaataatggaaaatggggggtgtaggccaatttttagaggggtggtaaatgatttttaggagagataaatgagacagcagaacagatagcctgggacaaagtttgtctgggctctaagtatgatgtttgattttcag

SEQ ID NO: 25262 - DNA, 520 bp, Homo sapiens
caatggaatattactcagccttaaaaagtcagaatttacaacacagatgaactgtgaggatattatgctaagtgaaaaaaaccagtcacaaaaagacaaatactatgtactatgattctacttatatgagatacctaaagtagtcaaattcagagaaacagaaagtagaatggggrttctcaggagctgaagagaggggaaaatggggtgttgtttaacacagagtttcgatcttgcaagatgaaaaagtcctggagatctgctgcacaacaatgtgaataaagttttataccctactaaactgtacacttaaaaacggttaagtgttttctaaccacaatttttttaaaaaagcatcaccataaaattatagtaagtaatgacagaggaccctcaaatggtagctgctatttaccaagtattatactaaccattctacacacatcaactaataaaattcttacaacagccctaaaagataggtactattatccttgttttataaaacgtagaaaacaaa

SEQ ID NO: 25263 - DNA, 520 bp, Homo sapiens
caatggaatattactcagccttaaaaagtcagaatttacaacacagatgaactgtgaggatattatgctaagtgaaaaaaaccagtcacaaaaagacaaatactatgtactatgattctacttatatgagatacctaaagtagtcaaattcagagaaacagaaagtagaatgggggttctcaggagctgragagaggggaaaatggggtgttgtttaacacagagtttcgatcttgcaagatgaaaaagtcctggagatctgctgcacaacaatgtgaataaagttttataccctactaaactgtacacttaaaaacggttaagtgttttctaaccacaatttttttaaaaaagcatcaccataaaattatagtaagtaatgacagaggaccctcaaatggtagctgctatttaccaagtattatactaaccattctacacacatcaactaataaaattcttacaacagccctaaaagataggtactattatccttgttttataaaacgtagaaaacaaa

SEQ ID NO: 25264 - DNA, 564 bp, Homo sapiens
ccctgccctgcagccacactggcctcttcgcttttctctgcacatgccaagcatgttccccatctcaagtctttgtattcgctgttccctctggctgcaatgctcttcccccagayactcacagttctagcttcctcatttcattccggtctgtagtcagatgtcacctgccttctctgaaatcctttctaaggaaactgcctcccagtgctctttatcctctcatcttccgttattttccttcctggcccttattacctgacatcattatatatatattatatatatataaatatattatatatttatgtatatatattatatatacatattataatatatattatatgctatattatactatattataatatataattataatataattattattatatattataattattaatatattatatataataattacatgtattaggtgaataggtgaatatttattcacctattagctgaataattaggtgaatatttaggtgaataattatttaatataattaggtgaataattatatatattatataggtgaaatataatat

SEQ ID NO: 25265 - DNA, 564 bp, Homo sapiens
ccctgccctgcagccacactggcctcttcgcttttctctgcacatgccaagcatgttccccatctcaagtctttgtattcgctgttccctctggctgcaatgctcttcccccagatactcacagttctagcttcctcatttcattccggtctgtagtcagatgtcacctgccttctctgaaatcctttctaaggaaactgcctcccagtgctctttatcctctcatcttccgttattttccttcctggcccttattacctgacatcattatatatatattatatatatrtaaatatattatatatttatgtatatatattatatatacatattataatatatattatatgctatattatactatattataatatataattataatataattattattatatattataattattaatatattatatataataattacatgtattaggtgaataggtgaatatttattcacctattagctgaataattaggtgaatatttaggtgaataattatttaatataattaggtgaataattatatatattatataggtgaaatataatat

SEQ ID NO: 25266 - DNA, 564 bp, Homo sapiens
ccctgccctgcagccacactggcctcttcgcttttctctgcacatgccaagcatgttccccatctcaagtctttgtattcgctgttccctctggctgcaatgctcttcccccagatactcacagttctagcttcctcatttcattccggtctgtagtcagatgtcacctgccttctctgaaatcctttctaaggaaactgcctcccagtgctctttatcctctcatcttccgttattttccttcctggcccttattacctgacatcattatatatatattatatatatataaatatattatatatttatgtatatatattatatatacatattataatatatattatatgctatattatactatattataatatataattataatataattattattatatattataattattaatatattatatataataattacatgtattaggtgaataggtgaatatttattcacctattmgctgaataattaggtgaatatttaggtgaataattatttaatataattaggtgaataattatatatattatataggtgaaatataatat

SEQ ID NO: 25267 - DNA, 513 bp, Homo sapiens
tgaatccaaatttaaaattctacatattgaatattaattcttatgacatttctacccagttgtctgcccctctaccttcaggttttcatattaatgtatttaaaatgtcaatatgtatgcacaagtatataagtagagagattctgattccattcctatttttagcaaaaatacatatactattcatcaccgtgagtagattttaaaaatatttttaaaataagaagtcttcctgtttcaaaggattcagacattcgtcagatagtttatagaactaagaaatttcccactgtatgaacatataataatttatttmattcatttaattagtttgattacactattttgccactataagcgaagttacaatgaacagtattatttcaagtacacctgtatgataaattctcagaggcaaaattttctgtataaagggtagggaacattgttttataacttattaggccttgtgtgttacgatattgctctccatagatattgtacaaacttatg

SEQ ID NO: 25268 - DNA, 283 bp, Homo sapiens
aagaaggaaggacatcatccagggaatagtgcctcctaagcctgtctgcctgatgttattttctctctattttctgggaaagaataaaacaaatccaagaacatctaaagtagcattgacattttttggataaaatctcttcctacattagaaaagcatgatagctgttctcatgatgcctctgtcctgcagtatcatgcaayacataaaacagcactgggcgtttcacgtgtccctggattcctgcagtatcatgcgatacatgaaacagcactgggcattt

SEQ ID NO: 25269 - DNA, 540 bp, Homo sapiens
caatatgcttcattttctcttctgtagtaaacaacatgcttcattttcttaatccactattccttcctctcttccatgtattttctggtagtgctgccaatcaaattacctcttttttctctggctgagaagtaggtacttgacccacattcatccactcagaatgtccctacgaggaactgaatcttaagaacagaaaatggctagaaaagaagcattttaagaaaacccttgaagaacttgtccataattcctcctactcagtttcttgataatgactgtattcctrcccttccttagattcaatgagatacccaatttttttagtacattcatttacattttcaagagcattggtttctgatgcttataatcaaaggatcctcaatgatgtattaatgttgaggttttgacatatatcaagggactatttcacctctgtatagtttgtataaattttagattttcatacatgtggggtttttctactcttatttaatgttattatgtacctttatcctaataatattaaaaatattt

SEQ ID NO: 25270 - DNA, 546 bp, Homo sapiens
gatatttctgtgactgaggaaggaataggttgggccctctggcagagggagagcaaccagcaaatgccctttagcttctgctcgcgattgttcagcgggcctgaacaatgctatctcctgttggaaaaatagttccttgcagttaaccaggccatcttgcaaacagtgtcactaactggagatacatcggtggaattaaaaacagcttaccctattaagcgttgagtggctggcctatttgccatgtccacatcagctgtagcacaaaatggtactctggttaggggtcatacagatctccagcagagcaggcatcttacatccagccctctgtctataaaactataggccctgatgggacctagacaataaactatagatttaaaatcagtcccaacaccacccccagagaaatcttaycaaataaaggaaggagaaaaaaacccacccaagggtgcttggtacacagatgactccaatgtgggtcagcgacacagatggacttccgtggctacgcaaccaactatccacaccatatgggtgcag

SEQ ID NO: 25271 - DNA, 574 bp, Homo sapiens
ttgatgctgccatgaaagaagtgcctttcaccttctgctatgattctgaggcctccccagccatgtggaactataagtccaattaaacctcttttcttcccggtctagggtatgtctttatcagcagcgtgagtatatatgttgttcacctttcattccctgctctccctctccatgacttccattctcatggttgcaggactggcttcagttgctatgttcatagaatattaatccaccacctctcccattgatagttcgagtggacttttccaagtcctttccctgggaatttgggtggctggacctgtgacagataaatccaggaggcatcagtggtsgtttctgacaagtagaccacagaagtagaggaagctggtctagacaaagagtcagagtggggttaagagctacagtatgcagcagaaggaaagaaagaactagaaggcaggaaagaagaatgagtgtgagacagggaaagagatgtgacagacacaaaagagttgcagcagaaaaggatgcagagagagctcaaacccctaggtcaactgttctaaccttttcgttccatggg

SEQ ID NO: 25272 - DNA, 634 bp, Homo sapiens
cagagttttggaatatgcctgagtaagccagtctgaaatagcygatggtccagcttaagactattcaatatccatgcacctgccttttctaaagcttaaacttcaaaagagtaacagtaacaagtacatgatcctgtcaaatataattcaaatatatgttgcacaaattaaaatgcagtggtcctatccaaaataggtatccatgatattcactcctcttcggattcagtctcaactatgtcttaatatcctgaaataagataataaattatgaagttattcaaaccagcctaccctaaaaatgatgggaaaaatggaagataaaataagacaaacaattatatacatgacaatgcagaagagaagaaaacccaagaatgtattacatacttaattttataactgatcatggaactgtggatggtatttgtaccattctttttatattattcattccacacttctctatagtatcctaaattatccaagtttccacagcaagagcccactcttcatgaacagtgcccttagttgtcttgtcaaattggagttgttttaatcttccattaatgtttaccacttgacagaaaatccaaaaggcatctgaggagtccaactccaggcagaaacccta

SEQ ID NO: 25273 - DNA, 634 bp, Homo sapiens
cagagttttggaatatgcctgagtaagccagtctgaaatagccgatgrtccagcttaagactattcaatatccatgcacctgccttttctaaagcttaaacttcaaaagagtaacagtaacaagtacatgatcctgtcaaatataattcaaatatatgttgcacaaattaaaatgcagtggtcctatccaaaataggtatccatgatattcactcctcttcggattcagtctcaactatgtcttaatatcctgaaataagataataaattatgaagttattcaaaccagcctaccctaaaaatgatgggaaaaatggaagataaaataagacaaacaattatatacatgacaatgcagaagagaagaaaacccaagaatgtattacatacttaattttataactgatcatggaactgtggatggtatttgtaccattctttttatattattcattccacacttctctatagtatcctaaattatccaagtttccacagcaagagcccactcttcatgaacagtgcccttagttgtcttgtcaaattggagttgttttaatcttccattaatgtttaccacttgacagaaaatccaaaaggcatctgaggagtccaactccaggcagaaacccta

SEQ ID NO: 25274 - DNA, 634 bp, Homo sapiens
cagagttttggaatatgcctgagtaagccagtctgaaatagccgatggtccagcttaagactattcaatatccatgcacctgccttttctaaagcttaaacttcaaaagagtaacagtaacaagtacatgatcctgtcaaatataattcaaatatatgttgyacaaattaaaatgcagtggtcctatccaaaataggtatccatgatattcactcctcttcggattcagtctcaactatgtcttaatatcctgaaataagataataaattatgaagttattcaaaccagcctaccctaaaaatgatgggaaaaatggaagataaaataagacaaacaattatatacatgacaatgcagaagagaagaaaacccaagaatgtattacatacttaattttataactgatcatggaactgtggatggtatttgtaccattctttttatattattcattccacacttctctatagtatcctaaattatccaagtttccacagcaagagcccactcttcatgaacagtgcccttagttgtcttgtcaaattggagttgttttaatcttccattaatgtttaccacttgacagaaaatccaaaaggcatctgaggagtccaactccaggcagaaacccta

SEQ ID NO: 25275 - DNA, 634 bp, Homo sapiens
cagagttttggaatatgcctgagtaagccagtctgaaatagccgatggtccagcttaagactattcaatatccatgcacctgccttttctaaagcttaaacttcaaaagagtaacagtaacaagtacatgatcctgtcaaatataattcaaatatatgttgcacaaattaaaatgcagtggtcctatccaaaataggtatccatgatattcactcctcttcggattcagtctcaactatgtcttaatatcctgaaataagataataaattatgaagttattcaaaccagcctaccctaaaaatratgggaaaaatggaagataaaataagacaaacaattatatacatgacaatgcagaagagaagaaaacccaagaatgtattacatacttaattttataactgatcatggaactgtggatggtatttgtaccattctttttatattattcattccacacttctctatagtatcctaaattatccaagtttccacagcaagagcccactcttcatgaacagtgcccttagttgtcttgtcaaattggagttgttttaatcttccattaatgtttaccacttgacagaaaatccaaaaggcatctgaggagtccaactccaggcagaaacccta

SEQ ID NO: 25276 - DNA, 634 bp, Homo sapiens
cagagttttggaatatgcctgagtaagccagtctgaaatagccgatggtccagcttaagactattcaatatccatgcacctgccttttctaaagcttaaacttcaaaagagtaacagtaacaagtacatgatcctgtcaaatataattcaaatatatgttgcacaaattaaaatgcagtggtcctatccaaaataggtatccatgatattcactcctcttcggattcagtctcaactatgtcttaatatcctgaaataagataataaattatgaagttattcaaaccagcctaccctaaaaatgatgggaaaaatggaagataaaataagacaaacaattatatacatgacaatgcagaagagaagaaaacmcaagaatgtattacatacttaattttataactgatcatggaactgtggatggtatttgtaccattctttttatattattcattccacacttctctatagtatcctaaattatccaagtttccacagcaagagcccactcttcatgaacagtgcccttagttgtcttgtcaaattggagttgttttaatcttccattaatgtttaccacttgacagaaaatccaaaaggcatctgaggagtccaactccaggcagaaacccta

SEQ ID NO: 25277 - DNA, 561 bp, Homo sapiens
gctactttgttaataaataaaattttaaaaataatcaatggaatgttcatttcaaactactttgttatttcatttcatttaaatttagcataaactttacttcggcagccaattccttagttgttcttctccattaactcatgactactttagctcttgatgctaagcatgatgatgtttggtttcagaagttgccacattaacaataggatccttcaagctacaatcatgctaaccaattttgacaattttatattttatagggcctagttctaacattctattgttatttaattttataaatatttttwaaaatcttgttactaaattaaaaatagacctctggaaaataaatcgaaaggtttttttgttttttgttttttgagacagagtctcactcactctatcactcaggctagagtgcagcagcctgatcttggctcactgcaacctctgcttcctgggttcaagcgattctgctgcctcagtctcccaagtacctgagaatacaggtgcccacaaccatgcccagataatttttgtacttttagtagagatggg

SEQ ID NO: 25278 - DNA, 596 bp, Homo sapiens
aaagagaataacacttccaactaaaattccttctaaaattggactcatatcaattggaagtatttcaaacaattactaaactgatttacttgaacaaatatagaaaatattatctaagctatgtgtacctatttttttatattcctagaaattagggggaacttttatttcctttgattgaatatgagtttctaacttaacaaaatatataatagtgagtcagtaaaatgaatacttttaccaaggatggaaagtgttctgaattatctaaaagacattttcattgcagttaacatttgcctgtgtagatcagattaatattaaaatctatttttttcttttaacaaaatttagcaaatgaggaattttctattggttcatttcttctgacatttcttctatgttgacccttctcccatttcatgttgcaagatgtgagatcttacttcatttatcacattcatattcaaggcaaactaaatagaatcggratgataggcttgtacatttatgcttttttacagaaacctttagagaagtgttcagctatactgtatctcacctataaaaggtggttcacatttccaaatggataa

SEQ ID NO: 25279 - DNA, 540 bp, Homo sapiens
ctctttctctcacatcagatttattgttaagtgttaattcagtggttattttttccttgaaatttactgtgtttcttgaatggacacgtgtatctttcatcattttggaaagtttaaaccattaagtattcacatatttatctgctccatttattttattctagctctctatttaaatatatcacctcacacaactcattatttgtgataaccactcttctacatttccattttttcatctcactgtattgaactgtgctcatttgcttttctgatttagcttccagtgatctagctcttttgctatgtccaaaatattatcatactcatgctcctaatgtttarttttagtcataatatcatttatctttaaaatttgttattagtttcatgttaaaactgaaagattacattgtattgttttcatttggcagatattttcaaatttacttcttagaacataatacaaatacatgtttttcaatgtgtctgtaataataccagatctgcaatttttgtgacttttttcattatttttcc

SEQ ID NO: 25280 - DNA, 916 bp, Homo sapiens
atgttaaaatcttttgaaaaaggtattttaaagaccttcattaataactcacctcaagagttagcatttctcttttttctgtttaatttacatctgcaaattgaagacaaaattcatacctctattgggcagggaacagagaagtaattgaccatttgttgcataacagcccattggggaaaaccagtaaagaccaactcattcattcattcagtcttcaatcaatatatatttatagattgccatctatgtgctwtgcacatgctggattgtacagatgctcttacgagtccttatgcttaatgagttttatagactagcaggtggagacaacaagcaatgaaataaaaaagaattttgaaaatgaactctttctgtctgtgttttgatcaagacattgacataatggacatgggaaaccaaagtcaatgtgaaataagttccctgtgacacaggatttataaggtaatgaatgcactaggactagtgcattaaagtttggacccctcatccagatgaaggttgtacaagcttgcagagcagaaagaaggatttgaggaagattttcttggaggaaatgatgtttagaagcctctaattttctatctgaaggggtagggtgggaggagagcaccacattctttccctcaatcctttaataggttcacttggagagctctgtgtgttttaggaatggggggaagcttgcactggggtctcactcttcctttggaaatccagaaggtgacagaaaggatgatacactgctttgatgctgcacagggatcagcctgcgtgcctagagtttatcagaagacatgtgagtgtttttcatggaagaaagggccaaactggaaccatcctaattcctgctgtggagcaaagggagagggctgatggtaggacttaaagatca

SEQ ID NO: 25281 - DNA, 1209 bp, Homo sapiens
ctcatgcttgcttacgtccatctctatgcacaccccatagctgaccacgcatctgctttctggctctttgttgttttattgttgtattttttgtcacccaggatggagtgcagtggcgtgatctctgctcactgcagcctcaacttcctgggctcaagcgatcctcccacctcagcctcccgagtaggkgggaccacaggcacacaccatcatgcctggctaatttttgtattttttgtagagatggggacttgtggtgatgcccaggctgatcttgaactcctgaactcaatggattcctcccgcctcagccttccaaagtgctgggattataggcatgagccacctcacctggcctgctttctgtctctccgaagatccagagctgtgttcattccagctggccctgtgacctcatgcaaattattgcccttccattactcctctgtatgagagggaataatcctaccctccttgtagggggttgtttgaatttcactaatgtgcacagtgtctgacgcacccgaggagctgggcacgtgggaggctggtacgcagggcacaggacataacacagatgcccaggtacggttggcacaggcctagcaaacattttaaagcactcactctgtgccagcttcttagattaagcatcttacatgcattacctactttaatcctcggtgaatgtgagtatcagtttcattttataactgaagaaacgggcactgagacgggaagtcacttttacaggctcacatagatgatagttgatagggctgggagtccatctgagagcctgtcctccctaaacatcatcctgtccccttcctgatgtgaatcaccaagcaagggacaacacaattcatagatccaggacaaggtttatggcacatacttctaaggggtgggacctggtatcatggacacggcattcaagagatagtacatggtatagagtctgtcacaaaacagacatcacatggtgcatgaagcatgacccaggggtaagaggcatgggatgccgctaaagggagacacacaggacaaagcaagaggaacgcagggcctgctacgtggcacagtcacagggtatgtgacactgggcatgacaaactctatgatgcagagacatggtacttaggatttgagacttgagctatggcaactgggcaggctcttggccacagtgggaccctttgtcatcag

SEQ ID NO: 25282 - DNA, 946 bp, Homo sapiens
tgttggcatcctatgtcacgcttagacaacgatgctcgcctagaaactcaggttagaggctcggcccacaaggttagatgccctggggtatatctggaacaatggaatctctttgcaagatgtttgtcagtgtgtgatctgaactaatccaccttgtgccctctgctggggatgggaaagctctacttctcatcatttcccagctcattgctttgctgtacagcagccttggggcagccccgaatggctggtccagaggtttccaccttccagtggtggattctaatgttctttatgtgtttctctctgttcttctctgcctgctttggatcggctgttactaagctgctgccgagtggcaactctgcttatctcacggtgttgaggtgagactcactgcttttggtattactgattcaaggctacttagagattgtcttttcttgtacagttcagccagttctggctaaaatgtatacattaaaaactcatttaaaactgaagaaaaaagtgatgaaaaggtttttttttttttcttaaaaccaaacttccttaaagactactttaccaaaactttggtccacagctttccttggattgcttgtatgtctgggtcaattaagaaaagtttatgctctgggaaacatgtttctagaattgcgggtcttatctataaagtgctaacatctggcaaacagtgtaggatctcttgcttcctcggttttcagactcacagatgaatgagtgcccttagctgtcccytcccatcccttcccatcccttcccgctccggtttcctgtatgcaatgtgctcagccttccgagccctgggagaagcagggattctcatgcttctttatgttcccctagggactaggggttagcagtcctcaccccaatgtgtgaggtcctttgggctctatctgctggggagcctggagccagg

SEQ ID NO: 25283 - DNA, 946 bp, Homo sapiens
tgttggcatcctatgtcacgcttagacaacgatgctcgcctagaaactcaggttagaggctcggcccacaaggttagatgccctggggtatatctggaacaatggaatctctttgcaagatgtttgtcagtgtgtgatctgaactaatccaccttgtgccctctgctggggatgggaaagctctacttctcatcatttcccagctcattgctttgctgtacagcagccttggggcagccccgaatggctggtccagaggtttccaccttccagtggtggattctaatgttctttatgtgtttctctctgttcttctctgcctgctttggatcggctgttactaagctgctgccgagtggcaactctgcttatctcacggtgttgaggtgagactcactgcttttggtattactgattcaaggctacttagagattgtcttttcttgtacagttcagccagttctggctaaaatgtatacattaaaaactcatttaaaactgaagaaaaaagtgatgaaaaggtttttttttttttcttaaaaccaaacttccttaaagactactttaccaaaactttggtccacagctttccttggattgcttgtatgtctgggtcaattaagaaaagtttatgctctgggaaacatgtttctagaattgcgggtcttatctataaagtgctaacatctggcaaacagtgtaggatctcttgcttcctcggttttcagactcacagatgaatgagtgcccttagctgtccctycccatcccttcccatcccttcccgctccggtttcctgtatgcaatgtgctcagccttccgagccctgggagaagcagggattctcatgcttctttatgttcccctagggactaggggttagcagtcctcaccccaatgtgtgaggtcctttgggctctatctgctggggagcctggagccagg

SEQ ID NO: 25284 - DNA, 667 bp, Homo sapiens
tttttcaaaatattgaaattgccttctattcttaggtatccaggatttttaaaatgttataactgaacgttgattatcatttggttattattgcgtattctcttgctatggtgagtggtatcttttcctaagatttttattgttctcgcatttctgggataaattgtacttatcataatgtattagtattttcatacacttggatttgattagccaatattttatttatcttttgttcacaattatgatggcttctaatttcctttcttgtgctgtttctgttttatagtatcagttttgtrtttgaccataaaagaatttagtcagtaatagttttttagtgcttgagatagaaaggcatttcagagacctggacatgtttgtttgaccaagcagagctttcagaaagtctagctgtttggaaatttatgaattacttcatgtgtattacaggagggtcgttttctgttttcagagatcaagacatgaaacccatgttcaagatactttccagtgtgtcttcatgtgatcctctgagtccagccatcaggctaccagcagctcttggaaaccctgacatacttattcttagaagactgctttccggactcaaagtggaacctcaaattttcaattttcttagtttttaaagcctacacataggtga

SEQ ID NO: 25285 - DNA, 562 bp, Homo sapiens
ccccataaaagttattattgatggcagctgcatgcagcatcagtgtgacctctgcaaaagcctctaccgctatcaatactgttgacaattactattgactaatgcaaggcagggtgtggaggcagagtaaatgttcctgtggctggaggttgctgggggttatgcttcacattttacatttatctggtaaggatctctgagaactyggttgcacatttttggtggcctcaactgagagctgaggacgcctgcagactcaaatggaggcaggcaaaggactcagagaaaccagacttcaaatataagctctgccaacttgctgactcgcaggctattgtgtctcagtttggagcctcaggtttcccatttggcaaatgggaatgccactgagttgccagggagattaaaggcaattgcacatgtacagtggtaggcccatagcatgaggttgctgcctttgctctacccctgagaagtgaccacactgtgatgtgttcactgacaggtccagtggaactgagccctgttctgatggtgagatccgagttctcatcacaagaaa

SEQ ID NO: 25286 - DNA, 550 bp, Homo sapiens
tgtaaccaataaaattagccagtgtcttgtgaaaagcttgtgtgatggccaatagtgctgtttaccaaccttcagggcacatgctccccttcaaagttaggaatgcccatgtatattgttttggttaatgaaatttaaagtaagagatttctttcacttttggtgagtggtttgtttgtttgtctttttgagacagagtttcactgtggttgcccaggctggagtgccatggcacgatctcagctcactgcaacctctgcctccctggttcaagctattctcctgccttggcctcccgagcagcygggattacaggcatgtgccaccatgcccagctaattttgtgtttttagtagagatgaggtttctccatgttggtcaggctggtcttgaactatcgacttcaggtgatccacctgcctcggcctcccaaagtggtgggattacaggcgtgagccaccgtgtctggccggtgagtgttttttaaataaccagtgcacaacttgccccgtctctttctccctgtcatggtctctagcagcattcaggt

SEQ ID NO: 25287 - DNA, 916 bp, Homo sapiens
ataatatatatattctctccatatatataatatatatatcctctctatatacatatatattatacatagtattcacagagagaatatatatattatatattttatatatataataatgaggtgaagcatctatgtttactccacatggtattaaaactttcaagcagtttatcttctatctaggaatctcaacaggtaaggtgtcatattttgtgtctctgccattatagacatatgcacttagcatactgactaaaagcacagggctgcagtcagacagctctggattcacarccagaattctagcttcaccagctacacgcctatggtcttgaataggctaagtcagtttcctcatttgtagtatggatataacaggggagctttacttatagtgtatgatgtagatgtgtgaatatcatgagataaaactctcaagtaatgagcacaatgactggcttttacaaaaatacaaaaattagctgggcatgagggcgggtgtgtgtaattccagctactcgggaggctgaggtgggagaatggcttgaacccgggaggcagaggttgcagtgagccaagattgcgccattgcagtgagccaagattgtcgccagcctgggcgacagagcgagactccttctcaaataaataaataaagaaataaatcctcagcaccggttagctgtgattattgtggccattaataaactaacattttgaagaactctctggttttccaaaacactttcctatgcgttatttcattatgtcatgacagtgatatcgcaagactaaagatgagagaggcagaaaagtctacataaacctcactgtggctttgatcctcctaattacatatggataaaactttcttggatatgaaagctgcaagaaaccacttaaatggatagcagga

SEQ ID NO: 25288 - DNA, 893 bp, Homo sapiens
gtggaggtgggaaacttttcaggacatggagactagactgtggtagtcaaagcccagggacagtggcagggagaacatttttaaattagaagctgggaaattcaatttataccaactaattggatattggaatctggcccttatttgtagcctaggggaggtttcccyagttaccacacagaggagcaagatgatgaaaactacaacgtgaaaggcagttcatgtgaaaatgtgaaggagaggcagaggctaaagcaggagaaatactttcaacattattactagagataaggcaagaaatgatgagatactgagatagaaaatgatgatgtaggaaaaagtaaggatacggggccgggcacggtggctcacgcctggtaattccagcactttgggaggccgaggcgggctgatcacctgaggtcaggagttcaagaccagcctggccaacacggtgaaaccctgtctctacaaaaattagctgggcatgatggtgggttcctgtaatcccaactactctggaggttgagacaagagaatcgcttgaatacaggaggcggaggttgaattgagccgagatcgtgccattgcacttcagcctgggtgacagagcaagactcaatctcaaaaaaaaaagtaaggatatggaaaaagtgttgaggtgaggaagccgagaagagacttagtggctgattcccttgggaaatgggggtggcggggtgtgaagctgctgctgggtgtgttctgggcttctggggggatgatgctgggagcgcagagcagtttagaaagtgagaggtgaggtaagattttcttgtgatgaatctgaacagtcctacagacatttcaatgtgacggtaagtgaagaattggatgcaggaggctcattctta

SEQ ID NO: 25289 - DNA, 1737 bp, Homo sapiens
cacccaggcaccctgacagcaaaaacagcaggctctccaggccatgatggcagaggcactgggggcctgggcatggggaagcagtgaggagctctgggcctctggaggagagtacatcccagtcccctgcccaggcgatggatgggccaggtgggtacaagggcactggctccctcccagggccaatgtgcctctacagaccctctgggcaggaggcatgaaaacaaccagcgaccttcctgcgtcctcgggaaggctggtgtccaccgtgataacaatcgccatgcttaggaagtctgtgcaacatggtgaagtgccaagcatgtacgtcagggttcacatctaatgtcacctcttgcctccacctcctccggcccacgaggtcctaggcaagcacccagcctcaatgagcctcaccttcccaatcagtaaaatgtggaaactgacgcctgctcacagcgtggttgttggacttcaaggcattcatggagctggggagtgctgagcacggggtgaatggcagcaatctggtcttttccaccccttctagcaattcattcaaaccctgactcagcatctttacatagagagctctatgctgtgcgggggttggggtggggggtgctgcagagggatcctgcatatgtcccaccagggggatcccacttcatatcaaacaggaagaaagaaactcccaatgaaaaacctagcattctttgttgaaaagtattacaaattcaagatgaaagtaaaggtgttatagaaaaagataacagccccctgatttattttgaagaatgcttgacggcatagtcaaccggacacatcggagacagtgccagctctgtggrtttagcagctctggtgtgtctccaccacctcacctgcctgctgagctcccatcaggatgctggggttcgtcccaggaacgggctcgctggggaaggcagccgtgctctccagggctgggaagagggaactggaacaagtactggcggggatctgccggcttctaaactctaagggggcaaggtgcacacgtgaaaaccaactcgctcttctccaacaactacgaaatgagttcctggagtggaacgtgtcctacaggacagtgagctatggagacagccacacaagctgccaccacatcctggtctttgtttcagcgtgaagccagggcaggggtgcgactctctacttgtggctacgtgccaaggggcagctctggttgtcaagagtgggagcaatggtgagtatttagaagaaagggaaaaattacacaaataagtcaccctacagctacccgtagccatagacgagagtgttacttgaagataaagaaatgataccatcttccacccttatttcctcctctgggaaaggccatccccagcggccagtgaggtggggaacctctgaggtgcttggacccagcaggtgatcaaagacggtgaactggtcccacacggggcagaaccactgcagcctctgggcctgagaaatgactggcaagtagtaggggctcaggaggcatttactgaacaaaacaagaaaagcagagaggaaggaagagtcgggtgtgaggggggcgtgcccagagccacccagcctaaggcctcttccttctactcccaggacctgcccgggagcgtccggaagacaagatgggaacaaacacagacaagggagggacacctcacaccccagacttgccctccacccatggcaggccgctga

SEQ ID NO: 25290 - DNA, 1256 bp, Homo sapiens
ttccttgggtatatacccagtaatgggattgttaggttgaatgggtagttctgttttacgtttttttgagaaatttccaaattgctttccatagtagctgaactaatttacattcccaccagcagtgtttaaacacttcctttctccacaacctcaccagcatctgctattttttggcttcttaataatagctatcctcactggtgtgagatggtacctcactgtggtttttatttgcatttctctaatgattgatattgagcatttcttcatatgcttgttggctgtgtgtcttcttttgagaagcgtctgttcatgtcttttgcctgttgttgtttttttttgttttgttttgttttgtttgtatttttagtatagatggggtttcaccacgttggccaggctggtctcaaactcctgacctcaagtgatctgcccgcctcagcctcccaaagtgctgggattacaagcgtgasgcatcgtgcctggccctaactgatatttttaagtgaatgtatatataatacattactatacagatgggttagataagaatatgttttttaacataggctcctgtgatccctggaagtttttttttttctttttttcttcactgtatatattaggatctggaagtatttagaccattaaaatagcctgggttttgttgttgttttttgtttctgggctacggttagagacttctaagtgatactgcctttggcaatgtctaaccataaagaaaatacaacattctcctaatttctgtttcagttcagttggctggcacttgagggtttttctagattttgagttgtatttgctacctgctgcgtcagtttctcaaaagtcgggtagactcagattaatacaaacagttttatttttccaccttctgccaaatgtcaacatctgcacaaatgattggctaactcactagtcaaagtagtcctttgttcaccacatggtgttgtaaatcaaaaagtgactgaggcagatctcagctgattagaggtttattttgccaaggttgaggatgcgcctgggaaacaaaacacaagttacagttggatctgtgacccatgctttctacagagaaggtttggggaacttcagtatttaaaggggaaaaagcaagcaggaggggaaggtaaaaaaaggagggagggtaggcagtgaggcaagtggatacgttcttgtgaggctttgattagggctcagtgaatctgcattttacatgtgaaaataaagga

SEQ ID NO: 25291 - DNA, 1256 bp, Homo sapiens
ttccttgggtatatacccagtaatgggattgttaggttgaatgggtagttctgttttacgtttttttgagaaatttccaaattgctttccatagtagctgaactaatttacattcccaccagcagtgtttaaacacttcctttctccacaacctcaccagcatctgctattttttggcttcttaataatagctatcctcactggtgtgagatggtacctcactgtggtttttatttgcatttctctaatgattgatattgagcatttcttcatatgcttgttggctgtgtgtcttcttttgagaagcgtctgttcatgtcttttgcctgttgttgtttttttttgttttgttttgttttgtttgtatttttagtatagatggggtttcaccacgttggccaggctggtctcaaactcctgacctcaagtgatctgcccgcctcagcctcccaaagtgctgggattacaagcgtgacscatcgtgcctggccctaactgatatttttaagtgaatgtatatataatacattactatacagatgggttagataagaatatgttttttaacataggctcctgtgatccctggaagtttttttttttctttttttcttcactgtatatattaggatctggaagtatttagaccattaaaatagcctgggttttgttgttgttttttgtttctgggctacggttagagacttctaagtgatactgcctttggcaatgtctaaccataaagaaaatacaacattctcctaatttctgtttcagttcagttggctggcacttgagggtttttctagattttgagttgtatttgctacctgctgcgtcagtttctcaaaagtcgggtagactcagattaatacaaacagttttatttttccaccttctgccaaatgtcaacatctgcacaaatgattggctaactcactagtcaaagtagtcctttgttcaccacatggtgttgtaaatcaaaaagtgactgaggcagatctcagctgattagaggtttattttgccaaggttgaggatgcgcctgggaaacaaaacacaagttacagttggatctgtgacccatgctttctacagagaaggtttggggaacttcagtatttaaaggggaaaaagcaagcaggaggggaaggtaaaaaaaggagggagggtaggcagtgaggcaagtggatacgttcttgtgaggctttgattagggctcagtgaatctgcattttacatgtgaaaataaagga

SEQ ID NO: 25292 - DNA, 1107 bp, Homo sapiens
tactggctacttattatactgcatgacaattgctgggaaaaaaacaacactggaattgccatgtaaatggataagaaatcatatcactgcaaatataattatatagtttatctatgatacagtgcatagagctgtgtattataccttgggattgctaagtgagaagtgaaacacaccagtttttctatacgattttaatcataaatacacctaagtagataatcgaaaggacttacgtgttgcttttcaattttttttaaaaaagtaaggaaagtaggaaactttcagtgctactttgtatcactatctgtaatataacatatatgaaatgtagaaaagtattaataagataaataagcatatattcaggaattttgcttttagattttattcaaacaggtgatattacaatcaaatgttccaataaatttggtcaacttttataaaaattcaccacacacacaygtatacaggtacatatacacatgcagttctgtatttatacagaactaggaactgctactgctgaatttttgactcaaaatacagttttaaggtttttttaataccacttaagtattcaaattgtgtttatatatttatgcttactgttcattacagatagattggttggcttaaaaccctaagctatgatacaaattaaatatggcaacaagagtgacctcaaaccggttttgtattacatttaatgcaatctctctttaaccacttctataatactgtcaaaacagttcattccatttggagaattccagttatatttctgcaataaaattatctttcttgaaaattcccgaagtcatataagtaaaagactctttagcactggtatatcaataggctgatagcctccatatactgacccctacctagtttatttcttcacagcaggctatgacctgttaagctcaaaacccagccagttccaaactcaaattcacatccatttttgaaaaaatatatcccaaataagcagaattttagtcagtagcatccttctgtcttttcaagaaactacactcaacatctgctaccatagataataagtccaggcactataaagtccctcagctgctgctgcccttt

SEQ ID NO: 25293 - DNA, 1107 bp, Homo sapiens
tactggctacttattatactgcatgacaattgctgggaaaaaaacaacactggaattgccatgtaaatggataagaaatcatatcactgcaaatataattatatagtttatctatgatacagtgcatagagctgtgtattataccttgggattgctaagtgagaagtgaaacacaccagtttttctatacgattttaatcataaatacacctaagtagataatcgaaaggacttacgtgttgcttttcaattttttttaaaaaagtaaggaaagtaggaaactttcagtgctactttgtatcactatctgtaatataacatatatgaaatgtagaaaagtattaataagataaataagcatatattcaggaattttgcttttagattttattcaaacaggtgatattacaatcaaatgttccaataaatttggtcaacttttataaaaattcaccacacacacacgtatacaggtacatatacacatgcagttctgtatttatacagaactaggaactgctactgctgaatttttgactcaaaatacagttttaaggtttttttaataccacttaagtattcaaattgtgtttatatatttatgcttactgttcrttacagatagattggttggcttaaaaccctaagctatgatacaaattaaatatggcaacaagagtgacctcaaaccggttttgtattacatttaatgcaatctctctttaaccacttctataatactgtcaaaacagttcattccatttggagaattccagttatatttctgcaataaaattatctttcttgaaaattcccgaagtcatataagtaaaagactctttagcactggtatatcaataggctgatagcctccatatactgacccctacctagtttatttcttcacagcaggctatgacctgttaagctcaaaacccagccagttccaaactcaaattcacatccatttttgaaaaaatatatcccaaataagcagaattttagtcagtagcatccttctgtcttttcaagaaactacactcaacatctgctaccatagataataagtccaggcactataaagtccctcagctgctgctgcccttt

SEQ ID NO: 25294 - DNA, 1227 bp, Homo sapiens
cacatcctctcagtgatgctggtcctgcaactatgctctttcctacaccgttaatttgttccatctttttggttttgatgctttcccaccaacaaacaaacctgttccaatgttaatcttcttaatccacagtccttgtccccaaatttcccttcatctacaactctattgttatgattccttcaaggaaaacttcttaggaattactcgttaccctttctcttattgtgtttttaaaaaaatattcacaatgggctcttgccaaggtgaccatgacctttgcatggaaaaatccaatggtcagtgatctgtgctcttcttacttgacttctcaagcagcatttgaaagggtgcttcattttttatttttttaaagctgcattctctgattttccatacactgtactgacttcttgtcagggtctttcatttgttccccccttcagtttattcatcctctgatggttgaaatgccccatggctcagtcctagagttcaactctattctatcttcactccctcctagatgatcacataaagttccaaggcattaattgtaattaatttatatctcaaatttacgtctgtagccctgacatctctaaactctcatattcagctgtctacttgacatctctttttggacagttgacaggaaactcaaacttagcatgggtaattaggactctctgttcttttgtgaacttcttcctaccctgcttgttcccatttcagtaagtgggaccttccttctacttgataaagtaaaaactgaggagtaatacttgactcctccctttgcctcggccctcacaaccaaccattcacgagttgtctgggctcttcctccaaatacgtcccagtggaatctagttcttcccaactcctcggcaaacacttctcatctcaaggctgattaagagtttcctcaagacagccccgctatctctccagcctatttgcaatcccctttcctttcagttgctggagtgatatttttwaaaaatctcaaaaaaggcttcccactgcatttaggaaaaaaaaatccatatttcttaccctgatgtaaaagatgttaatggcccagagtgaactctgaccaacactttcccactcccacttctctcgctgtaatccaatcccactggccatctttctgaccccacagtgtgcccaactctgtcctagattagggctcatgcacttgttcctctttgcagccttact

SEQ ID NO: 25295 - DNA, 1094 bp, Homo sapiens
atgggatgtgtgcccttctaagaagagatgggagagaacatgcttcctccctctgctctctgccgtgggaggagacaaccaggggacaacatctgcaaaccaggaggcccccagcggaagccagccgtgctggcaccctggtctcagacacccagccgccaggactgtgaggatacacgcgccctgttgaagccacccagcccgtcgtgtttgctgtagcagcccaaacgaacacactgtccatcctcagcctggccgccacccacgagaggtgaatgagcgcccccagagccagccgtggcccagaagtgaggggatgttgagggaggtggggcaagctggcctccatctgactggagacaaaactaggattcagcttctcaagtcaacacagtcccttttaacatcccctctatgcaactctgcagggtagaaagctcagccagggaggcttgggcacaactgccatgcaccagtgggggtggagcacaggctggctgcagggagggcctgcctctgatgctgctgctcctgagtagtccaagtggcaagttgctctcccccactttccttcccccttgcccccctcccccagcttgattccttagaaccccttgatggactgtggtaaagtatagcggttatgactttgggctctgatgtcaagcagtttaggttcaagtcctacctctgacacttcctggtcatgactttggaaaagccccttcattgtaagctatggtctcctcaccctgcaaagtgggaggataataatggtacctgccccttggtaggtgttgcaaggattcagtgagatgcaacagtgcwggtacaaggtgagtcctgatggcgatgatggtggtgacggttttgttgaaagggatgatgatgatgatgatgatgatggaggtggtgatgatgttggggaattaggcgaaaaggatgatctagataaggtgatggtgctgatggtggtagaaaaggggaggatgacaaggatggggtgctgcaattcaggtctagtgaagaaagatagcaaggcacataggaagcttggtgatgcaggggtatgaagccaaagggtgcttctctgt

SEQ ID NO: 25296 - DNA, 1451 bp, Homo sapiens
gccaggaccccatctctctggggtctgcgtgcagaccacagggctctgcatccacaccacrtgtgccctggcagtgcccgtccctgtgtgcatgactggcacgtgtgaacacccgtgtgtgcacgtgagcctggcagcaacctggggcggtgcaaccctcaggatgagcaggttgtgctggacaggcagcgcattctcctgcaacaggcttttaaaataattgcctgtgaccctgagcagtagctctctgtccgctggctgcccctgccccaggcgcctgctgccaggggtcactgctctgtccatctgcagagacttgggcacctgtgctgtacttggggatggggcagggagggcgggtgaggtggccccgtgggtggcctgaggctgggggcggtgggtggtgggtggctgattgaagggataattgcaggcagcaggccttagctaatgcatgctatgataaagccccattactgagggaggccgctgaagcatgggggtggaggctgggggggaggccgcctatggggcgctgacagcctttctcatgggagggggagtgggcagccactgacacctctgcagtcccctaccttccagagctgcagccagatgagtggggagagccaggccccaggggtaggagggacccgccccacagacacgcacgaccacccccgggcaaaggtctgcaagcctccactcagttgtctaggggcccagcccccatggaggagcagcagtttcctggccattaatcttggggttcctgtactgtggagcctcccagcctcaatgttagggagtatcatcactgggttgtagaggtcagactgggccaggtgaggtggctcacgcctgcaatcccagcactttgggaggccgaggagggtggatcacctgaggtcaagagtttgagaccatcctggccaacatggtgaaaccccatctctactgaaagtacaaaaattagccgggcgtggtggcgggtgcctgtaatcccagctactcgggaggccaaggcagaagaatcgcatgaacccgggaggcagaggttgcagtgagcctagatcccaccactgcagccagcctgggcgacaagagtgagactctgtctcaaaaaaaaaaaaaaaaaaaagaagtcagactggcagtgaatggacagctgacagcagggaccccagctcattgggtgtcacagatgccagctacctgtggtgggggcacagattagactgctgagtccctgcaacatggccccaagtctcacccacttgtctatggggaacagacctcagcatccatttcccagaggcccagagcaggtacatgactttcctaagaacacacagccgggtctggatcagaccccacatacccctaatctctcagtgtggtcatttaccggctgtgtgactgtgaaagtcacttaatctctcagggcctca

SEQ ID NO: 25297 - DNA, 532 bp, Homo sapiens
gggcattggagtgggaattccctctgtttagggaacctgaggtgtgggcctctgacctgtggcccctgtctccctccccagattgaccaggatgggctcaccctgccagagaggaccctgtacctcgctcaggatgaggacagtgagaaggtgctggggcatgggatggggaggcagggaaggcctggggccccaggaggggtggatccaggctaggcctgtccctgtccctgggtgagccccctcccctggtgcagatcctggcagcatacagggtgttcatggagcgagtgctcagcctcctgggtgcagacgctgtggaacagaaggcccaagagatcctgcaagtggagcagcagctggccaacgtgagcagaccaggactggaggctgccctgggcttgagggagggcatcatggagcagggctgggtcagctgtgatctctccccacagatcactgtgtcagagyatgacgacctacggcgagatgtcagctccatgtacaacaaggtgacgctggggcagctgca

SEQ ID NO: 25298 - DNA, 557 bp, Homo sapiens
cagtggcatttcaggccctgtattgagctgtgtatcaaggtgagggcgtcttgacctaagaaatgagggaactcaggctggcacagtgggaaggggcgaaaagagaagatgagagaaaacaggtgctgtgcaatggtggactgtgttgagttgagagcaagtgggaagtgagaatgggaaaagcctggcggagtcttgagtgccacttgaggagtctgtaaataatgaacagtaattgatggttgtggtcaaaaatctttattattatcattgtaatcattattacatctcatatttattgagcatttactatgtactagggaccatgctaagtactataagtatactaattcttttattccttatgaggactcygtgatttgggtttcgttgccctcatattacagatgcaaaagccaggtacagaaaggctcgataactttccccttgtctcttagtcaacaagtggtcagaggtgagacttgaacctaaacagtctgactccagggcagctcttttaaccagtatactatacacagaatcccttgagagggttg

SEQ ID NO: 25299 - DNA, 557 bp, Homo sapiens
cagtggcatttcaggccctgtattgagctgtgtatcaaggtgagggcgtcttgacctaagaaatgagggaactcaggctggcacagtgggaaggggcgaaaagagaagatgagagaaaacaggtgctgtgcaatggtggactgtgttgagttgagagcaagtgggaagtgagaatgggaaaagcctggcggagtcttgagtgccacttgaggagtctgtaaataatgaacagtaattgatggttgtggtcaaaaatctttattattatcattgtaatcattattacatctcatatttattgagcatttactatgtactagggaccatgctaagtactataagtatactaattcttttattccttatgaggactctgtgawttgggtttcgttgccctcatattacagatgcaaaagccaggtacagaaaggctcgataactttccccttgtctcttagtcaacaagtggtcagaggtgagacttgaacctaaacagtctgactccagggcagctcttttaaccagtatactatacacagaatcccttgagagggttg

SEQ ID NO: 25300 - DNA, 557 bp, Homo sapiens
cagtggcatttcaggccctgtattgagctgtgtatcaaggtgagggcgtcttgacctaagaaatgagggaactcaggctggcacagtgggaaggggcgaaaagagaagatgagagaaaacaggtgctgtgcaatggtggactgtgttgagttgagagcaagtgggaagtgagaatgggaaaagcctggcggagtcttgagtgccacttgaggagtctgtaaataatgaacagtaattgatggttgtggtcaaaaatctttattattatcattgtaatcattattacatctcatatttattgagcatttactatgtactagggaccatgctaagtactataagtatactaattcttttattccttatgaggactctgtgatttgggtttcgttgccctcatattacagatgcaaaagccaggtacagaaaggctcgataactttccccttgtctcttagtcaacaagtggtcagaggtgagacttgaacctaaacagtctgactccagggcagctcttttaaccastatactatacacagaatcccttgagagggttg

SEQ ID NO: 25301 - DNA, 602 bp, Homo sapiens
ccaggagctgcctccagtgggatttaaagatgctggtgattccactttcctttatgggtcttgttctgaaagtcctgccagtccaggaaggcagcccgttgcagcagagaaccaaaccagcagaagaaagggatccatttgcgtggcaaaacttgccatttaattggatttcatagtagggttgggcttttctgctgcttaagatggccctggggggccatgggcgcgaccctccatatatgggccaccactctttatcctggggaggcgctgcagctcctgtagcccctgccgaagaggggacctcctctggaagccctggccagactctcagtcggcagcagatggaggagagccccttgcccttctggcttggctgttttcctcatcagcctgcctcatactcrcagcaagggtcactcctcaccaccccactttctgcttctccttctctgttggttttcctccctgcacactcagaaatgctgctgaaaatccacgcttcgctggtgctccccacagccgccttcattaccaacccaagcaggccagggctctccatttgccgcagctggaagataatatataagccatttgaagcc

SEQ ID NO: 25302 - DNA, 602 bp, Homo sapiens
ccaggagctgcctccagtgggatttaaagatgctggtgattccactttcctttatgggtcttgttctgaaagtcctgccagtccaggaaggcagcccgttgcagcagagaaccaaaccagcagaagaaagggatccatttgcgtggcaaaacttgccatttaattggatttcatagtagggttgggcttttctgctgcttaagatggccctggggggccatgggcgcgaccctccatatatgggccaccactctttatcctggggaggcgctgcagctcctgtagcccctgccgaagaggggacctcctctggaagccctggccagactctcagtcggcagcagatggaggagagccccttgcccttctggcttggctgttttcctcatcagcctgcctcatactcacagcaagggtcactcctcaccaccycactttctgcttctccttctctgttggttttcctccctgcacactcagaaatgctgctgaaaatccacgcttcgctggtgctccccacagccgccttcattaccaacccaagcaggccagggctctccatttgccgcagctggaagataatatataagccatttgaagcc

SEQ ID NO: 25303 - DNA, 602 bp, Homo sapiens
ccaggagctgcctccagtgggatttaaagatgctggtgattccactttcctttatgggtcttgttctgaaagtcctgccagtccaggaaggcagcccgttgcagcagagaaccaaaccagcagaagaaagggatccatttgcgtggcaaaacttgccatttaattggatttcatagtagggttgggcttttctgctgcttaagatggccctggggggccatgggcgcgaccctccatatatgggccaccactctttatcctggggaggcgctgcagctcctgtagcccctgccgaagaggggacctcctctggaagccctggccagactctcagtcggcagcagatggaggagagccccttgcccttctggcttggctgttttcctcatcagcctgcctcatactcacagcaagggtcactcctcaccaccccactttctgcttctccttctctgttggttttcctccctgcacactcagaaatgctgctgaaaatccacgcttcsctggtgctccccacagccgccttcattaccaacccaagcaggccagggctctccatttgccgcagctggaagataatatataagccatttgaagcc

SEQ ID NO: 25304 - DNA, 769 bp, Homo sapiens
tgcatgcagacactctttctcactaaaaggtccatggcaacaatgcaccagagaagcaggggatgtttgcctcttcctatctctagagccatccataactgaccagcagcgacaatgcagagccaaattttagcagtagaatttcttcaaattraacattcttgggagtatgaattctagactcccatcatactgcagcacattttttctcaatgtctttgtctctgaccataagcccaggagaggagaaaccaaccagccccaggcaaacgcactgggacaaaattccagtctacatgggtccctgtcaccacatttttctatttccagagggtgattttctccaattccagaacacatcaatacctccatatgtaagccaccaaacaccagctgccggtagcagagtttgaaaaatacctcctggattttaagtatccagagtggtttgcggcagcactatagcggcctgacaaccacacacacaagagtcaagatatatgtgagcttctggtgcagactattcctcacccaggcactggtgctgaacaggacttcatccatccattcagctgactagccatgatggagcgtcccagtgaatgacggataggactgggccactcgtctctgatctcctttgggtagtccaggtgggactgagcatcctcaggaggctggtgtctcctgagggaggatggagagttcagggtccagaatgttggctgtgggccctgttgtctaagtgacctttgttggactgtgcctt

SEQ ID NO: 25305 - DNA, 769 bp, Homo sapiens
tgcatgcagacactctttctcactaaaaggtccatggcaacaatgcaccagagaagcaggggatgtttgcctcttcctatctctagagccatccataactgaccagcagcgacaatgcagagccaaattttagcagtagaatttcttcaaattaaacattcttgrgagtatgaattctagactcccatcatactgcagcacattttttctcaatgtctttgtctctgaccataagcccaggagaggagaaaccaaccagccccaggcaaacgcactgggacaaaattccagtctacatgggtccctgtcaccacatttttctatttccagagggtgattttctccaattccagaacacatcaatacctccatatgtaagccaccaaacaccagctgccggtagcagagtttgaaaaatacctcctggattttaagtatccagagtggtttgcggcagcactatagcggcctgacaaccacacacacaagagtcaagatatatgtgagcttctggtgcagactattcctcacccaggcactggtgctgaacaggacttcatccatccattcagctgactagccatgatggagcgtcccagtgaatgacggataggactgggccactcgtctctgatctcctttgggtagtccaggtgggactgagcatcctcaggaggctggtgtctcctgagggaggatggagagttcagggtccagaatgttggctgtgggccctgttgtctaagtgacctttgttggactgtgcctt

SEQ ID NO: 25306 - DNA, 769 bp, Homo sapiens
tgcatgcagacactctttctcactaaaaggtccatggcaacaatgcaccagagaagcaggggatgtttgcctcttcctatctctagagccatccataactgaccagcagcgacaatgcagagccaaattttagcagtagaatttcttcaaattaaacattcttgggagtatgaattctagactcccatcatactgcagcacattttttctcaatgtctttgtctctgaccataagcccaggagaggagaaaccaaccagccccaggcaaaygcactgggacaaaattccagtctacatgggtccctgtcaccacatttttctatttccagagggtgattttctccaattccagaacacatcaatacctccatatgtaagccaccaaacaccagctgccggtagcagagtttgaaaaatacctcctggattttaagtatccagagtggtttgcggcagcactatagcggcctgacaaccacacacacaagagtcaagatatatgtgagcttctggtgcagactattcctcacccaggcactggtgctgaacaggacttcatccatccattcagctgactagccatgatggagcgtcccagtgaatgacggataggactgggccactcgtctctgatctcctttgggtagtccaggtgggactgagcatcctcaggaggctggtgtctcctgagggaggatggagagttcagggtccagaatgttggctgtgggccctgttgtctaagtgacctttgttggactgtgcctt

SEQ ID NO: 25307 - DNA, 769 bp, Homo sapiens
tgcatgcagacactctttctcactaaaaggtccatggcaacaatgcaccagagaagcaggggatgtttgcctcttcctatctctagagccatccataactgaccagcagcgacaatgcagagccaaattttagcagtagaatttcttcaaattaaacattcttgggagtatgaattctagactcccatcatactgcagcacattttttctcaatgtctttgtctctgaccataagcccaggagaggagaaaccaaccagccccaggcaaacgcactgggacaaaattccagtctacatgggtccctgtcaccrcatttttctatttccagagggtgattttctccaattccagaacacatcaatacctccatatgtaagccaccaaacaccagctgccggtagcagagtttgaaaaatacctcctggattttaagtatccagagtggtttgcggcagcactatagcggcctgacaaccacacacacaagagtcaagatatatgtgagcttctggtgcagactattcctcacccaggcactggtgctgaacaggacttcatccatccattcagctgactagccatgatggagcgtcccagtgaatgacggataggactgggccactcgtctctgatctcctttgggtagtccaggtgggactgagcatcctcaggaggctggtgtctcctgagggaggatggagagttcagggtccagaatgttggctgtgggccctgttgtctaagtgacctttgttggactgtgcctt

SEQ ID NO: 25308 - DNA, 769 bp, Homo sapiens
tgcatgcagacactctttctcactaaaaggtccatggcaacaatgcaccagagaagcaggggatgtttgcctcttcctatctctagagccatccataactgaccagcagcgacaatgcagagccaaattttagcagtagaatttcttcaaattaaacattcttgggagtatgaattctagactcccatcatactgcagcacattttttctcaatgtctttgtctctgaccataagcccaggagaggagaaaccaaccagccccaggcaaacgcactgggacaaaattccagtctacatgggtccctgtcaccacatttttctatttccagagggtgatttkctccaattccagaacacatcaatacctccatatgtaagccaccaaacaccagctgccggtagcagagtttgaaaaatacctcctggattttaagtatccagagtggtttgcggcagcactatagcggcctgacaaccacacacacaagagtcaagatatatgtgagcttctggtgcagactattcctcacccaggcactggtgctgaacaggacttcatccatccattcagctgactagccatgatggagcgtcccagtgaatgacggataggactgggccactcgtctctgatctcctttgggtagtccaggtgggactgagcatcctcaggaggctggtgtctcctgagggaggatggagagttcagggtccagaatgttggctgtgggccctgttgtctaagtgacctttgttggactgtgcctt

SEQ ID NO: 25309 - DNA, 769 bp, Homo sapiens
tgcatgcagacactctttctcactaaaaggtccatggcaacaatgcaccagagaagcaggggatgtttgcctcttcctatctctagagccatccataactgaccagcagcgacaatgcagagccaaattttagcagtagaatttcttcaaattaaacattcttgggagtatgaattctagactcccatcatactgcagcacattttttctcaatgtctttgtctctgaccataagcccaggagaggagaaaccaaccagccccaggcaaacgcactgggacaaaattccagtctacatgggtccctgtcaccacatttttctatttccagagggtgattttctccaattccagaacacatcaatacctccatatgtaagccaccaaacaccagctgccggtagcagagtttgaaaaatacctcctggattttaagtatccagagtggtttgcggcagcactatagcrgcctgacaaccacacacacaagagtcaagatatatgtgagcttctggtgcagactattcctcacccaggcactggtgctgaacaggacttcatccatccattcagctgactagccatgatggagcgtcccagtgaatgacggataggactgggccactcgtctctgatctcctttgggtagtccaggtgggactgagcatcctcaggaggctggtgtctcctgagggaggatggagagttcagggtccagaatgttggctgtgggccctgttgtctaagtgacctttgttggactgtgcctt

SEQ ID NO: 25310 - DNA, 546 bp, Homo sapiens
cactgcgtgttcttggcaaacttccttatcccccaagctgtgttaggagccgtacttgcatgcttccctagcttcaggtatttgcccatatgctcacacttattctactgccttgcacatttctattagcctaggggaataagataaaaagagttattaatggtgttgacctgagaagctctatcaaacactttctggtaggactgtgtcattttttattacctctgtgaaaaacttacaaatatagtcatccaatttgtacataatgtgaaaatagatggggttaccggaattctagatatggggaaaaatagaaagtgttcttgaaagattagaaaatgatttcatcaacaaagctgaaatgtaatatggcaaatgccaggtcatcctccaaagaacacaaatcttgtaacacaaatataggatggctaagcagaaatatagtggaaaaacacttaggacasataactaaccatgagataaatgtgagtcagcaatgaagtgccattacaggaagaaaatgcaggacaaattcatatttcccag

SEQ ID NO: 25311 - DNA, 664 bp, Homo sapiens
cagcccaacttagtcttgaagaagtcaggctgcagcatcagttaacgagcatagaaagggcccaggtaggaaccggaggcagaggccttctgtgatgctcttggcaatgactaagaccatggcctgacccttggagatggagaggagggagtctcatagtgcttgagattgggtttcttgtctttctgaaaggataaagatcaaaaaccaaattaatttgactttaaaaaataaagaagagaracatttctttcacatccaagtttgtggactaaagctttacataaagaaagtgcttaacacgtaattgttattacagtatgtaatacctaaaaagactctacaatccatccggtccgataaacttaagagaaaaataaagcctagaaagtcttaagctatttcatttcttaggggtagaagtgggtatccttccactacttatttaaagacaactaaacagggatatgctaatagcttcaattaaaattatggaagaagtagtccaggagacgtcttgaaacttgaaactttgtcaaattgaattaactattttaaatactcagaattttcattaacatacattatatgttacacttacaatatttgttgtgtttgaaattcagagagtaatttgttagattctttctcttttaaaactcta

SEQ ID NO: 25312 - DNA, 1322 bp, Homo sapiens
  misc_feature (1)...(1322): n = A,T,C or G
gtttggctacgacagaatttgtgtgtactttctgcctactgggactctgagttgtctmtgatggaaaagtagatgttggaaataaaagactgtacacccagtgttgtataggctgtacacatttctttattaacaccttactctctttctcctttatggaattcaaaccccagccctcttaccttctcccaacagctctatgacttctagacagcattgcacatatgttgagaagtattttcgatctccttagcagcttcaactgaactgctaagaaacagctggtttgggcatacatgcttttttacacctgaatttctagtcacgtgttagcccagggccaagacttgcagcagcaaacttagctcccaggcatgatcgttagcaggagtgagctgttgccttctatgagcccaacagtgagttgcttgccaaagtcatcactccaccttgatctcctggttagtcaagttcagtcaagatttccctcagaagctggagctcgttactgtttctccagtctcttccaaggttacctaccttctctggcagaggataaggaattcatcatctttcagactgcagtctgttgcttggaggcttggaggaaactggctgagaaaatcatagttagtagttgataacaggccaatgaaaattagcgagactaaggggactacgaaaagtagttgctaatgggacaaagttttactatgtcttccatgatgaaattcaacctcttcatggcctctttaggaaggggtcagtaaaaacttctactatttttaaaagttgccacaaacaaagtttgatttgctttgaatgtgacaccataacagaagtaggctttcaggaaagaggaaaatggccagttttgtatttttggtttggttctgtttctttgtatttttttcccactttagaacatacaggaatgttgtagaacattctctctttctttgagaaacatttagcacggtttctaaatataccctgcagagttaaattcctgtgtttggtttagactgagatctgttgacctaaggcaagacttcgacagattcagttttttcacctgtaaaatgggatggtacctacctcttagggctgagctagagattaattgagttaatctatataaacacttagaacattgcctggcacaaagcaagagctagatgctgtgtaactattagttactcttaacatctccctctcatttgagttcatttcctccaactgatatttcactgggcatccatttggtatggtcctgataagatgtctcgtctaattccttgtctcttctcccttaatngagt

SEQ ID NO: 25313 - DNA, 1322 bp, Homo sapiens
  misc_feature (1)...(1322): n = A,T,C or G
gtttggctacgacagaatttgtgtgtactttctgcctactgggactctgagttgtctatgatggaaaagtagatgttggaaataaaagactgtacacccagtgttgtataggctgtacacatttctttattaacaccttactctctttctcctttatggaattcaaaccccagccctcttaccttctcccaacagctctatgacttctagacagcattgcacatatgttgagaagtattttcgatctccttagcagcttcaactgaactgctaagaaacagctggtttgggcatacatgcttttttacacctgaatttctagtcacgtgttagcccagggccaagacttgcagcagcaaacttagctcccaggcatgatcgttagcaggagtgagctgttgccttctatgagcccaacagtgagttgcttgccaaagtcatcactccaccttgatctcctggttagtcaagttcagtcaagatttccctcagaagctggagctcgttactgtttctccagtctcttccaaggttacctaccttctctggcagaggataaggaattcatcatctttcagactgcagtctgttgcttggaggcttggaggaaactggctgagaaaatcatagttagtagttgataacaggccaatgaaaattagcgagactaaggggactacgaaaagtagttgctaatgggacaaagttttactatgtcttccatgatgaaattcaacctcttcatggcctctttaggaaggggtcagtaaaaacttctactatttttaaaagttgccacaaacaaagtttgatttgctttgaatgtgacaccataacagaagtaggctttcaggaaagaggaaaatggccagttttgtatttttggtttggttctgtttctttgtatttttttcccactttagaacatacaggaatgttgtagaacattctctctttctttgagaaacatttagcacggtttctaaatataccctgcagwgttaaattcctgtgtttggtttagactgagatctgttgacctaaggcaagacttcgacagattcagttttttcacctgtaaaatgggatggtacctacctcttagggctgagctagagattaattgagttaatctatataaacacttagaacattgcctggcacaaagcaagagctagatgctgtgtaactattagttactcttaacatctccctctcatttgagttcatttcctccaactgatatttcactgggcatccatttggtatggtcctgataagatgtctcgtctaattccttgtctcttctcccttaatngagt

SEQ ID NO: 25314 - DNA, 820 bp, Homo sapiens
tccacttctcaaagatttcacctctgtctctatagtccaggcaagaggataagctttggataacagaactcagagaatgagaaatggaaatgatattgggcactgtgactaagattgataaagggcccaagtgagatggcgtatgctttcattggatggtacattatgtgaagatactggtgttttctttatggtttttcatatataaagagatataggagataaacttcttcatcatggggtaggaggggagaatttgcaatctgatgtcaatggctcccttagtcacccgtgactcaccactcagcatcatctctcagaagcccacaccctggcttttctgtcctgtagctgggaccttctgcctgtctccatttcttcctatgtgtttttcatccctttcacactccttgccactcrtggatgcctcttctctttgtccctataggaacttccaatcctgctttagaacttactccttcaggaaagcaactctcactgaagtgtgggagcggagcagagaaaagactaggtaggaagagagccgagctcaattttatattccacaactaactggttctgactttctcaacaagtcgccaaagctagctgagtccaagttcctcatctgtaaaataaagatgttaccatctgtcccgccaaccccattttacttaatttcattgtgcgtgtctaaaatgaagttacaaatgtgcgaaaagtccctcgtaatttataaattccatacaaatttgagggaatatatataattattattcttattaagtcccctccccctcgccccgattatttccttctg

SEQ ID NO: 25315 - DNA, 1054 bp, Homo sapiens
tgataagaaattgtgattttcttcttttattttcattctccaattttaaaaacatctattgcacatctaccatgtaggaggaatgtgctcacactggagaacagaaaaaagttttcaatcttcattacctgcccatgaggggcttagtctagctgggaaggaaagaaagaaccaatcaaaaggagtttagtgccacaggagcacagcaaggagagaccaaactgcccaggattcaaggaggatcatccagagatctgtcagggggtttcctctrggtccccttcgtttgtctagaaggccacacaaataaagaaattagatttttaaatacaacacagatcgaccttaggtgtgcccaaaacactactgtatataaacaagaactggtacttactgagtcggagcctgggaggggatgtcttccacggaacgagccagggaagctttctaattcagacatgagttttgcaagctaaaaagggaggaaattaaactgatatcattggcttagaataactgtcgaaaatgagcaactaacttctggaaaatactcaagtacatctcatggttttatatttgatagtaagctgacacattcagagtttctgatttcccctatacacttaaccaggcctttaacagatttaaaaaaagtagttcagggaaagaaacacattttgaggcacacattgaagacttcacaggtaaacaaaaataactttttattcatgtaacagaaaaaaataacttttgcgtgatggaacagatttaagtaatgagtcgcttagagaggaaaaattaattctaacacaaagtcagatacctaccattgctttgttttgctttatatttaaagcccttttctccaaaaaattcattccactttcatcttctgaatcggagttggaatcagtcacagaattctctgagggctggcgggactctgcttttttgttggttgctcccctggtactccgcgctggaaacttcatcgccaccctgagaggtccagagtgcctgcactggctgcgggtcctacagccttcccgaactg

SEQ ID NO: 25316 - DNA, 606 bp, Homo sapiens
atttctcacagagagaggccactctgcctctgagagggctgttgtccttcccactgggagttttgaaaccacttagggacagcaaccattaataggcattttaaccaataaataaattttttaaatttagggttcaaaggaaaatgagataaattcagcctcacacagattacaattgtgaggctatgctaatcatgtatcttaaaggttttcaaatgaaattcaagcatttggctgtgtctcttctactccaaatatctgtttaaaattcagtattgaattggtgttgaaatgggtatgatatttcttaatatttcttactccacactcaggttttcagaaactgtaactctctttacttttctgcaactgaactgagtatctgtctcaatagaaactcaaatcttccttctgtcctctaaaggaaaatgtttttcaattcatagaaacatagtcagatcagagcttgcctaatggattcatggtaaatttggtcaaagttagagtctccccttcacccagaggaggcatgtcatctatgctccctcccgtcgggggaggcctcgggtcctcagcctccatctgtccaccgggcatcttcrgaat

SEQ ID NO: 25317 - DNA, 551 bp, Homo sapiens
ctggcagagcactgcaagacaccattcaaatatttaaccgagttccaattcgattcaagtccatcaacagctattaactccctccaatgtgccaggtgcggtgtggggatgatacaaagatgaaaacccacacttctgtcctcaaaaagctcctggtctgcagggtcttacgcacgtggtcccagctggggccccagccgagtggccagtgttgtggaagggacctaggaatcaggagtgggaagaacctggggtactcataaggtcacatgaggggagtggaattcagtggccacttgtcgggtccaaaagctcaaggcaatacgtgagctcgaagggcaggtgtgtgatggagccatgagtggggcagggaacaggggccagccggagcaaggtgaggccctaaagctgagtcccaggccccagatcttyccagctggcctccaggtgcacatgctgtgcttggaccagcctgggacaaactcctcgatccagccgggagaaggaggaggaggcggcagaaggaaggaaaagccacagatgactttctc

SEQ ID NO: 25318 - DNA, 947 bp, Homo sapiens
tttgaacgggtactggacrgtgccagctgtctctcgctttccggtcccagctgagtggctcatctgcccatccaggcactgcagatttatcgagggcctcccacgtgccaggcaccttctaggttctgatgaggaagcagtgagtgaagcaaagtccctgccctctgaagcttacattctgaggggggcagaccatatatagccactgaaccatatatatcaccatagcatctataacaaatatactaaatgagattagagaccgtaacacacagtcacaagtgctctagagacaagtcaagcagcgtgagcagaacagggagtgggtgggggtgttatcttacagcaggatgcagggaaggcctcgctgggaagtggacatctcaggagagcctgggaggaagtgagccccgtgactacgtgggaaaaggcttccaaggcagaggtcacaggggtgcaaaggccctggtggaggggcacgctggcggggtggaggcggagtgaggaaggggagagcgaggggaaaggatgggatttggggggcagaagggtgagatacctagggcctggctggccctggtggctcttgttcaaataagatggaatactggagggttttgagagaggagtgacatgttcctttcggctctgagaggaccactggctcggtgtggataccagtttatagtgggcagaagcagcggcagggagaccagagaggaggctcctacggcagtcccagtgacgacggcactggtctgaaccaactggggtggcgccggcatctctggcgctgagaagacagagccacctgggctcctccctccaccccaggttgtccctccttgtcccagagcacctcctctggagctaagttccaatcctcttggcagaatcatcactctatcctcaggcttctggggcctaactccagtgaagcccttctt

SEQ ID NO: 25319 - DNA, 336 bp, Homo sapiens
gtttcatgtattttgccactaagtcctcataaaaatacaaaataaaaatgaaaaaatctgggtagatgactggaaatctctgtgtagtctgtatggaaaacaatagtcaaattttgtaatgccactaacattagaaagctaatgatctggaatagtaaaggaagacaaatagatttttaaaagtgttggctgaggcagaaagtttttcaaggtcaaactataagaatgtcacacatgacacaataagcttagaaaakaatttcacatataaagcagagatacacagaaggaaaggagattcctctttctgtacatggtttgattgtctcctgcaga

SEQ ID NO: 25320 - DNA, 1425 bp, Homo sapiens
ttcgaatttcattattgaggcagaaaagtagtacaggtgtggcagacaattttctttattcttgttacttatagaataacatttcattttctgttttgtctttaaaaatatttcctttgctccttcgtagaagatatatatttattttccaagttatattttaagtttttagcaatatcttttcattatataaatggcaagaaatttattctcttattctaacctgatccttaatttcataaaatctagaattttaggtacagattagtaatacaatttttgtggtctgtatacatgtatttcagtatttttatatcataattacaggatattgatatgtgtgtacatgtaaatacattatatttaggcttctattttaaatagggctttttgtttgttcattttagtcactgtcaattcatttaaaatgtaaggccttctgcagtcagtattttagatggttaaatatatgaaatattttataggctcttccacctctgagaatttagtttttgctttttgtttaaaggactgtttcatagcatcatgtcattcttttgcctttatttaactgcagtattcctctaagtgttcttttaaactaatttttcatcttaagaatattgtatttcagtacatataggttaaattttctcctaactattgtatgatatttacaaatataggttgacctaactttaattagcaagttccttactgacgtgcatttaaattttttccatttaattatagtaattgttggaaacaattcaatttcattttgcacattctttgatgtggtcctaaaggactaatttatttattttattttgatattactgccaaattgcctttcaatttggccataasattatactctatcagcagtaaatgactgcttgttttctaattctttgaatgaatactgtaatcagaatgttaaaatgttgcccatctaattgttggcaacatgatttgtttttataaattgttatttatataatattactgatgagaacatcatttctcacattaattagtcatttgggttttttttttcttgtagttggcctttggcttttattcttattttgatctagataaacacatcaatattattcttcataaatttttcacttttgtctgtttggaaagctttcttaaccttaggctacaaatatattattgttcctttctacttgtagtatgtttggtcttagttagtttttatttacaagatatttggaatttgtctttagcatttatttcattttgggagatatatacattttcacaaaagtttttatttataaggtatttggaatttgtctctagcatttatttccttttgggtgatatacacattttcacagagaataacttatgtcataagggtttaaggttactggataaacaactatatat

SEQ ID NO: 25321 - DNA, 1425 bp, Homo sapiens
ttcgaatttcattattgaggcagaaaagtagtacaggtgtggcagacaattttctttattcttgttacttatagaataacatttcattttctgttttgtctttaaaaatatttcctttgctccttcgtagaagatatatatttattttccaagttatattttaagtttttagcaatatcttttcattatataaatggcaagaaatttattctcttattctaacctgatccttaatttcataaaatctagaattttaggtacagattagtaatacaatttttgtggtctgtatacatgtatttcagtatttttatatcataattacaggatattgatatgtgtgtacatgtaaatacattatatttaggcttctattttaaatagggctttttgtttgttcattttagtcactgtcaattcatttaaaatgtaaggccttctgcagtcagtattttagatggttaaatatatgaaatattttataggctcttccacctctgagaatttagtttttgctttttgtttaaaggactgtttcatagcatcatgtcattcttttgcctttatttaactgcagtattcctctaagtgttcttttaaactaatttttcatcttaagaatattgtatttcagtacatataggttaaattttctcctaactattgtatgatatttacaaatataggttgacctaactttaattagcaagttccttactgacgtgcatttaaattttttccatttaattatagtaattgttggaaacaattcaatttcattttgcacattctttgatgtggtcctaaaggactaatttatttattttattttgatattactgccaaattgcctttcaatttggccataacattatactctatcagcagtaaatgactgcttgttttctaattctttgaatgwatactgtaatcagaatgttaaaatgttgcccatctaattgttggcaacatgatttgtttttataaattgttatttatataatattactgatgagaacatcatttctcacattaattagtcatttgggttttttttttcttgtagttggcctttggcttttattcttattttgatctagataaacacatcaatattattcttcataaatttttcacttttgtctgtttggaaagctttcttaaccttaggctacaaatatattattgttcctttctacttgtagtatgtttggtcttagttagtttttatttacaagatatttggaatttgtctttagcatttatttcattttgggagatatatacattttcacaaaagtttttatttataaggtatttggaatttgtctctagcatttatttccttttgggtgatatacacattttcacagagaataacttatgtcataagggtttaaggttactggataaacaactatatat

SEQ ID NO: 25322 - DNA, 609 bp, Homo sapiens
aggtcatcagttactttgtggtcctcttcatagggcacatcacgacacggccactggcttccctcagagccarcaagggcgtgaaagagaatagccaggaccgacgctacagtctcttcattacttaaccttaaaagtgaaatcattgaactttttgtatattttattagttagaagtgagtgattgggtacagtccatactggagagaggcaattacacagggtgtgagagtcaggaatcacattccaccacattcactgtatgaatatatgacagtttgcttatctattctaaggaagatgcacagttaggttgtttgagattttacctattacaaaaggaactcctaagaacattgttttacttgtgtttttagaaatatgtatgtatttctttcaaggttatacctaaaagtagaatggctggtttacagagaaatcatatgtttagcttctttagatacttctaaacagttacaaatgtggttgcaaaaatttaaattccaaccagcaatctataaagagttaataattttattaaactctaatgtctcaacaagttaagtccaggtgcatatatgcatatatgtgtgtgtgtgtttgtgtgca

SEQ ID NO: 25323 - DNA, 932 bp, Homo sapiens
gaaaaataaaacagtatttagtagagtgaacctgatgatttttaagtactgttgcaataatatcctaaattatggataatatagttctataatactgctgaatttaaaaatatataacaaagagtgaaagaatgtaaatcctattcagtgtaatagtctctggggattttatatggaaaacgcaatccagacaacaataaaatgttgtactcttccatgcctaatagatgtgttgaattcactatggcttccccaatttcatgaggacatgtggaacatattgagtagctaaggcatacatttagggaacattaaaggcctaagagcaaggggtttctagtgttggaggcaaatttagccaaacccatcagatttaactcatgtgaaaggaaggccagaatggcagttacaatatttgttctgacaatataattagttacattatttttactagttttgatatgggtgttccctaattaaccttgtttcaactgaagacattgtaatgtttttcctttccacaaaacaaaatcaaaagcattttaaatacacacaaaaggactaaaactccacaaaggtgcatgggaatttaataatagcaggattcctgaaaatatttacaccccaacactgtttctataatggttcttccagacaaatagaaaatccagaattttacacagcgtatttgctccatattaaataacatgtatctgtatttttggaatattatttctcaggcagttatgggatttgttaaataaatctacatttgaaatcactaagtcttattcataattctataattttaaggaaatataattgaagattaagatatttaaaccctttagaagagtgacttcatatgccccggttttagggaaatggccttccttcaatatagtayggctctgaaatgctgtttcacccct

SEQ ID NO: 25324 - DNA, 542 bp, Homo sapiens
ttgttacaattctttgctaaactttttcatctagaaaaacagtartagtgataatttattttgtatactatcaaagaaaggtagttagtggggatatttagtagtttcaagtctaactattttttgcatcagaaaactgattaataccttttattggagatattactctgctaacttacattgtttaagtcattgtatacatacaggaagcaaaaaatgacttttccatgctaacgtttctgcagtttgttacagatgaaaaatagtttcattttgtgtgcacagaataaagaaggttagaaggttacaaatcatgtttgtataaggtattacggcatctctccagtcaattggaaaattaaatttatggatgcactgaccaaatcaaaacaatgtgctttatttttttctccagaaaatcttcagcccaaatagcaatttggcttcctattcctctacttagaaaatgcgttttgatttactacaagtgtctaatttaatcaaagatatgaacatgtaaatggtatctggtttctgtttta

SEQ ID NO: 25325 - DNA, 778 bp, Homo sapiens
gtggcattattcattagtttaaacctacagaatgcaccgcaccaagagtgaaccctaatgtatgctatggctctgggtgataaggaggygtccatgtgtccatgtaggttcactggtaaatgtcccactctggtgcaggctgttgctggtgggcgaggctgtgcatgtgtgggggcaggaggcatgtggggactttgtactctctgttcaattgtgctgtgaacctaaaactgctctttaaaaaaaatctacttaaaaataaaaaaggaaccacagggaggaagctcatgaagtagaagatgcctgctgccccaagatacctggtatccccagaccatgccccacctttggtgatagcccccacagtccccagggtacctgggctccaagtgaggcttagcaaacgtttcactgatggtgggaggggtttccagtccagtaaatgggaaaaactgagtcaaggggctgggggcaccctctgagggaaaggacacctccagagtcctctggagcaatgaggggtcagaatcctcaattggcctggaagtcctggcaccaactggcctttgttccttgacagcatctctctcctcctctgtacgatttccagcttttctttttcttcctctagttaccctgtgttgtcctggacaggtgaatggggagaattaactgcatggtggctcagggcctactggcacagtatgggatgacacacagctgagcaaatccacagagcggctcagcccagccttccctcctctcccccactcctgga

SEQ ID NO: 25326 - DNA, 778 bp, Homo sapiens
gtggcattattcattagtttaaacctacagaatgcaccgcaccaagagtgaaccctaatgtatgctatggctctgggtgataaggaggcgtccatgtgtccatgtaggttcactggtaaatgtcccactctggtgcaggctgttgctggtgggcgaggctgtgcatgtgtgggggcaggaggcatgtggggactttgtactctctgttcaattgtgctgtgaacctaaaactgctctttaaaaaaaatctacttaaaaataaaaaaggaaccacagggaggaagctcatgaagtagaagatgcctgctgccccaagatacctggtatccccagaccatgccccacctttggtgatagcccccacagtccccarggtacctgggctccaagtgaggcttagcaaacgtttcactgatggtgggaggggtttccagtccagtaaatgggaaaaactgagtcaaggggctgggggcaccctctgagggaaaggacacctccagagtcctctggagcaatgaggggtcagaatcctcaattggcctggaagtcctggcaccaactggcctttgttccttgacagcatctctctcctcctctgtacgatttccagcttttctttttcttcctctagttaccctgtgttgtcctggacaggtgaatggggagaattaactgcatggtggctcagggcctactggcacagtatgggatgacacacagctgagcaaatccacagagcggctcagcccagccttccctcctctcccccactcctgga

SEQ ID NO: 25327 - DNA, 523 bp, Homo sapiens
atctcagctcactgcagcttccgcctccgggttcaagctattctcctgcttcagcgtcccgagtagctgggattacaggtgcccaccaccactcccagctaatttttcttgtatttttagtagagacggggtttcaccatgttagacaggctagtctcgaactcctgactctggtgatccgcctgcctggcctcccaaagtgctgggattacaggcatgagccaccacgtccggcctcctatagagcttcaracaatttatactccaccagcaatgagtgagagtatacttaggcacttaagttttccttgtttatctagaaaatacctcattgcttttggaaaccctccccaaaggattcctatttgaaaaccccagccccagggaaccagcctcaaggcaggagtgacatcctgtgggctgtttcctgccttatcctcatttggctcaagccacagacagataaactcaagtttggaagagttcctttgctttcttggcctacactgtgtaatatttggca

SEQ ID NO: 25328 - DNA, 523 bp, Homo sapiens
atctcagctcactgcagcttccgcctccgggttcaagctattctcctgcttcagcgtcccgagtagctgggattacaggtgcccaccaccactcccagctaatttttcttgtatttttagtagagacggggtttcaccatgttagacaggctagtctcgaactcctgactctggtgatccgcctgcctggcctcccaaagtgctgggattacaggcatgagccaccacgtccggcctcctatagagcttcaaacaatttatactccaccagcaatgagtgagmgtatacttaggcacttaagttttccttgtttatctagaaaatacctcattgcttttggaaaccctccccaaaggattcctatttgaaaaccccagccccagggaaccagcctcaaggcaggagtgacatcctgtgggctgtttcctgccttatcctcatttggctcaagccacagacagataaactcaagtttggaagagttcctttgctttcttggcctacactgtgtaatatttggca

SEQ ID NO: 25329 - DNA, 553 bp, Homo sapiens
gtcagcctggtaccttctgctgggccatagctagcagcgtaagccttggagccctggcacttgaaaccccacactgtccaagcacaacttacccagccttgcctcttcacagccacctgttgtgtccaccctgtgcttagcctagactttccacacaaccttttcttgctgctctctcagtcctgtccattcccatcaaaaatcgaattgttcttcagacctgtacartctccacttctgattcctggcattgtgacccatgagattcttcctctgcagtgaattcatagcaataactgaccggccactgtagcatttcttgatgtattatatcatgtgccttgtatttagctttcatccagttgggggagggcggggatgttgtagtgtacctctttgtaccaagattgatttgctgcatatcttgcaggtgaaagcatgtattgccaatgtagaacccaaccaaacagtggagatcaatgagcaagaagcattggaagagaaattggaaaatgtgaaagccattctgcaggcatatcattttacaggtttt

SEQ ID NO: 25330 - DNA, 849 bp, Homo sapiens
agcacataacatgtttgactttacaatttcactgttggagagcaatgtttcacagaataaaacttaccttgaatttcacccacaaacaatttagatgatattcagatgagactttgtactttacagttttgtgttggcgctggaagaagtgaagacttttggggctttggtgatgtcatgaatgtattttgtaggtaagaaagacaaaaattcaggggcatcaggggaaaatgctatgatttgaatgtttgtattctccgcaaaattcatatgttcaaatcctaaccctcaagtttatagtagtaggaggtatgggggtaaaactgtcatgaatgagactagtgcccttataaaagagatccaagagagattccccatcacttctggtatgtgagtttacagtgaaaaggtggccacctatgagaaagtgggccctcattagacaccaaatctgctgatgccttcatcttggacaktacccccctctccaaaattgtaagaaacaaatttctgtcatatatgagctacccaccagcctaaaaagactaagagagttaacatttgttttttcatgggatacctgggtttgtaccttattctctaaatacacttgttagtaattttctgttgccataacattattccatagactagataatttatatataaaatactttcatttaactcacagttctggagcctgggacatctacaagcatggcaccggcatctggtaggtgccttcttgctgaattgtaaaatggtggagggcatcacatcaccagagggcaagagtgtgccagctcaggtctctccttttcttccaataaagtcactaacccatcatga

SEQ ID NO: 25331 - DNA, 849 bp, Homo sapiens
agcacataacatgtttgactttacaatttcactgttggagagcaatgtttcacagaataaaacttaccttgaatttcacccacaaacaatttagatgatattcagatgagactttgtactttacagttttgtgttggcgctggaagaagtgaagacttttggggctttggtgatgtcatgaatgtattttgtaggtaagaaagacaaaaattcaggggcatcaggggaaaatgctatgatttgaatgtttgtattctccgcaaaattcatatgttcaaatcctaaccctcaagtttatagtagtaggaggtatgggggtaaaactgtcatgaatgagactagtgcccttataaaagagatccaagagagattccccatcacttctggtatgtgagtttacagtgaaaaggtggccacctatgagaaagtgggccctcattagacaccaaatctgctgatgccttcatcttggacatyacccccctctccaaaattgtaagaaacaaatttctgtcatatatgagctacccaccagcctaaaaagactaagagagttaacatttgttttttcatgggatacctgggtttgtaccttattctctaaatacacttgttagtaattttctgttgccataacattattccatagactagataatttatatataaaatactttcatttaactcacagttctggagcctgggacatctacaagcatggcaccggcatctggtaggtgccttcttgctgaattgtaaaatggtggagggcatcacatcaccagagggcaagagtgtgccagctcaggtctctccttttcttccaataaagtcactaacccatcatga

SEQ ID NO: 25332 - DNA, 849 bp, Homo sapiens
agcacataacatgtttgactttacaatttcactgttggagagcaatgtttcacagaataaaacttaccttgaatttcacccacaaacaatttagatgatattcagatgagactttgtactttacagttttgtgttggcgctggaagaagtgaagacttttggggctttggtgatgtcatgaatgtattttgtaggtaagaaagacaaaaattcaggggcatcaggggaaaatgctatgatttgaatgtttgtattctccgcaaaattcatatgttcaaatcctaaccctcaagtttatagtagtaggaggtatgggggtaaaactgtcatgaatgagactagtgcccttataaaagagatccaagagagattccccatcacttctggtatgtgagtttacagtgaaaaggtggccacctatgagaaagtgggccctcattagacaccaaatctgctgatgccttcatcttggacattacccccctctccaaaattgtaagaaacaaatttctgtcatatatgagctacccaccagcctaaaaagactaagagagttaacatttgttttttcatgggatacctgggtttgtaccttattctctaaatacacttgttagtaattttctgttgccataacattattccatagactagataatttatatataaaatactttcatttaactcacagttctggagcctgggacatctacragcatggcaccggcatctggtaggtgccttcttgctgaattgtaaaatggtggagggcatcacatcaccagagggcaagagtgtgccagctcaggtctctccttttcttccaataaagtcactaacccatcatga

SEQ ID NO: 25333 - DNA, 849 bp, Homo sapiens
agcacataacatgtttgactttacaatttcactgttggagagcaatgtttcacagaataaaacttaccttgaatttcacccacaaacaatttagatgatattcagatgagactttgtactttacagttttgtgttggcgctggaagaagtgaagacttttggggctttggtgatgtcatgaatgtattttgtaggtaagaaagacaaaaattcaggggcatcaggggaaaatgctatgatttgaatgtttgtattctccgcaaaattcatatgttcaaatcctaaccctcaagtttatagtagtaggaggtatgggggtaaaactgtcatgaatgagactagtgcccttataaaagagatccaagagagattccccatcacttctggtatgtgagtttacagtgaaaaggtggccacctatgagaaagtgggccctcattagacaccaaatctgctgatgccttcatcttggacattacccccctctccaaaattgtaagaaacaaatttctgtcatatatgagctacccaccagcctaaaaagactaagagagttaacatttgttttttcatgggatacctgggtttgtaccttattctctaaatacacttgttagtaattttctgttgccataacattattccatagactagataatttatatataaaatactttcatttaactcacagttctggagcctgggacatctacaagcatggcaccggcatctggtaggtgccttcttgctgaattgtaaaatggtggagggcatcacatcaccagagggcaagagtgtgccagctcaggtctctccttwtcttccaataaagtcactaacccatcatga

SEQ ID NO: 25334 - DNA, 2232 bp, Homo sapiens
tggcctggactgaggacaaagccaggggccacggggtaccccaagctgcccattttcctgggaagggcacagtggccctgaccggagctgtcattttcggctggggttggtcagtcctgccctccttgccgtggctgctgtcagcacatgtcattcatgtcgtaaccattcgtggggctccttcctgcggcagcgtggcggggctgaggccatgcacaccaatccgagctgggctcgggcgccctgctgaggacaccaagcagccacgttgcctgtgctccagcagctccgaggtctcttcctggaagtctgttgggtgtcatcctgcagctcagagccagggaaatggcagtggggagggggcttcctggggtgacagcaaagctctgtgtccacaggcaggcaggacgcatgctgcagccctgtggggtgggcacggtggaagccttcctctgtgtggcagaaaatgtgtctcagatctctgggaactgggacaggaaagttcccagaggggcatgtatggggaggctacagaaagtgtccccccatttcatgtttgtgatagcagctcaggacagacaaacaccaagagggtggccttgggcagcagccagtgaggagaggcaagatggggttaagcttcgcacattgagggctgggcacagtggctcacacctgtaatcccagccctttggggggttgaggcggcggatcacttgaggccaggatttcgagaccagcctggccaacatggtgaaaccctgtttttactaaaagtacaaaaattagccaggcgtggtggtgggtgcctgtaatcccagctactcgggaggctgacaggagaatcgcttgaacccggaaggcggagcttgcaatgagccaagatcgcgtcactgcactccagcctggrcgacagagtgagactttgtctttaaaaaaaaaaaaaaaaaaaaaaaaagtttggcgcagccagccttgggggttgctttcagataggagaggtggtgggagccctctcccccggggcagcctctgtctgaggacagtcacaggtgggtgggacagcgggtgaaggggttagtgacagggctcatactggccctgccacaaatccgcagcgtaacttccaacagggtgtttctggccttcattttccccatctggaaaataagggtgtgggggaggggagcctcgggatcccataaacgctcaccatctggaggcctggggcccgttctaggtggacgagtcccagcctgcactcaaccacagaggcaggggcaagatgcctgactccagctggggaggaggggtggtggagccagtcccacgagggctcacgggccaccctgcagcctgggttgtggggaggaggagaggatgcccagacactgaacatcttcacatctgcaggtgaccggttaaggcaattcgccccagctcaggtcaggagatgccctgaaggtggtctgataccagtcagccagcctgccctgctggtcccttgttagagagtctcttctgaagtggcctttcctgccttggatagactgacataaaggctggacagtgagctcatttcttcatcttccttgattccccctccctgtgctcgaaatgtctccccagttccccacatttgcgtgggtcaggacacgctcgctgcaaagaacaagccggctgagcacaaaagggagttttattgggaggaccctgggggggggtctcctagagcccaaggtcatgggtgcagccaggctcaggaagggcctggccatctctgagagctggacaggggcagggccctccttcctcctggctctgtgcgtgtccaggtctcggtattctgctctcttgctgctgcttgacccctgtggtcagccagtgtgagatctgctccaggcctcatctgtcggtccccaaccccctttccgagcctgtctgctcagcattgtgaagtctctcacccgaggccctgtccacaggcagaacgtggacattcagcccagctccacctgcccgggttctctctgcgctgccacctgtgcacaccatggaggccgtacgaaccctgggcagctctgtcccgctgctaagtgtcgggccactaagaaaccctgaattcttggttggtctgctgttgctaagccacatccccccctaccctggcatgtgtcgcttcttgttagacccaagcacaggtccttgtgttcaatcccagttcatccttgt

SEQ ID NO: 25335 - DNA, 794 bp, Homo sapiens
  misc_feature (1)...(794): n = A,T,C or G
cttccttacaccttatacaaaaattacctcaagatggattaaagacttaaacgtaagaactaaaaccataaaaaccctagaagaaaacctaggcaataccattcaggacataggcatgggcaaagacttcatgactaaaacaccaaaagcaatggcaacaaaagccaaaattgacaaatgggatctaattaaactaaagagcttctgcacagcaaaggaaactatcatcagagtgagcaggcaacctacagaatgggaaaaaatttttgcaatctatccatctgacaaagggctaatattcagaatttacaaggaacttcaacaaatttacaaggtagaaaaacaaacaaatccatcaaaaagtgggcaaagcatatgaacagacacttttcaaaaacagacatttatgaggccaacaaacatatgaaaaaaacctcatcatcactgggccattagagaaatgtaaatcaaatccacaaagaantactggctcatgctagntagaatggcaatcattaaaaagtcaggaaacaacaaatgctggagaccatggcacatgtatacctatgcaacaaacatgcacattctgcatatgtatcccagaacataaagaataatawtaataataaaaacatggcaaatcaaaatgtaaacaagacctgaagtgatgttgaaatgaaatcatggaagaagagcctcagaggcaggagaaaagaggcttttccattgggtttataagtgaacaactaaaatactgtgaacagtaaggntgtactgagttttaagaggacttt

SEQ ID NO: 25336 - DNA, 785 bp, Homo sapiens
tcaaaattacttgcatgataatactaagacattagtattatgtgcaatggggttttccagagcctgaatgaggttaggtatttcgaaagactcagtgcagaagcagataagaaaacccagttgccttctattaagctgggcattacagaggtttgtaaaaatgtgaaacagttccactcctctcacaattttactttcttctggacatggagctgagctgaacaaaggcttctcctacaggcctgcagccttccccaagctacacatggaagttgggcatctagtcccaaagttcttgggtatcttacactattttgatattcctgtcatgttccccaccctgaccccacagagctccacgtgagagaaacactaggatgagatcttccattttttctgaccctccctgaccacagagaccttgcacacrccacctcctcagctccctccactcccgacttgtggccacagcagaggtcctgccagccagacccatatctcatggtgggagccacaggagagcctgcagctcagaatcatagaggggaatggattttgtttcactgcccccaaaatactgtccctgtgcactttgttttatcaagtgtttcccaaattaataaaacctcctttcttaaaaataacctgttaatatcttggggttcaacgtttacacagaatgctgtaggaagcattgccattaggaattatacttgttctttagtgactacagactttagatatttctggaagttcctcatgggacctaaagctggtttttgttt

SEQ ID NO: 25337 - DNA, 565 bp, Homo sapiens
gattcagccatctcagggcctttttctagggagtggggcyctcccccggaggtgggggcttcaaatcccccagcttctaagcccaggaggcagccccagaacccatgttaggccttctcttccctccactccctcaaaggccatggccccaggctaacctgcggggaatgactgaggaatcgtgtcttgtctgaactgctcttgagacctccaaaataaccaaacctatggtggcaaaacaattgcagtcctaaaacaacccgatgaggtccccacagaagtctttgttaagaactttccctgggcctgactctgtgctggctgtgttttccaagaagaatgggcaaacgggccctcccactgagaagtactgaccacatgaaaaataccacaatgcatggaacagaggtgcagctattaggggtacggtgacagccaagacgactgtggcctccagactgcacactgcacctaacacacagtaggcgctctctctgtacttgtggagtaaatgataacttaatcttgcaatgcgaaaataaaagcagcatttagaatgtcagtg

SEQ ID NO: 25338 - DNA, 565 bp, Homo sapiens
gattcagccatctcagggcctttttctagggagtggggctctcccccggaggtgggggcttcaaatcccccagcttctaagcccaggaggcagccccagaacccatgttaggccttctcttccctccactccctcaaaggccatggccccaggctaacctgcggggaatgactgaggaatcgtgtcttgtctgaactgctcttgagacctccaaaataaccaaacctatggtggcaaaacaattgcagtcctaaaacaacccgatgaggtccccacagaagtctttgttaagaactttccctggscctgactctgtgctggctgtgttttccaagaagaatgggcaaacgggccctcccactgagaagtactgaccacatgaaaaataccacaatgcatggaacagaggtgcagctattaggggtacggtgacagccaagacgactgtggcctccagactgcacactgcacctaacacacagtaggcgctctctctgtacttgtggagtaaatgataacttaatcttgcaatgcgaaaataaaagcagcatttagaatgtcagtg

SEQ ID NO: 25339 - DNA, 565 bp, Homo sapiens
gattcagccatctcagggcctttttctagggagtggggctctcccccggaggtgggggcttcaaatcccccagcttctaagcccaggaggcagccccagaacccatgttaggccttctcttccctccactccctcaaaggccatggccccaggctaacctgcggggaatgactgaggaatcgtgtcttgtctgaactgctcttgagacctccaaaataaccaaacctatggtggcaaaacaattgcagtcctaaaacaacccgatgaggtccccacagaagtctttgttaagaactttccctgggcctgactctgtgctggctgtgttttccaagaagaatgggcaaacgggccctcccactgagaagtactgaccacatgaaaaatacyacaatgcatggaacagaggtgcagctattaggggtacggtgacagccaagacgactgtggcctccagactgcacactgcacctaacacacagtaggcgctctctctgtacttgtggagtaaatgataacttaatcttgcaatgcgaaaataaaagcagcatttagaatgtcagtg

SEQ ID NO: 25340 - DNA, 563 bp, Homo sapiens
agacatctttacaattgcaacgtttcctgaacatacaagtttgttatagcagcagtcttctgggttcttgatttctgctgcgaatcccagagaactaattaagccagagccctttccactgaaaaccttgccctgtcactgtctgctgccaggggagctaactggcagccattacactgcctggaatggggtaggggggcaggggcaggaggccaattagtttacagcaaggtccatgaagaagcaagctaatcataatggaaaaactttggaggctgctcctcacgtgttttaawcttttgaggaagctggtgaattacctgtgtatttctggactctgccagttccacacctgtgctgcgttccactctgagcttgcgtatactcccttgcttcattttaaaggtactgtgtgagttcccacagccttgggcacccgcatgtactgaaatctgctgggcactaatgtcttgtttgaatgatttctgcaatgactgctgttcaactaggcaaatgccctttgaaagggcaaaaccaattctctcttagatcaactgggggtg

SEQ ID NO: 25341 - DNA, 616 bp, Homo sapiens
tcagtctaccacataaataattctttataaatatttgttatttttgtgagctaataaaaaaactaatggcatatgattatttggacacgttgtaagaacttcaaatataaatctatgttttgcaggccagcacacactgctaagtggaagaagaaggcagaaagttttgatttacaggcacaaatcccatgcatatgaaataaaagacaactgaagttttgctcagccatctcaaccatcagctccattcatcttctaactatgtgatgatatacactaaacacagatggccaatattaagtatgaaactacctgacaaaggaagctgattctaattcagaacaccataattctgaatgttgaaatccraaaagataaaaatccttaaaatttaattctggaaaaaaaatctttaaaagatttatttacatttagaaaagggggtttatttaagaaacataaaaacatgacaggatatttcacagcccactttacacaattaatgaggtgacactatacatatttttgcaagcataaacactcaagtgtattaatggcagttgcatgggcataatagttataagtagatgaactatattaaaaaagaaataggtca

SEQ ID NO: 25342 - DNA, 616 bp, Homo sapiens
tcagtctaccacataaataattctttataaatatttgttatttttgtgagctaataaaaaaactaatggcatatgattatttggacacgttgtaagaacttcaaatataaatctatgttttgcaggccagcacacactgctaagtggaagaagaaggcagaaagttttgatttacaggcacaaatcccatgcatatgaaataaaagacaactgaagttttgctcagccatctcaaccatcagctccattcatcttctaactatgtgatgatatacactaaacacagatggccaatattaagtatgaaactacctgacaaaggaagctgattctaattcagaacaccataattctgaatgttgaaatccaaaaagataaaaatccttaaaatttaattctggaaaaaaaatctttaaragatttatttacatttagaaaagggggtttatttaagaaacataaaaacatgacaggatatttcacagcccactttacacaattaatgaggtgacactatacatatttttgcaagcataaacactcaagtgtattaatggcagttgcatgggcataatagttataagtagatgaactatattaaaaaagaaataggtca

SEQ ID NO: 25343 - DNA, 616 bp, Homo sapiens
tcagtctaccacataaataattctttataaatatttgttatttttgtgagctaataaaaaaactaatggcatatgattatttggacacgttgtaagaacttcaaatataaatctatgttttgcaggccagcacacactgctaagtggaagaagaaggcagaaagttttgatttacaggcacaaatcccatgcatatgaaataaaagacaactgaagttttgctcagccatctcaaccatcagctccattcatcttctaactatgtgatgatatacactaaacacagatggccaatattaagtatgaaactacctgacaaaggaagctgattctaattcagaacaccataattctgaatgttgaaatccaaaaagataaaaatccttaaaatttaattctggaaaaaaaatctttaaaagatttatttacatttagaaaagggggtttatttaagaaacataaaaacatgacaggatatttcacagcccactttacacaattaatgaggtgacactatacatatttttgcaagcataaacactcaagtgtrttaatggcagttgcatgggcataatagttataagtagatgaactatattaaaaaagaaataggtca

SEQ ID NO: 25344 - DNA, 578 bp, Homo sapiens
tttttttttttttgagacacagtctcactccgttgcccaggctggagtgcagtggcatratctcggctcactgcaacctctgcctcccggattcaagtgattctcctgcctcagtctcctgagtagctgggattacaggcatgtgccatgacgcctggctaattttttgtatttctagtagagacggggtttctccatgttggccaggctggtctcgatctcttgacctcaggtgatccacccacctcagcctcccaaagtgctgggatcacagccatgagtcactgcatccagcccacacctgtatttgtagggccaattcaagggctcagtcaagggatttgttttcagtctacagttggagagattctctagataaaaaagaactgctattttctaaatgacctttctcctaagtaccctaaaataatcatagaatctgatccgaattcttgctgcactacggacaccaatagcccaagaaagtccaagcctcagatgagcacctggaacctcagtccttcatcccacggccaagcacgagactcgcaccaaaccactaccaatgttatcaacca

SEQ ID NO: 25345 - DNA, 522 bp, Homo sapiens
gcatgttctcactcataagtgggagttcaacaatgagaacacatggacacagggaggggaacatcacataccggggcctctgggggggtggggggctaggggagggatagcattaggagaaatacctaacgtagatgatgagytgatgggtgcagcaaaccaccacagcgcatgtatacctatgtaacaaacctgcacgttctgcacatgtaccccagaacttaaagtataataaaaaaaaatttaaaaaaataaatgactcacaggatcagaattcgattggactgaggtctacaaaggctttcttaaagcaaagggaacgtcatcctattcctgaaggattcggaggactggttttccctgcactctcctaaaatcatgcttttggttttaaaatttttatttatatttctttattttaataacaaagcttagctttttttttttcttgtgagatggagtctcactctgttgcccaggctggagtgcagtggtgcgatctcagcttactgtaacctctgc

SEQ ID NO: 25346 - DNA, 1370 bp, Homo sapiens
caactggtgccactgttctctgagcctcagcatcctttcctgaggaatgaggatgagggacctcctcaaggtcatccgaccagccaggggcagagctggagctggaagatagaacttttctctcccagtccttttctacttgatctcctgggttctttctactaaatacagaaatgaacaaagacatgataacctactcattgaatagcaaagtatatattgtctttttatgccaattctggacttctaggcccttatcatgggggaaactttagggccatgggaaagaacaaagataatcccaggtggaaaagatcaaatccagccaggtggctgcgtgggattagtttatttcatcctcactggtgagaggccttgaattccttgattttatgaccctcctactaatctctctctctccctccccactgtctccctctcttttttgtactgtttcagcatggagttggggatggrtaagagttaagagttcagctccactgtggaagggtaacacagggctgaacgcattgaagagccgaacacattgttttggcctgtttggaatttgttatgcataacttttgaggacattttgcccaattgctcacttgtttcccctgtggaaacactatctgataactatgtctatacatccctatctactttgccttccaaaattaggatgaattatttcttcccttctcgccactctccaaaacttaaaaagaatgctttggacaacctggcactctctcagccctctcttattctttttaaaagaataattgtttcagggcaaatgaagaaatgcattccctttcagacccactagcccactagttacttctgtcctctacaacaagcctgagtttataccgcaagagggctgcatctcctccctgtcacatggcactgggcctttccctatagtcacaggctgacatgcattcagagactgctgagagatcaggataggagccagctggagcgaaatgttatagctcagaacagtttaatccaaacacaagggcagtgcttgtgcctaacacaactgtggtaggggtgtggtgtggtgtgtggagtggtggcagcttttacagctttatcatggggttcatgggctggaggagatgtgaactcttccttgtcttttaccccttgtcttttgacctgacagcctgacacatgtagctttggggagaccctggttggtgatgagtcatttgtggcttaaaaatagaactctcaaagcaacaatgcccttgggactttttgatgcatatgtctttgttcatagaatttgggagaaaagagagagagggagagaaagactctgtgtgtgtgtgtgtgtgtgtgtgtgtgtgtgt

SEQ ID NO: 25347 - DNA, 1875 bp, Homo sapiens
cacagccacttcccgcatccaaaggaaagagaggtgagtgtcctagcagaaagtcagaaaaagatattcagatggtccatcattttctcaagttctaaaacggtccagggagtagacagtattcctcagagcaatggaaccttctcaaaatgctggcatcagagaataaaaatccccctaacatatgatgtaattgtgaaacagggagagacagacactacccaatgttagagagtgtcacaaaacaccatccctaccaaaaaagtaagtgtctcttaaggacaaggctctatgcttggtgctgggtactcacgcgttccatctttaaaacacagtctagtggagtgaatctgacatacgtaaatattggcgagatgctagcttcattgatcgtttacatttcaaaagtaatatgattctagcacatagaagaataattaaaaggcagaaatcaaggttattggcaatcagaaaaacatgaagaaatacaatattcactgtatgtgaataatattacattattgctaataaatagaggactgataaattcttatctcaggataatgaacagtaaaaggcaggaggacatacttttaaagacttcagtgccattggattctctttttcttttcaacttgactaatagaaagtgaatttgacctcacagtcacatagatgagcagtcagagagaggaaaccaatttggaattaaagcaaaataaaataaacaagcaaaaaaaacactaacacccaaggagtaaagccaatcataggttgaatttgttggctgtgtcaggttcattcaggaagctaggtcccagcctgtgttaccaggaaaatgatgctgaatctaatcctcaaaactacagatatattaattacaaatcacaaaatatggaggtgtcctgtttttaatcatttatcaaatgcatgaagggcaaccaaagaggaaatggaacattagaagttagcttcttagagtgtaatttcctagaagagaaatttatggcctgtacttattctccattagagcacgtctaacctcttttattagtttattcatcaagacagccttggtttcaggccagctctgcaagccrgcaggtcatcaggaaagggatcctctgggggcttttcctcctggtccagttgtgttttccagatcataacgcagttaacagaagtattcatggtgcattcggcaggaggtttgtaggttttcccccaaaaggcaattcacagagaaagccccaagggctatacggatataaagtgaacatctaaaatgtgctttgaaatgaaatgattttctgtttgccgtatgaggtttgtgattgcctctcacagcattgcttctattgcctttacgactgggttcaatttcttatttagtgatgtaataaaggggcgatttagaatctggcagcaaggacttcccaatcaatgagcaaatctatccctcattcactgtgcacctttccccttgacaccgtggctcttatctgggcaaccccactgggcacacagatatcagctatgtgtccctaaaagtgtccctacttccctgcatgcacagctatttctctcttttcaccacatagttccctggccctgcagaagagagcaactcaaaccctactctggttttctctccctctctgtgttagatcactctttctgtgaataatataactattaataatgtcattgtgatgaaagcaagcacacctgatatttgcaacttggcataggggactggaatgaaaaaaatatgacgaagaacatcttaccttgttttaagaatattcagaaactgcaaaatttctgaaaactgtatcagtctcagagctcttaaaaatctcaaacctggaaaaa

SEQ ID NO: 25348 - DNA, 1298 bp, Homo sapiens
cctacacatttatttacacccagtcaatggtatttgggctttctaaaaaaccgtatataactaactggtctatggtaaatcaaacattgtttaataatatcatttaagtacttgatcttaaaatatttgcttcattaaatgatacataaatgtcaccatcagcattatatccaatacagggagtggtttctgatcatggagagaattttaaagcaggtgtctctggaggacttgaggtccaagggctgcaatgggctcgtaagagtcaagtagccataggatttacaacttgtaggtctagaacagtaaaaccctgatatggtttgctgctatgtgcccacccaaatctcattttgaattgtagcttccataattcccacattgtgggagggacccagtgggaggtaattgaatcatgggagtgggtctttcccatgctgttctcatgatagtgaataaatctcacaagatttgatgtttttatgaatgggagttcccctgcacacgctctcttgmctgctgccatttaagacatgacattgctcctcctttgctttccgccatgattgtgaggcctccccagccatgtagaactatgagtcgattaaacctctttcctttataaattacccagtctcggtatgtctttattagcagtgtgataacagactaatattacactggaggcccaggtggcaacagactatgggtgggtgagtgataagtcaccaggaacaggaaaactaagtttaagcttttgggagccagtcggcatgagaaatcagagagggaatgaatcagaaccaaagtgagaagccagagttgggagcaagttgaaaatcagaagccgagcagaaaaacacaaacacatgccagagggcacaacccggccaaagtccaggtaaacagagcagaaatctggaaatctacgaaagataccagacagatgaagagatcttgaaaacttggtctaccctgttgtttagggtctgtcagtagatttgctctttggaaagggatcaagatagaggggactggatagtgtctgagtccagacagagtctgacactaataattagtggaaaagggaattaggcctcatctgcatacttcagtgggcataatataaaagagctaagttgaagcacactcaccgggatgaattgatgataatgagatctccctgtttgccaacttccaacgatccgtgtgtgtgagactttcccagtgcataagctgcattgatggtggcagcggccaaggcctcaggcatggacattctcatgtttacacaggcc

SEQ ID NO: 25349 - DNA, 1298 bp, Homo sapiens
cctacacatttatttacacccagtcaatggtatttgggctttctaaaaaaccgtatataactaactggtctatggtaaatcaaacattgtttaataatatcatttaagtacttgatcttaaaatatttgcttcattaaatgatacataaatgtcaccatcagcattatatccaatacagggagtggtttctgatcatggagagaattttaaagcaggtgtctctggaggacttgaggtccaagggctgcaatgggctcgtaagagtcaagtagccataggatttacaacttgtaggtctagaacagtaaaaccctgatatggtttgctgctatgtgcccacccaaatctcattttgaattgtagcttccataattcccacattgtgggagggacccagtgggaggtaattgaatcatgggagtgggtctttcccatgctgttctcatgatagtgaataaatctcacaagatttgatgtttttatgaatgggagttcccctgcacacgctctcttgcctgctgccatttaagacatgacattgctcctcctttgctttccgccatgattgtgaggcctccccagccatgtagaactrtgagtcgattaaacctctttcctttataaattacccagtctcggtatgtctttattagcagtgtgataacagactaatattacactggaggcccaggtggcaacagactatgggtgggtgagtgataagtcaccaggaacaggaaaactaagtttaagcttttgggagccagtcggcatgagaaatcagagagggaatgaatcagaaccaaagtgagaagccagagttgggagcaagttgaaaatcagaagccgagcagaaaaacacaaacacatgccagagggcacaacccggccaaagtccaggtaaacagagcagaaatctggaaatctacgaaagataccagacagatgaagagatcttgaaaacttggtctaccctgttgtttagggtctgtcagtagatttgctctttggaaagggatcaagatagaggggactggatagtgtctgagtccagacagagtctgacactaataattagtggaaaagggaattaggcctcatctgcatacttcagtgggcataatataaaagagctaagttgaagcacactcaccgggatgaattgatgataatgagatctccctgtttgccaacttccaacgatccgtgtgtgtgagactttcccagtgcataagctgcattgatggtggcagcggccaaggcctcaggcatggacattctcatgtttacacaggcc

SEQ ID NO: 25350 - DNA, 549 bp, Homo sapiens
gggagaaaaattaagctgctggagaatatagctgaagatctctgcagaggttgtactggtggtgatttaaaagcatgccaggcagcctggtatagagaaaagaatgcaggaagggttcagagatggccacatgccatttctggtagcttcagctgtaaaattctgtcaatatattgactttctccttatcaaagtgatcttaaaaaaaaaaaagttcattctcttttttttaaatttccaacttttatcttaagttcaggggtacatgtgcaggatgtgcagktttgttacataggtaaacatgtgccacagtggtttgatgcacatatcatcccatcacccaggtattaagcccagcatccactagctacttttcctgatcctctccctcttcccacccctcattctcaataaatatttttaaagtacaggaattctaaatatacaatcgtcttaaagttagaccactttgaaaaaacttcaaaaagcctcatcataatgtatttttaaaagtagttttaaacaacagaataaaggtaatgaagaata

SEQ ID NO: 25351 - DNA, 627 bp, Homo sapiens
acatttgcccctccatccccaattcatatttaagtacattgaaaggattcttgagaagcgtgtgacagagatatcataagatctggaaaatcagcaagaagatcttagcaaacttggcaaatgaaaagggagaattattaactgcagggaaaagtattatatgagaaagaggtgtggtgtagtgcacaacatggctaaacattgcgtaacatttgcacagtcatgataatgtaaacactgagtattggtttagccaaaaatgctaatgtaactacatcaggggataggggaaggaaactgatggaacacaggagttttctaggtattaytgtttggccttcaacatacattcgcactctttccacatacccccttaattacaaaggctgggaagctaaaaatgaccacatttcccaaaaggtcctgcagctacagttctggacacaatttaagttctctcataagatgcactcatttgagatttggaaggcagaagtgaggcaaaggccattttcttgtgactgaggcagctggtaaacaagattagacagataagaatgtttgcagtaggccaggcacagtggctcacgcctgtaatcccagcactttgagaggctgaggcagatg

SEQ ID NO: 25352 - DNA, 547 bp, Homo sapiens
gtgttgtataataacatagtatttatatttattgccttaagttatatggaactttctttcattgtaatggtcagacaaaatttatgattctgagtttagtgtaggtagcatgtcaacatatgggcttcaaagttaataaaataagytaattctaccttcaaataatgtcatcaaactatatattcaatagaacctgtcacaaatgattttgacttgttggtcactgtagtgctaggtaaatttttttctgttgaatatttggatttgagcattgcagcttatcagtaagtattctgtacttggttattttctggaaatggtaaataagttagggtatcacttattaactaaataaaccattcagtttggaaaatacagaaatacagaaaatatttaaaatacagaaaatctcactgtagatttgtctagtatagtaaaatttactaccacataagtttactgtggatctctatttggggttatttaatgtcttcaagattctgtatgaggtggccctttgacataagcttcaaatcagattttaaca

SEQ ID NO: 25353 - DNA, 547 bp, Homo sapiens
gtgttgtataataacatagtatttatatttattgccttaagttatatggaactttctttcattgtaatggtcagacaaaatttatgattctgagtttagtgtaggtagcatgtcaacatatgggcttcaaagttaataaaataagttaattctaccttcaaataatgtcatcaaactatatattcaatagaacctgtcacaaatgattttgacttgttggtcactgtagtgctaggtaaatttttttctgttgaatatttggwtttgagcattgcagcttatcagtaagtattctgtacttggttattttctggaaatggtaaataagttagggtatcacttattaactaaataaaccattcagtttggaaaatacagaaatacagaaaatatttaaaatacagaaaatctcactgtagatttgtctagtatagtaaaatttactaccacataagtttactgtggatctctatttggggttatttaatgtcttcaagattctgtatgaggtggccctttgacataagcttcaaatcagattttaaca

SEQ ID NO: 25354 - DNA, 532 bp, Homo sapiens
cagctggcaacactgcagctccagtcagtgggaagaagcgagagcctctgcagtaactctctcactccaaagcccacaggactgcatgtctacttcatgcttgccgtcagcaattcctgttttgttttktttttttaaccaaacacttgtaccactcctgtctgccttgcactcaacttctacttccatgcaagtcccatggtggactctgtcatagcctaaagaaaactatatatttgcctcttgcatattggcatgggtagaatgaagcaaacttcaaagatctaatcaaacattaaaaacttctgctttcttttccctacctttgatacctgctaatctgagcccaaagggttagaagaatgaacttttcccctgggaaccctaccaacttccaggtagattaaaatgaaggcaatactgcagaatgttgatttttggttttgcttggaaaggacaacaggaaaatgtaaacatggtctcgtttgcttcctaaaagtaccaaggtgattacctgcaatcagtttcctcc

SEQ ID NO: 25355 - DNA, 1098 bp, Homo sapiens
ttgagcccaggtatttgaggctgcagtgagctgtgattgtgctactgcacttccttttgaggaagacactttctcaaaaatagtaataaaaataaataaataaatatgtgaaaacctgtcttagctagcaggccatacaaaaatgggtagtaggtcagggtaatccctgagatggtcagtgagtaaacaagtacaaaatatcattaaagggccagacatggtggctcacgcctgtaatcccagcactttgggaggctgaggcgggcggatcacctgaggtcaggagttcgagacgagcctggccaatatggtgaaaccccatctctacgaaaaatacaaaaattatccaggcgtggtggcrggcgtctgtaatcccagctactcgggagtctgaggcaggagaatggcgtgaacctggaaggtggagcttgcagtgagccgagatcgcgccactgcactccagcctgggcgacagagcgagactccgtctcaaaaaaaaaaaaaaaaaaaaaaaaaagcaaaaattagccaggtgtgcacaccacgtccagctaattttttttcaaccatttaaaagtgtaaaaacagctggccaggcacggtggctcacgcctgtaatccccaacactttgggaggccggggcaggtggatcacctgaggtcaggagttcaagaccagcctagctaacatggcgagaccctgtgcactaaaaagacaaaaattagcagggcatggtggtgggcgcctgtaattccagctactcgggaggctgaggcaggagaatggcttgaacccgggaggcagaggctcgtgccattgcactccagcctgggcaacaagagcaaaactccgtctcaaaaaaaaaaaaaaaaaaaaaaagtgtaaaaacagctgagcgtggcggtagctaggtgtggtgcgtctgtagtcccagctacttgggaggctgaggtaggaagattgcttgagcccaggagtgccaagccagcctgagcaacatagtgagaccttgtctctaccaaaaaaaaaaaaaaaaaaaaaaaaaattagctggacatggtgatgctcgcctgtggtcccagctacttgtggggggg

SEQ ID NO: 25356 - DNA, 590 bp, Homo sapiens
tcaagcccatgcctttccatggacacacaggggtctgtaaccagtttctacattctttaactgttcctctgccagtagcttcacctcccttttgctgtcttttcaatgcttccatcctgcaaaccattaatcatagcccatcatttgctttctgttcttttataaccaagtcagcaagaacgtttagaacagtgcttcttaatcttggctgtacagtgtaatctctgggttgcttaaaacacacacagacacagacacacacacacacacasacacacacacacacacttgtaggccaggttgcattttggacaaattaagtcacaatctcagggatagagagttggcatcagcatttaccccctccttatcttgctttatgcatttgatgttaattaaacttatattgaaataattttagatttacatgcagtttaagaaatagtacaggcacccaatatactctttacctagtttcccccactgataatatcttataggatattgatacaatcaagatatagaacatttctatcaatcaccccaaggattcctagtgttgccttttttttttttttttttttttttga

SEQ ID NO: 25357 - DNA, 546 bp, Homo sapiens
gttttcttktgaaacttttcattgctatacattacacgatgaactgacagttcaatatatacgtgcaaacaagagttggttgtcaaaaatatattggtaagttctcatgatatttattgcaatgaattttaatggtatgcatatagaaagccctagacatcccatgcctgaaactatttccatgaagacatttgagtatagaaattaaatgccctgaaagttgtattaaatagaaaaaaaatgataagacaattgattaccatgttggggatacgttaattgtgtgtgtgtgtgtgtgtgtgtgtatgtgtgtgtgtattaacattctccttatagtcttccaatggaagagagaatactatacatatccttagatatggcttcaagagaaactaaaaatttaagttctgccttactagcagcaatctgctagtatcagaagcggaagtacccaactagccagtcggaagtacccaaccagccagttatagttgctggttgggtacttccgcttcaggtactcttttgaattgcagctctgacttt

SEQ ID NO: 25358 - DNA, 605 bp, Homo sapiens
aagttttatattacagaatagaagatcatttttaagatttaatcaagaattctattctttcattggaagacagtttccaaaatgttcataatgcttatctctggtgggtaagattatagattgattttttcctttataattttttgtgtgttccaggtgttccacaatgaacatctattccttttgcaatgaggaaatgtcattttttaaaaggcatattccttcaagggtacatataaagtatacttgggctttaataattaattactatttatcaattttagatggcattcttgaagggagaaaaagggcagtaagtttgcctgaaacttacatggttggtaggaaatgtatcagtatcttttyaattggttttattataacagactattttctgtcaagttcaaaaagaaaagtaaggcagaccctcaggcataacttggagcaaaggtataaattaaacaaaattctctggcagttgattttacagaattatagtagctggttgggtacttccgtttctttgctgtgaaacaatacaaataaatgtttgcttcagcaactgtgcttctggaagaaatatgtcccttgagacatggggaaaa

SEQ ID NO: 25359 - DNA, 1008 bp, Homo sapiens
tacctactgcatctcttttatctgccttgccccttattaaggccccctcagtgagcccacccggcctgggttgtctcctgtcgggagtgactgacagaggggaaggtgtcggtgttgcaggccagtgggaccaagcggagccagcagaggccggggccgtgtgccagcgagagccccgattccaggttcccctgtggaggtggggttgggggaagggcatctaccagcacaacgtggagatacaggtccggaagcgcagtccgggcatgcggagcagggtgcccaggctggcaggaggctggcccatgctcagctcctcccgcatggctgaaagcaagacctgtggaggcgggggtgggtgctgttggcactgggggcgccaggcacctcctcctctctgagaccttcttcccagggagctgaggtccttggtgggtctcccagggtgccctatgcaggggcagggagagggtctgagggtccgggtttgaggaggacccagccttacctcaggggtcagggtgtcctgcactgccccctttccgttgatggcagccaccctccacagctcctgcaggccccaatccagcctgcctgtggtgaggagccatcgtgccgactctgccagccaccttaagtggagggggcgtgggaggggtcattgcctgtggcccccrgtgcctggcctgcgccagcctcagactgctaccctgtacccactgctccaggcccaaggcttagggcggctgaggaccccgaagggcgttgtggcagccaagccctcttgggcaccctccttccccagcaggagaccccttctgctgcctttctccctcctagggattgtggttgggatgctgttctcatcctggggctggctgctgggatggagggagggatgactctgtggaacccttcctgcctccctccagaccccacagcccttcccctgcctcgctaggaacccggcctggttgcagtcagggcccctagggctacaggaccact

SEQ ID NO: 25360 - DNA, 1008 bp, Homo sapiens
tacctactgcatctcttttatctgccttgccccttattaaggccccctcagtgagcccacccggcctgggttgtctcctgtcgggagtgactgacagaggggaaggtgtcggtgttgcaggccagtgggaccaagcggagccagcagaggccggggccgtgtgccagcgagagccccgattccaggttcccctgtggaggtggggttgggggaagggcatctaccagcacaacgtggagatacaggtccggaagcgcagtccgggcatgcggagcagggtgcccaggctggcaggaggctggcccatgctcagctcctcccgcatggctgaaagcaagacctgtggaggcgggggtgggtgctgttggcactgggggcgccaggcacctcctcctctctgagaccttcttcccagggagctgaggtccttggtgggtctcccagggtgccctatgcaggggcagggagagggtctgagggtccgggtttgaggaggacccagccttacctcaggggtcagggtgtcctgcactgccccctttccgttgatggcagccaccctccacagctcctgcaggccccaatccagcctgcctgtggtgaggagccatcgtgccgactctgccagccaccttaagtggagggggcgtgggaggggtcattgcctgtggcccccagtgcctggcctgcgccagcctcagactgctaccctgtacccactgctccaggcccaaggcttagggcggctgaggaccccgaagggcgttgtggcagccaagccctcttgggcaccctccttccccagcaggagaccccttctgctkcctttctccctcctagggattgtggttgggatgctgttctcatcctggggctggctgctgggatggagggagggatgactctgtggaacccttcctgcctccctccagaccccacagcccttcccctgcctcgctaggaacccggcctggttgcagtcagggcccctagggctacaggaccact

SEQ ID NO: 25361 - DNA, 1008 bp, Homo sapiens
tacctactgcatctcttttatctgccttgccccttattaaggccccctcagtgagcccacccggcctgggttgtctcctgtcgggagtgactgacagaggggaaggtgtcggtgttgcaggccagtgggaccaagcggagccagcagaggccggggccgtgtgccagcgagagccccgattccaggttcccctgtggaggtggggttgggggaagggcatctaccagcacaacgtggagatacaggtccggaagcgcagtccgggcatgcggagcagggtgcccaggctggcaggaggctggcccatgctcagctcctcccgcatggctgaaagcaagacctgtggaggcgggggtgggtgctgttggcactgggggcgccaggcacctcctcctctctgagaccttcttcccagggagctgaggtccttggtgggtctcccagggtgccctatgcaggggcagggagagggtctgagggtccgggtttgaggaggacccagccttacctcaggggtcagggtgtcctgcactgccccctttccgttgatggcagccaccctccacagctcctgcaggccccaatccagcctgcctgtggtgaggagccatcgtgccgactctgccagccaccttaagtggagggggcgtgggaggggtcattgcctgtggcccccagtgcctggcctgcgccagcctcagactgctaccctgtacccactgctccaggcccaaggcttagggcggctgaggaccccgaagggcgttgtggcagccaagccctcttgggcaccctccttccccagcaggagaccccttctgctgcctttctccctcctagggattgtggttgggatgctgttctcatcctggggctggctgctgggatggagggagggatgactctgtggaacccttcctgcctccctccagaccccacagcccttcccctkcctcgctaggaacccggcctggttgcagtcagggcccctagggctacaggaccact

SEQ ID NO: 25362 - DNA, 624 bp, Homo sapiens
gggctcctactgattctacattatggtgaggggtataattacttccttatatattacaacgtaataataatagaaataaagtgcacaataaatgaaatgcccttgaatcatcctgaaaccacccccacccccatcccccaccatctggaaaatttgccttcctccaaaccagtccctggtgctagaaaggttggggagygccgctttaagagcctcacaagagatcagtcttgaagacgcagttggggtcacgtgacccgagtccgcccatcacagggctggccccgggtgccattttgagagcgtgctccttccttaactcctcctggtggggctagaatttggtggattgggtgtttatttgatgaggtcgcagcatttgggtctaatttaaaacttaggatgttctttaaatgtttcatttcttctttggttcatttccatgatgctatgccaccaaaggggagcctctaagggattttccttccaaaatgttgtattttgctggaattttgcaatttctttgttaaagaatccacccactcttccattgctctgcattctttctgaaaggacgtataccttgtgcgtccagtgagacctgaatcattgttaaagttggcc

SEQ ID NO: 25363 - DNA, 560 bp, Homo sapiens
tttgatcttctcaaccaccctgaggagtatgtacttttgccccactttacagaygaggaaactgagaagacatcaggcaatttttccaacatcacacaaaggataaggaaaatgttaggatgccaaccccatgtctccaggtttctttccactacagcatgctgttcatttgtgatctcgttcattcatccatccttccttccactcattccttcattcactcacctatatttttccctaaacagctacaggtcaccactgtctgggttgtttgctactaccttctgctgctgcctgagaaaacctgggagactgtgatcacattttttttcctgtagagctgcccgaatacagctcttctcaaagccttgcagcagagatgatacagccatcagcagctgatcctggaatgagtgttgagagcagcacagaccactctacgtttctgctctgaccacaggtctggcctagaatttgcccctccactgcacaatgcaggtaaaaacctttaaaaaaataaataaatggtctctgagcctcccagaaatacagcacttaga

SEQ ID NO: 25364 - DNA, 560 bp, Homo sapiens
tttgatcttctcaaccaccctgaggagtatgtacttttgccccactttacagatgaggaaactgagaagacatcaggcaatttttccaacatcacacaaaggataaggaaaatgttaggatgccaaccccatgtctccaggtttctttccactacagcatgctgttcatttgtgatctcgttcattcatccatccttccttccactcattccttcattcactcacctatatttttycctaaacagctacaggtcaccactgtctgggttgtttgctactaccttctgctgctgcctgagaaaacctgggagactgtgatcacattttttttcctgtagagctgcccgaatacagctcttctcaaagccttgcagcagagatgatacagccatcagcagctgatcctggaatgagtgttgagagcagcacagaccactctacgtttctgctctgaccacaggtctggcctagaatttgcccctccactgcacaatgcaggtaaaaacctttaaaaaaataaataaatggtctctgagcctcccagaaatacagcacttaga

SEQ ID NO: 25365 - DNA, 560 bp, Homo sapiens
tttgatcttctcaaccaccctgaggagtatgtacttttgccccactttacagatgaggaaactgagaagacatcaggcaatttttccaacatcacacaaaggataaggaaaatgttaggatgccaaccccatgtctccaggtttctttccactacagcatgctgttcatttgtgatctcgttcattcatccatccttccttccactcattccttcattcactcacctatatttttccctaaacagctacaggtcaccactgtctgggttgtttgctactaccttctgctgctgcctgagaaaacctgggagactgtgatcacattttttttcctgtagagctgcccgaatacagctcttctcaaagccttgcagcagagatgatacagccatcagcagctgatcctggaatgagtgttgagagcagcacagaccactctacgtttctgctctgaccacaggtctggcctagaatttgcccctccactgcacaatgcagstaaaaacctttaaaaaaataaataaatggtctctgagcctcccagaaatacagcacttaga

SEQ ID NO: 25366 - DNA, 430 bp, Homo sapiens
gtagctggtactaggtttgctttacagatggggaaactgaggcacagagaggttgaggcattagtagtactacatggctggctggagagccggacagtsagtgtcccagcccgggcttggctcccatggcatgcagagccccgggcacctcctctcctctgtgccccgcgtgggactctccagcccgacgggaggtgtgtccaggaggcgacaggctaagggcagagtcctccacagagcccaggctgacaccattccccccgcagaggtacagccccgtggtggaggccggctcggacatggtcttccggtggaccatcaacgacaagcagtccctgaccttccagaacgtggtcttcaatgtcatttatcagagcgcggcggtcttcaagctctcagtaagtgggcgggggtggggaggggaggggat

SEQ ID NO: 25367 - DNA, 430 bp, Homo sapiens
gtagctggtactaggtttgctttacagatggggaaactgaggcacagagaggttgaggcattagtagtactacatggctggctggagagccggacagtgagtgtcccagcccgggcttggctcccatggcatgcagagccccggscacctcctctcctctgtgccccgcgtgggactctccagcccgacgggaggtgtgtccaggaggcgacaggctaagggcagagtcctccacagagcccaggctgacaccattccccccgcagaggtacagccccgtggtggaggccggctcggacatggtcttccggtggaccatcaacgacaagcagtccctgaccttccagaacgtggtcttcaatgtcatttatcagagcgcggcggtcttcaagctctcagtaagtgggcgggggtggggaggggaggggat

SEQ ID NO: 25368 - DNA, 430 bp, Homo sapiens
gtagctggtactaggtttgctttacagatggggaaactgaggcacagagaggttgaggcattagtagtactacatggctggctggagagccggacagtgagtgtcccagcccgggcttggctcccatggcatgcagagccccgggcacctcctctcctctgtgccccgcgtgggactctccagcccgacgggaggtgtgtccaggaggcgacaggctaagggcagagtcctccacagagcccaggctgacaccaktccccccgcagaggtacagccccgtggtggaggccggctcggacatggtcttccggtggaccatcaacgacaagcagtccctgaccttccagaacgtggtcttcaatgtcatttatcagagcgcggcggtcttcaagctctcagtaagtgggcgggggtggggaggggaggggat

SEQ ID NO: 25369 - DNA, 698 bp, Homo sapiens
cacttagaatgcataaaatgctgcacatcattcattgtttactccaaccttatgtatcattattcaaattgaactaatgaaggcacaggctcagagaaaataatcacagtcatcattataggaataacagctactgtttacggaatgattagtacatatcattcactcttctgggtacttcataaatatcatctcacttcatgcttactacaatcatatcaggcaaatgttattatatctattttatagatgcgagtgctgagtatgtaacttgtgcagggatgtagagctagcaaacagtggagggcagcatgmaacccaagtttctctagctccaaaagccataccttttccagtacaaaatagtaccttcctgatgctgcaagaacaaagggacggatgacatgattgcatgtgtctttatatcaatgccagttctcacatatataaagtacagggacaatactccatcctctataaagtaattatgctaagtcttcaacgtcaagagtacaaagtgtggggggctggttggacaacactatcatgcctctatcttcatagatttatcattgacttgtaatcatgttctggttgttgctatcatgacctattatgtctgggagattctgtgtttccgtttttctctttctctctcatcttttcttgtctctgacccagacctttctactcagaca

SEQ ID NO: 25370 - DNA, 525 bp, Homo sapiens
ttgtggtgaataaattcacaaggcaagagctggtgtacaggtttaggaaraaggctctaagcaagttcttacagcacttgtttgtgacattcagtcagataatggccagaagtttttgttaagagccagttcttagaagaacctatgccaaggtcacccatagagtccattggtgtgaaagagaaaggcaaagaggtgtggcgggggagcgtaagatttggagtcagaagtctcagttctgtcatttgtcctggagcaggttattgagtctctttgaatcttggttttcacatctgtaaaatggaaagtcctgcttgtttcatgggatgggtgtgggaataaacaataaatgtcaaacgtgtggcagactcaacagcctacagcagatattattaagcatttggtcagaggttttagcagggagaaaggcttcgagcagtcagcagggacttccagagccctgtgctgtgcccctcacatatccagcggcagaagggtctgtcaggatgttaactacacattgac

SEQ ID NO: 25371 - DNA, 577 bp, Homo sapiens
  misc_feature (1)...(577): n = A,T,C or G
cctggcttctgcctttcactctcttcccttccctgctncctctgactaggcacascccaaagccccatttccactcccactttcttgccacctacaggctatctccccaccaggcctgcccccntggcaccacttctccctgtccatcttctcactcttgcacatcccttgctcctggcagcccaacacgctgcctgcacggtgcacgcctcccttcccctcacctttgctccccaatcaagtcccctgcattcttcagtgcacagctggagtttcacttcctccgggaagtctcctgaccaactggtccaaacagaaatttaggtttgtttcctctcctgcccaaatcagtacccaataccagtgtgctgtatatgaccaggagtcaataagccattcatgaggcagaatatgcctagaccagagaccttggctggactatctgccccaccaaccattggctctgtggcctgtggccttcttccttgcgtaagagatgtctgaccagtccagtgcccacaggcattcagagaaacaaatcccagcatgtgagctctgtgcaaaggcactcagcaaa

SEQ ID NO: 25372 - DNA, 532 bp, Homo sapiens
tgaattccaattctggactcagaagctgagtagatggaaggaaacatgcagtctttgaaaactcagttaaagcagctgtgatttaaccatgtttgtcccttgtcaagtggctttccttcttgtctggattttgcccccgtctccctgccatgctgtggccatgtaaataatttagatgcctagggtggtctggagcatgtccgttttatttttttgtttttcgagacagagtcttgctctgtcgcccaggctgaagtgcacaggtgtgatctcggctcactgcaacctctgcctcccggggatcaagccattctcctgccttagcctcccaaggagctggggttacaggcacccaccaccacgcccggctaatttttgtatttttagtagagacggggtttcaccatgttgtccaggctggtcttgaactcctgacctcatgatccacctgcctcagcctcccaaagttctgggattacaggcgtgagccactgggtctggcctgtttttctgtttgtttgtttgtttkttt

SEQ ID NO: 25373 - DNA, 1955 bp, Homo sapiens
tgtcatagctatgatggaaaactacatagtggttcctcaaattaaaaatagaactgccatatgatccagcagttccacttagagatatatatccaaaataattgaactcaggatcacaaatagatacctgctgtttaaattaaattaaaataaagacaggttcttgctgtgttgcccaggctgtactccaactcctgagttcaagcaattgtcccgcttcagcctcccaagtagctggaattagaggcgtgcactaccacagctggtgatacctgctgtttaaatgagtgtgctttccactacgataagctctctctcagtggggtagaaagatcttgttctaaatcccagatgaactgggtactttgaaggaggtgtagcattcaggtttgttcttaatgrcagttacatatggttttataaccacatccttttgttgaaatgcttttgatgcagaaatgctttcagtgcaggctttgaaaaagatcaccgtctgacttcatgtctttaaaaaaattaagctaatgaaatgacacctaggatctaagggatgcccggaagcttcctcagtccttctctagcttggtgccatttcttgtagacagagaggagagctattaagacacacgacagcagattgttctgtaatgatgacattcttgcttcatgtaaatagccatttagaagcctcagttgggactttgcagaatggaatgcagttcttggataatcagaaaatgacttattttgggaattcttcatttgggaattagagggttttctattctgtttaaccattgcattaccatgcctggattctatttttaaaatcttacctacgttttaaaaaatgagtattatttaatggaagctttcccccaattgtaaattaacctgtgcattcattatagaaaattagagaaagtacgaagaagaaaaagaaagtcacctataatcatccaacaatgtcccagcctttctatgtatatgatcccaaaagtgggatccttacatgttgttttagttttagttttctttctcttaacgtattttatttttatcatattagtgaatattctttgcaaagaagatttttttttttttttgagacagagtcttgctctgtcacccaggctggagtgcagtggcatgatctcggctcactgtaagctccacctcccgggttcacaccattctcctgcctcatcctcccgagtagctgggactacaggtgcccaccaccacgccccggctaatttttgtatttttagtagagatggggttcaccatgttagccaagatggtcatgatctcctgacctcgtgatttgcccccctcggcctccccaagtgctgggattacaggcgtgagccactgcgcctggcgcaaagaagatttttaatggctgtataatattctctcattaggcatcagttactcacctcccttgcagaggcacgttgggtggtttaaggggttttgctatcataactaatgctgtggtgaacattcttgcacgattctttgcccccatccctgatccttttcgtcagcggttttctagaaatggaaattagcagtccagccatgtaaaccttcaaacaacctatcagttcttgaaacttcaggtgcagagcaatccaaatactagccttacactttgcattttcagtgatagacatttagaaagctggggttttttcctttcctaatgaagtttgatgtttttgccggcgtccagggaagtgatcctgagctgaggctgtcagtaaaaaagccatttctcagccaggccctgaggcttagcagcctcttccagcagcacagcctccaggaggcagagtctggtgttacataaagggtgccatctgcttggagcaactcgagagcagagtgaggaagtgtggcgttggccgttgcttttcaaaatatttgccatcttcaaaaaccctgtc

SEQ ID NO: 25374 - DNA, 1955 bp, Homo sapiens
tgtcatagctatgatggaaaactacatagtggttcctcaaattaaaaatagaactgccatatgatccagcagttccacttagagatatatatccaaaataattgaactcaggatcacaaatagatacctgctgtttaaattaaattaaaataaagacaggttcttgctgtgttgcccaggctgtactccaactcctgagttcaagcaattgtcccgcttcagcctcccaagtagctggaattagaggcgtgcactaccacagctggtgatacctgctgtttaaatgagtgtgctttccactacgataagctctctctcagtggggtagaaagatcttgttctaaatcccagatgaactgggtactttgaaggaggtgtagcattcaggtttgttcttaatgacagttacatatggttttataaccacatccttttgttgaaatgcttttgatgcagaaatgctttcagtgcaggctttgaaaaagatcaccgtctgacttcatgtctttaaaaaaattaagctaatgaaatgacacctaggatctaagggatgcccggaagcttcctcagtccttctctagcttggtgccatttcttgtagacagagaggagagctattaagacacacgacagcagattgttctgtaatgatgacattcttgcttcatgtaaatagccatttagaagcctcagttgggactttgcagaatggaatgcagttcttggataatcagaaaatgacttattttgggaattcttcatttgggaattagagggttttctattctgtttaaccattgcattaccatgcctggattctatttttaaaatcttacctacgttttaaaaaatgagtattatttaatggaagctttcccccaattgtaaattaacctgtgcattcattatagaaaattagagaaagtacgaagaagaaaaagaaagtcacctataatcatccaacaatgtcccagcctttctatgtatatgatcccaaaagtgggatccttacatgttgttttagttttagttttctttctcttaacgtattttatttttatcatattagtgaatattctttgcaaagaagatttttttttttttttgagacagagtcttgctctgtcacccaggctggagtgcagtggcatgatctcggctcactgtaagctccacctcccgggttcacaccattctcctgcctcatcctcccgagtagctgggactacaggtgcccaccaccacgccccggctaatttttgtatttttagtagagatggggttcaccatgttagccargatggtcatgatctcctgacctcgtgatttgcccccctcggcctccccaagtgctgggattacaggcgtgagccactgcgcctggcgcaaagaagatttttaatggctgtataatattctctcattaggcatcagttactcacctcccttgcagaggcacgttgggtggtttaaggggttttgctatcataactaatgctgtggtgaacattcttgcacgattctttgcccccatccctgatccttttcgtcagcggttttctagaaatggaaattagcagtccagccatgtaaaccttcaaacaacctatcagttcttgaaacttcaggtgcagagcaatccaaatactagccttacactttgcattttcagtgatagacatttagaaagctggggttttttcctttcctaatgaagtttgatgtttttgccggcgtccagggaagtgatcctgagctgaggctgtcagtaaaaaagccatttctcagccaggccctgaggcttagcagcctcttccagcagcacagcctccaggaggcagagtctggtgttacataaagggtgccatctgcttggagcaactcgagagcagagtgaggaagtgtggcgttggccgttgcttttcaaaatatttgccatcttcaaaaaccctgtc

SEQ ID NO: 25375 - DNA, 995 bp, Homo sapiens
ggtttggtttttgacttgacgcttccattttgggtaatttggctatcagtgcactcaagcatgtgtgaaagactcacgcagagggttcagggttggggacagccccgctgctcctcaggaggctggccacatgacagtggtctgtctctgcactgggatgccatgtagctgtaaaaasagtccatgtggacccatctctagggctttttgttaggtgatcaaagcaaagtgcaggacaatataagtaatgtgctggctacatttttgtctaaagagggcaaaggaatttctctttttgttagcttataaatgcataaaaggagtctgaatggatgaaatttacagaggttactgtgggggtggggaggacaggagagagaattgccacctaggtcttaactctttcttaatatgtttgaactatatgaatgtgctatctattgaaaaataaaatttttaaatcaacttgagaaaaggatctgagtaatccctgtaatcctggctactagggaggctgaagtgggaggattacttgagcctaggagttcaagattatagtgagccacgattgcgccactgcactccagcctaggcaacagagcgagacctcgtctcttaaaaaaaaaaaaaacaataaaaattaaaaatttttaaaaattgaaaaaagggaggaaatgtaaatcttccagcacttcctcagtgtcagaccctgagctggacacttatgttgtacatgctcccaggggagacagcagcatcctccctcttacagaggaagcacagtgggaagtccagggtctcagctagtcagagactaagctgggatctgaaagcctcgcctctgtcattctcctacatcgcttctaacatgctacctgccttccttttaagtaaattgtgcaacattttattctccagaaatgttaataaggaagatctgcctttaaaattagcttaaaaatacaaaaattagctgggcgtggtggcgcatgcct

SEQ ID NO: 25376 - DNA, 995 bp, Homo sapiens
ggtttggtttttgacttgacgcttccattttgggtaatttggctatcagtgcactcaagcatgtgtgaaagactcacgcagagggttcagggttggggacagccccgctgctcctcaggaggctggccacatgacagtggtctgtctctgcactgggatgccatgtagctgtaaaaagagtccatgtggacccatctctagggctttttgttaggtgatcaaagcaaagtgcaggacaatataagtaatgtgctggctacatttttgtctaaagagggcaaaggaatttctctttttgttagcttataaatgcataaaaggagtctgaatggatgaaatttacagaggttactgtgggggtggggaggacargagagagaattgccacctaggtcttaactctttcttaatatgtttgaactatatgaatgtgctatctattgaaaaataaaatttttaaatcaacttgagaaaaggatctgagtaatccctgtaatcctggctactagggaggctgaagtgggaggattacttgagcctaggagttcaagattatagtgagccacgattgcgccactgcactccagcctaggcaacagagcgagacctcgtctcttaaaaaaaaaaaaaacaataaaaattaaaaatttttaaaaattgaaaaaagggaggaaatgtaaatcttccagcacttcctcagtgtcagaccctgagctggacacttatgttgtacatgctcccaggggagacagcagcatcctccctcttacagaggaagcacagtgggaagtccagggtctcagctagtcagagactaagctgggatctgaaagcctcgcctctgtcattctcctacatcgcttctaacatgctacctgccttccttttaagtaaattgtgcaacattttattctccagaaatgttaataaggaagatctgcctttaaaattagcttaaaaatacaaaaattagctgggcgtggtggcgcatgcct

SEQ ID NO: 25377 - DNA, 995 bp, Homo sapiens
ggtttggtttttgacttgacgcttccattttgggtaatttggctatcagtgcactcaagcatgtgtgaaagactcacgcagagggttcagggttggggacagccccgctgctcctcaggaggctggccacatgacagtggtctgtctctgcactgggatgccatgtagctgtaaaaagagtccatgtggacccatctctagggctttttgttaggtgatcaaagcaaagtgcaggacaatataagtaatgtgctggctacatttttgtctaaagagggcaaaggaatttctctttttgttagcttataaatgcataaaaggagtctgaatggatgaaatttacagaggttactgtgggggtggggaggacaggagagagaattgccacctaggtcttaactctttcttaatatgtttgaactatatgaatgtgctatctattgaaaaataaaatttttaaatcaacttgagaaaaggatctgagtaatccctgtaatcctggctactagggaggctgaagtgggaggattacttgagcctaggagttcaagattatagtgagccacgattgcgccactgcactccagcctaggcaacagagcgagacctcgtctcttaaaaaaaaaaaaaacaataaaaattaaaaatttttaaaaattgaaaaaagggaggaaatgtaaatcttccagcacttcctcagtgtcagaccctgagctggacacttatgttgtacatgctcccaggggagacagcagcatcctccctcttacagaggaagcacagtgggaagtccagggtctcagctagtcagagactaagctgggatctgaaagcctcgcctctgtcattctcctacatcgcttctaamatgctacctgccttccttttaagtaaattgtgcaacattttattctccagaaatgttaataaggaagatctgcctttaaaattagcttaaaaatacaaaaattagctgggcgtggtggcgcatgcct

SEQ ID NO: 25378 - DNA, 814 bp, Homo sapiens
tttttttttttttttttttttgtagagacagggtctcactatattgcccagactggtcttgagctcctgggctcaagcatccttctgcctcagcctcccagagtgttggcattacaggcattaggtggttcttcaaaaaagtctgcatgcctatttagatgctagatctctcaccctttctagctctacaagtatagagggaaaattcgagacataaatagcctcacctttgtagaattgagctccctgaaggcccacagtctgcctctggtcttgtatctggaccagcattcctttctcattgtgctgagagttgggaaggccctgggtgacccctcgggaccatttcctgagaaggtgttctgtaaatgacaggcttcttgcatyaaggccacttttgttaacctcccgtcagtatttggttggtcctagattagggccagtgtcctcactgtgagtgaattcacagatgagggagttggggtgggaatgagagcaagaacatgggggccagctggggacagttgagaacaatgatgcaactttctcctctcttcctttgtggtagcagaccttttatgctttcttgaaagcacttattttatcttttcattacttaggaaataacactatatccagacaagcatgggtgtgtccgggacctgttagaagaatgtaaaaaggccgtggagcttggggagaaagcatcagggaaacttaggcaagtatttcttgagcccaattgtggacgttcagttaggggtggcagttaacgctgacctctgcagttgcgttggtggaaatcacccagctg

SEQ ID NO: 25379 - DNA, 558 bp, Homo sapiens
catgccaagctaatttttgtatttttagcagagaaggggtctcaccatgttggtcaggctggtcaggagacctcgtgatccacccgcctccacctcccaaagtgctgggattacagacgtgagccaccgcgcctggcctacttcaccactttttgacaataggactataaggttttctgtttgtgcctgtgaaaacagtctagagattcaaattggttcaagaaaagagttgactcagtttgtttaagaactcacaacctgttgcttgctcccatttgtcaaggtggctgtgtagaggagaaggggaatgcagtgtttcctgttatccccaaatggatcattaggacgcaaagttgcctgcagagataagctatgcatgataagttccaaaatagtgaggtccagatacctccccagggctaaaagaggacaaggcaattgtgctatttctagtgtccactagtctatataagcagaagatcagagaggattcaagaagagagagaagaatgagtcatgggtcaaygtccttctccacaacatcatgaaaaaagccaa

SEQ ID NO: 25380 - DNA, 746 bp, Homo sapiens
tcctccacgtctctcaccaccttgtacaattcctgacctctcatttgcctcctcacatcatgtgttgacacattgacagaaatgccacgcagctgtatcagggcattcaaatgcatacacctctcaggctcaccttcagcccmtgcaaattcagagttttcttaatttctgtagctctttctatttctgtatttaatggcacagaacatgaggttccttttgccgccagtgccaggcatgtgctagatctccatttgggtagaagcaaagctctcatgctgatcttctttcctgtctgaataccttgcagtgtttcccacaagcctctcggtctttctctaaaaagatggcagttaccactttggctggctggcatttttctgatctccctgatcctgtaacagtattcctctctgggatttttttttcttggcatggcaagcacttctccctcaccagtgcagggaagcctttgatacttcttggacatcttgatcaaacggccttaatgctgcaaccacctgcagttttactgtttaaaacttccacatccccttttgtgcgtatttcaactgcactgaaaatgtaggtttctataatcttgtagatggctataaatatccccactgggttaaaaaaaaaaaaaaaccttgtatttgagcctcaatatgctgagatgttttgtgatctagtaaatagcaggaaatttttgcttacctaatatttattgagtagctgttacatat

SEQ ID NO: 25381 - DNA, 810 bp, Homo sapiens
ttgccttaggcactaggggtaaattggtaaacaagacaaaatttcttccctcaaggatctgacagtttgataaaccagaaaataaagataagtactcagcaatttcacacacacacacacacgtatatacatatacatacacacacacatacatatatacccccaaagaattgtaagtaggtattcaattacatgtccatatacgtgagtagcagcattcctcacaataataatgttgtgaaaagaaccccatttccatcaacagaggagaagataaacaaatcrtggtgtatccataccacagaacactatttagccctagaaaagaaagaagtactggtatggatgaaccttgaaaacatgatgctaacattgaaggaaggcagacacaaaaggccacatcttgtacaattcaatttatatgaaatatttattaggttggtgcaaaagtaattgtggggttttgccattatattgaaagttatttgaaagtaatgacaaaaaccgcagttacttttgcaccaaccaaaaagaataggtaaatccaaagagacaaaaagtaggttggtcgttactgggagcagaaaggagagaggagtagggagcgagtggggtttccctttggggtgatgaaaatattttggaactagataagagaggtggttgcacaacattgtgagttcactgaatgccactgaattattcactttaaaatgggtaattgtatgttatgtaaacttcacctcaatgaaaaacagataatgtggtaattgataggatggtggccagtagaaggttctggggcaggaa

SEQ ID NO: 25382 - DNA, 531 bp, Homo sapiens
agcccaatgaatcttaataaaaaatggaaatggctttcccctttcattttaattaacattatgtctacatttctgggataatggataattaagtgagttcccttggcattacaacgttcttggaaataatttatggtttcgtttcactgtgtgaaggctgtttgggttggtgcttaagttttatcataaatatttccgaggagtatttgcacattcgttgatttgtattcasaaggctgcagtaccccattctggggaagtgtcttatgtaatattttctcacaggccacgcttccactctgtgtgttcttttttggcacagagttgtttgcagaatgttgcattccttcagcagcatgagaccacggccaccattttaacctgcatccctctgtgtgaattggttgacctgagacagaatctcagtgagccttctggaactgggctgagcttaagtcttccagtctaaaagggaaatggtaataataataagggttggtatttattacgtgcccactagtctgcaccacg

SEQ ID NO: 25383 - DNA, 769 bp, Homo sapiens
cttttctggggcaaatcacagacaagcctctctgtttgaatggctgggagggcacgggaggcggtcctagggcaaaaatgagttaatagtttaaaacttccctgccacatgaggacagatggaatctgccttcttgtccctgatacagacccatgggaggctccaagaggcaggcttaagtgcaagagcaagacagagagtgggatcttctaccccaggagccctctgatcacaggattgccacttttgatgaagacacagttgagttaaaaataggccccgcccagagtgtgtacggaagtggagctggaagttcctgggcgcatgtgtgacagaaatgcagtgggccattttaattagatccctttaccagaactcctgaccttctatgtagcacattaatgtattttactaattataaatgcaattaaaaagtactgaaataaaattaggctgatctatctaatttacattaagcactttcaaattatgcagattttaaagtctctatctgcctctctctccctcyctctctcttttttttttttttcaatttgagtttcggggtaaaattgtctgcattaaaacagctggaaaacaaccttgtaggaaaacaaatttcttttctgtgattattctcagtgtgcgagttaatttttgaggcagtaatatacttagcagtcatcgggcagttacttgaaaagcagagacatatgtgtctcgacacaggcgcgggagctggggtgcatgcacgcggggatgagtgggg

SEQ ID NO: 25384 - DNA, 802 bp, Homo sapiens
gtgccaaaattatcgcctagcatcattaaaaatcagaatgttcagttttgctggttatggaagttgtgtatgcagggcagctctatattaggtgaggaaatggagcataaaggaaagcgaattcccctctcccccggagggttggacgtgtgtgcttttctgctggggccatcactctgcctgggtctgctggaggctgcattcgctggaggaagaggagaccttgacggggcctctttatagattaaatctgattcgcaggttccttggaagcagacgtgtaataagctgttctctggagtagtgtataagctccttaagacgttcctggtgaggtttaactccccttactccatgccctcaattttatttgctgcccaaactttgcgctttaagctccccatcaaaaggaagcctgaaataattcctcagattgaagctgttcgtttggaaagtccttttcttcctcttctccccctttagatacaaaaggggtgtttccacttgcagccagggaaccaactttgcctcctgtgacctggaagccaagatgcgtgtgagtcttcccaaaggatggctggactgtaaaacatgcaaacaagggtgggatrgctgctgaggtcccttgtattctgagatctacaggctcaggggccctggaaagcttaaagtgattcttggcccttccctcatcccatcctctgccatcacagactctcagagggaatgctcagaggtggaactgcttgttaacctacggggagaaagttttcagatctttctcttgaagaggagcatgtct

SEQ ID NO: 25385 - DNA, 771 bp, Homo sapiens
gcatgcaaagtttttaggggtggatgtgtcaaaagtggtaacgcagatgtcacagcctttgccaaagcaaattatggtaggtcatgtatggaaagacctgatcataaacaggcctaaatccaaacctcaagacccaatcagacagaattccatgggattgaatgttgacccatctgcgaaggggagtgacaaaaaacaagattgagaaatcatttcacttccaacattgaagggtcatggatgtcatgccaaggaattggaaccatcatctcattttcaattagacccaaagagtcagtcccttttagaattaggcggaataatctaaagtactttcatggatctagggaaaacaggcagaagtatatgtaatacaggatttaatatttcagtcaggagaaaataacatgacagagttaagcagtgtgtggttgaatggaaagtattagcaatgattgtatatcagtctgaattcttagacttgtaagacagcagatatagatgaatctgatttttatcgcctatgacagtttgaaacaaggaagtacgcctttttgaaatttttaacattgttcagtacttgcagtcatggtatcagtggtttgcaagcaactcttgcttacccatgttttarggttcaaggggtcactcattgtctacagcctaggaaaaatcttaagtttctggaatattccccttgtatgtatcagtttccattaatggtgccaaagacgttgaaagagacaaataagcatatactcaatgcacctt

SEQ ID NO: 25386 - DNA, 771 bp, Homo sapiens
gcatgcaaagtttttaggggtggatgtgtcaaaagtggtaacgcagatgtcacagcctttgccaaagcaaattatggtaggtcatgtatggaaagacctgatcataaacaggcctaaatccaaacctcaagacccaatcagacagaattccatgggattgaatgttgacccatctgcgaaggggagtgacaaaaaacaagattgagaaatcatttcacttccaacattgaagggtcatggatgtcatgccaaggaattggaaccatcatctcattttcaattagacccaaagagtcagtcccttttagaattaggcggaataatctaaagtactttcatggatctagggaaaacaggcagaagtatatgtaatacaggatttaatatttcagtcaggagaaaataacatgacagagttaagcagtgtgtggttgaatggaaagtattagcaatgattgtatatcagtctgaattcttagacttgtaagacagcagatatagatgaatctgatttttatcgcctatgacagtttgaaacaaggaagtacgcctttttgaaatttttaacattgttcagtacttgcagtcatggtatcagtggtttgcaagcaactcttgcttacccatgttttagggttcaaggggtcactcattgtctacagcctargaaaaatcttaagtttctggaatattccccttgtatgtatcagtttccattaatggtgccaaagacgttgaaagagacaaataagcatatactcaatgcacctt

SEQ ID NO: 25387 - DNA, 545 bp, Homo sapiens
ccctccattttcctgcttgctttctctactcatgcacacatttattgagcacctgctggaacctgagcaaggtgaacaaggcacaccyacattcacatccaaagcctctcattcactcccaccaaatagtgtgggaacctagttcatcacagtgtaattccagcattttcttaagaaattgatattaattcctcaagttcccccatcaccctcttttacatttctatctcatgttctatatccttacaatttatgtgtatacctcatgcttatttctgaatatagtagtacatgtgtgctaaaaaatgaatacggaaatttcctaataatttagtatcaagggtagtattgtgtcttcacatacaagcatctcagttttgtttgaatagttggagaggcagtagagtttgatgctttataagctagacttgcataaaataatctgtctctgaatcccaatgatatcattagcagctgtgtgacctggggcactttatttagctcctctctctcagatcacttaacagaaaataactgggcacagt

SEQ ID NO: 25388 - DNA, 545 bp, Homo sapiens
ccctccattttcctgcttgctttctctactcatgcacacatttattgagcacctgctggaacctgagcaaggtgaacaaggcacacctacattcacatccaaagcctctcattcactcccaccaaatagtgtgggaacctagttcatcacagtgtaattccagcattttcttaagaaattgatattaattcctcaagttcccccatcaccctcttttacatttctatctcatgttctatatccttacaatttatgtgtatacctcatgcttatttctgaatatagtagtacatgtgtgctaaaaaatgaatacggaaatttcctaataatttagtatcaagggtagtattgtgtcttcacatacaagcatctcagttktgtttgaatagttggagaggcagtagagtttgatgctttataagctagacttgcataaaataatctgtctctgaatcccaatgatatcattagcagctgtgtgacctggggcactttatttagctcctctctctcagatcacttaacagaaaataactgggcacagt

SEQ ID NO: 25389 - DNA, 533 bp, Homo sapiens
cttgttacccaagctggagtgcaatggcgcgatctcagctcacagcaacctctggctcccgggttcaagcaattctcctgcctcaccctcccaagtagcygggactacaggcgcctgccaccatgcctggctaattttgtacttttagtagagacggggtttcaccatgttggccatgctggtctcgaactcctgacctcgtgatctgcctgcctcagcctcccaaagtgctggcatgagccaccgtgcctgatgagacaaggttttttagtagaggtggggaagaacagagtgagaccctgtctcaaaaaaaaaataataaattttaaaaaaattaaaacaagttatttcaaaacaaattatgtgctacttaatgaggaccactaggggtcagcaaatactttttttccaaaatagaaatttcatattggttttgctaattaaaaattacaacctggctgggcgcagttgctcctgcctataatcccggcaccttgggaggccaagggggtaagattgcttcagccaaggag

SEQ ID NO: 25390 - DNA, 533 bp, Homo sapiens
cttgttacccaagctggagtgcaatggcgcgatctcagctcacagcaacctctggctcccgggttcaagcaattctcctgcctcaccctcccaagtagctgggactacaggcgcctgccaccatgcctggctaattttgtacttttagtagagacggggtttcaccatgttggccatgctggtctcgaactcctgacctcgtgatctgcctgcctcagcctcccaaagtgctggcatgagccaccgtgcctgatgagacaaggttttttagtagaggtggggaagaacagagtgagaccctgtctcaaaaaaaaaataataaattttaaaaaaattaaaayaagttatttcaaaacaaattatgtgctacttaatgaggaccactaggggtcagcaaatactttttttccaaaatagaaatttcatattggttttgctaattaaaaattacaacctggctgggcgcagttgctcctgcctataatcccggcaccttgggaggccaagggggtaagattgcttcagccaaggag

SEQ ID NO: 25391 - DNA, 1935 bp, Homo sapiens
tttttagtagagacggggtttcaccatgttggccaggctggtcttgaactcctgaccttatgatctgcccgcctcggcctcccaaagtgacagagacccatttttcagatgagaaaactgaagctcagagaagggagatgaacgtaggtcgcatggtgaatgagtaggcaaactggggctcctcccttgggaaatgccctgcctaagctttgggtgccccctgcagtcctgacctggatcatcatcctgctgtcggtcacggtgacctccatcacaggcctctccatctcagccatctccaccaatggcaaggtcaagtcaggtgggccatccccctttccaccaaggccctcctctcgtgggctcctaatcctgggaacaggactcccaacttccccaacccaatggtacacccagccgctcctgtggttccgggagagggctctaggcaggctgtctacaccacgagatggcctcagctatctcctgccccgtgggtcctgtggccaccctctcctggcctctgcctgccctgagtccaccccagccaaccgactcatctggtttcatggttcccggctctgccctgataggtggcacctacttcctcatctcccggagtctgggcccagagcttgggggctccatcggcctcattttcgctttcgccaatgccgtgggtgtggccatgcacacggtgggctttgcagagaccgtgcgggacctgctccaggtgaggccggggggctggaccctgggtagagggatccgggcagcccattgcactctcctccgccccatctgggctggggcctcctgctgctctgcctgacttcacccatcaggaaccacagcctgatcactgtgggtgagagtgacaatctcatcaaataaaggccattgctttcccacaagtcccctttgggggtgtgtgtggcctttagagccacactgtccaggcccgtgcagcagctgctttggggactcgatggcaggggtggtgcttgagttaacatcgtcctagcagagtgcaccgcacaggaggtgcctcctaggtgggcagagtctgggggatggggaattcagagggtggcttgcagcctggcccattttccctccccaggagtatggggcacccatcgtggaccccattaacgacatccgcatcattgscgtggtctcggtcactgtgctgctggccatctccctggctggcatggagtgggagtccaaggtgaggaggccatggaggagggggacatggaggtggtcacgtggagaagcgggggttgccaggcctgggccctccctggtcctctgccttttctttttcttttctttttttttttttgagacagaatctcgctcgatgtccatgctggagtgcagtggtaccatctcggctcactgcaacctccatctcccaggttcaagagattctcctgcctcagcctcccgagtagctgggattacaggcacctgccaccacacctggctaatttttatattgtttgtagagacggggtttcaccatgttggtcaggctggtctcaaactcttgacctcaagtgatctgcccgccttggcctcccaaagtgctgggattacaggtgtgagccactgtgccctgctgctttgtatctcttgtgtgacaacctaggtccacatggcccagggtgggcatggtggctcagggggccgggcacccagactccttccatcttgtgctccctccatccctgcgccgtggcctttgtccacctggtccaccatacccacatcccctccagtcagagggaaagcaaagaagggggaaatgaaagggagggaattcccttttctctttctttttatggcaccatctggaagtttcactatcgctgtcacacatggctgcgagggagcctggggaggtgtggccttcaactgaatcat

SEQ ID NO: 25392 - DNA, 1497 bp, Homo sapiens
atctcaacatctctcaaatcaggatatgtcttaaattcagcagtatatcattaacagcattttaaaatttcttattgatacataacagtgttttacaataggtggactattagatraaatgaaatatagtagaatatgaactaacagtttgaaaactgcagaccataggattctgagctgtattttgtggctccctggcagtttccttggggatggacccagttcacctgttaggggtttgagtaggagttcaggtatagaaagtgctctgctgctctttcaaaaagattttttaaaaacctcatctcaacaggcccttgtctgatcttgtgcgcttttctgacagtagaggaatgtagacccactctgctgctcttccccatcctgcacccaaacacaacctgtcagtggtgtatacccttccagtttctcccaggggcttacatgcacatctgtatatcttatcgatttattatctcaaatagtatcattttatatattagttcctataattttgcattatgttttttgttttacatattttacaacttctcctaggttaatacacataggtgtctgtcgttttttagtagttctaatagtgttccagcctatgtgtggcccaagtattcctctcattttgtccatggtcacacaatcttagtagggttaataaggtcacacagttaatagctgggttgcatttaggaccctagtcctctctggtccctggttggtgtttttttcccagtagtactggacttttgcctacaacttttaaagctaactattgtaaattaatcaccgtgtttccattttgcttacataaagccaaaacattccacttagaaattaaattcttttccgtctgcagtatcatcatattttcttactaccctatattcattttgctaggagtgctagttgcattccttttttttctttttctcccccacctttgagatagggtctctgtcacccaggttggaatgcggtggcgcaatctcagctcactgcaacttccgcttcccgggctcaagcgatcctctcgcttcagcctcccaagtattatagctgggactacaggcgcgttctgccacacccagctaatttttgtttttgttttttgtagagacggggtttcgccatgtcacacaggctgttcttgaactcctggactcaagtgatccgcctgcctcagcctcccaaagtgctgagattataggcatgagccaccacgccctgcctgcatttcgtttttttctaactagaatgtgctttccttgggaaaagagttttatgcatccctgaatacactttgtacaatagtaggtgcttaatacaagtttgcggttccctcctgccactttcggtccccatcctgtcctggaatggctgtcttgggaacaccatctactctgacgagacttttctcagtttgtgctcccagaggctgctgtttttccacatatctgtctccagactcctgggtgagct

SEQ ID NO: 25393 - DNA, 542 bp, Homo sapiens
cctgcacaaagtgaaatactttaggtcatatttctgaggtgtccatatctgtctgttgttgtggagcgtaggatttgctcctgtgttcrttgtggtggtttctttttgtttataaagtgataacagctagtgtttattgaccatatcttggacactgtgttgaagtcttccacttattcctcacaacagtgctgtgaggtagggattcataccgtttttctccccatttaatcttcatcccaatcctatgtggtggataccattaccacccccactttacagctaaggaaactgaggcttaaaggcagcagtatgctccaggtcacattgttgtaagtagtggatccaggatttccagctactactgctactgctgctgctgctgctgctgctgctgctgctggtgctgctgctgctgctggtgctgctgctgctaccactactactactactaccactactactactctctactgttctgtgatgaatgtttttggagagttgccctgggcagccctggcaggcaggatagagcagtagca

SEQ ID NO: 25394 - DNA, 651 bp, Homo sapiens
aatcacgccactgcactccagcctgggtgacagagtgagaccctgtctcagaaaaaagaaaggtcaaagatagtgaagacaatgggttcgagtccttggtttcttggagagcacattggcagagtcatcagggtggaggaacatatgcttgtgtctgttattacaggactgaatttttattagaattactgctccagttcgtgttgatgcagcagggctgagcaccagctaaacctgcatggacagataaagagttgatggggatttatttatttatttatttatttatttatttttaacgagaagaggaagaaaggaagaaagtaaatctcactckttcatcaggtagtgactactgatcatggttgtgctttctgcctggagctgccacgaagctccaggctaacattggactttgtccttcttaaataattgcttatctttttgctttctgtgtcatctacctcactccaccctggtacaagccagaggaaatcatcctctctctgaacccgtgtagcattttatccagggatttatgtcttcccgcctcagcttgtggctatttgttggctttacctcctctgatgaactgtatgctcctgaggacgatgaccatgccttatccttctgtgtgtccttcaaaatagc

SEQ ID NO: 25395 - DNA, 1015 bp, Homo sapiens
tggcccctccctggacacccaggcgacaatggcagaactgcccacaacagagacgcctggggacgccactttgtgcagcgggcgcttcaccatcagcacactgctgagcagtgatgagccctctccaccagctgcctatgacagcagccaccccagccacctgacccacagcagcaccttctgcatgcgcacctttggctacaacacgatcgatgtggtgcccacatatgagcactatgccaacagcacccagcctggtgagccccggaaggtccggcccacactggctgacctgcactccttcctcaaggtaagtgctgtctcagaagactggccacttccctgctgtgtgacctcgacccagctacctaacctctctgagcctcagttctgtcatctgtgccatggggatggaggagcgtcttcttcctgggttgagaggccccagtgaaatagtggagctgcagaaatctgggcacatgttggaatgtatattagccaatcactagcaacccaaagctagagtgggaggcctagagaggtaatgagcttccagtgagtagaagcatgcaagcaggttgcacacccctgaaagagacagggcaagaagggcctgggaaggttcacctcagagagagggctcgccgggtttgctgcccgggaggctggactgtgaagagtggagggctggaaggtggattgtcatgacccctgtctggcctcacttttcccatatgacaattgggctgaattgttcttttttcttttcttttcttttcttttcttttttttttttgagacggagtctggctctgtcgcccaggctggagtgcagtggtgtgatctcggctcactgcaacctctgcctcctgggttcaagtgattctcctgcctcagcctcccgagtagctgggattacaggagcgcaccaccacacccagctaatttttgtatttttagtagggatggggttttgccatrttggccaggctggtcttgaactcctgacctcaaa

SEQ ID NO: 25396 - DNA, 533 bp, Homo sapiens
gggttcaagtgagtctcctgcctcggcctcccaagtagctgggattacaggcatgcaccaccacacctggctaattttgtatttttagtagagacggggtttttccatgttggtcaggctggtttcgaactcccgacctcagctgatccacccactttggcctcccaaagtgctgggattacaggtgtgagccactgtgcctggccgatttccagtttatctgttaagttagaaaagagtgtgtgtgtggtactttcttcacagggttccagtgaggattagaggaagtaagttgtagccagagactgcatttgatgacgtatggtgaggcctgctcttacctatataaatcagattcagctctgtgtgctagacattaaacctgaagggaatattttagctggttggaccttgaattcactctgggggcttgaggtctaagtgaccatgggaaccactcttccttgggagatggagcttggagtcaggacagagccagactggaacaagaaggggagcccttggrgacaacc

SEQ ID NO: 25397 - DNA, 669 bp, Homo sapiens
ggttttttttaaattagagacagggtcttgctatgttgcccaggctggagtgcagtggctattcacaggcaccattacagcacrtactatatccttgaactcctgagttcaagaggttcacctgcctctgcttcccaagtagctgggactacaggtgtgtgcagctgtgcttggctccatgtttcccttttaaaaatgtatttcagacaaacaagaaagggtataacaaatacttagattcccacctcaaaacttaataaataaaattactaaggtccaattgataatctccgtatactcatcccaggaagacagcagctatgccaaatttggtgtttatccttcccgtacacgattttagcatgtgttttttcttctactaaataaatatgcaagcctgggcaacatagggagaccccgtctctaccaaaaaaaaaaaaaaattttttttaagtagctgggcgtggtggcgtgagcctgtagtcccagctactcctgaggctgaggtgggaggatcacttgatcccaggagttcaaggctgcagtgagtcgtgatcatgccactgcactccagcctgtctcaaaacaaaacaaaaaacaaaaaaacttaaaaatagcatcggggtttcagactctcctaagttcacccccaatacacctgcgctttgt

SEQ ID NO: 25398 - DNA, 638 bp, Homo sapiens
caagagtgatgagaacagagccctgaggaataccagcatttaggggagaaacagataagagaaagcctccaaggaaatgagaaagagcagccagggaatggtgctcaggaagcctagaaggagtcaagtctcaaaaacagtttggccagcttaggcgacagagcgagattctgtctcaaaaaaaaaaaaatacagtttggctttggtcaggggcggtggctcacgcctataatcccagcattttgggaggccgaggcagccagatcacttgaggtcaggagttcaagaccaaccttgccaacgtggtgaaaccccatctccactaaaaaatacaaatatatatatatatataaaaaatccagatgtgatggtgcacacctatagtcccagctactcgggaggctgaggcaggagaatcgcttctacctgggaggcagaggcttcagtgagctgagattgcaccactgcactccagcctgggcaacagagtgaaactccatctcaaaaaaaaaaaaaaaaaaaagctagtttggccaatgtcaaaatgcagcaaagtcatataagatgcagatygattgaatcagcccaattcccagagatgtgattttcttaatccaccatattctataaattatgca

SEQ ID NO: 25399 - DNA, 412 bp, Homo sapiens
gtctcacagtgatggccaagtcctcctgtgacctgtagtgtctcgctgccactctctcagtcccagccccttaccactgcagggtatgggaatttgcccttccctctccaagagtcaccatggcgctgctccctcattctaggtctttgctcaaatgtcagttttcttttctttcttcttttttttttgatacagggtctcactctgtcacccaggctggagtgcagtggcatgatcacggctcactgcagcctcracctcccaggttcaggtgatcctcccacctcagcctcccaagtagctgggactacaggtgtgtaccaccatgaccggctaatttttgtatttttttttttgtagaggcagggtctcgccatgttgcccaggctggtcttgaactcctgagctcaag

SEQ ID NO: 25400 - DNA, 538 bp, Homo sapiens
aactcgcagcaacccctgacgatacccatgatgttaaactggtctgcagcagcaagcagtttctccacattgtccggtgtgataggcacggtccgggtgtatgcatactcaatgattagcttcatcatgtcrggagaaatgccagggatgttgtataccttcttttcagtgttgttccagccacttgtaaacaaagctctggaaaaaagaaagaaactagcagccacggaaacatttctctcctgttaggtgagtacattggaaatggtctgagaaagtggggtgcaggcatgtgctatatacagtggacaagaagaacacctttccaagaactctgactttggtcactcttaccttgtggatggagaaattaagatctagaactgagagtaagacccaggtctcttgggccaggcgtggtggctcacgcctataatctcagcactttgggaggccgaagcgggtggatcatgaggtcaggagttcaagaccagcctggccaacgtggtgaaaccccgtctctactaaaaatacaaaa

SEQ ID NO: 25401 - DNA, 533 bp, Homo sapiens
tgagatcacgccactgcactccagcctggccacagaccaagactccatctcaaaaaaaaaaaaaaaaaaaaaacaactttaaaattcataaatcctgtattagtccctctaatttcttattgtttatcacatgagttgggatatagagagagtcagaacatggctaataaggtcatataaatagttgagttctgtaagttacttgaatcaaatactagctccatcatttgctagttgcctgacattagtcctgtcacatacttctctgtgccccaggtttttcatttgtaaagctaagataataacagtacctaccttacttatagagttaaaggactcgctatttataaaaaatattagctttctgcaccaaccragctttcataaatggcctctagctcttacttccctggagttcagtgtatttaggtgacactgggaccatgatcattagtacagtcagagagacataagagtgaagcctggaagcctgaggaggaaatgggaatgggggtttccctgaggctgtgtcc

SEQ ID NO: 25402 - DNA, 2252 bp, Homo sapiens
catttagcctctgtagttttacttctattgattgatcgatggaatctcactctgttgcccagtctgcagtgcagtggcgtgaccttggctcactgcaacctctgcctcctgggtttaagtgattctcctgcttcagcctcccaagtagctgggattacaggtgtgtgtcaccatgcccagctaatttttgtaatttttagtagagacagggtttcaccatgttggccaggttgttcttgaactcctgacctcaaacgatccacccaccttggcctcccaaagtgctgggattacaggcatgagccaccacacccagccttatttctatttattcttaatttgttgttgaaatttttagctgtgaatcaagagtatttacagtgtttatggttactgagactccaaaacaggttatactagtcttctttagtaaagacagcacactcactggaatgtatcgccccagagatgcaggaagtatattggatttgcatccattaaaatacagaaaaaaaataatggtactttggaaagtcagtttgcgtagcgaaaagactaagtcattgaaaaatgagtctgttggcaatgtcagtgtaaccttcaagacgtatataacctctcttttagagtcaggagccaagtgattagttcagagatacacagacaaaggcaagtctgcagaaaaacaatattcagctatgtatttatatggggacactgaagggactgcatatttttggtgggtgttgtaagccttgcaaataatttgccagccttacagttcttaaaggttgcctagaattatcaccgtgctatttctgctgtacttacttaaattatgggcaggagttatctctttaggtaaatactgattttttgaaatattggtgaaaacatgagctccatcttaatggttagaatacagcagtttccttatcactccatagctgtacggctgagtatttcaagtatacacaaattttcaataagtcccttttaaggaccctgccccctttatcttatttttgctcatttggtatacctcagggagagaaaaagtagtctcagagatgttcctttttgttatttatctttgcatctgagcatatgatagtgtgttattaactgagaaaacacagcgcactatctgcctgaagttagtgttggatcccacatgtttagagctcactcccacaagactgcctgagttcaggtgcccatcacaagtctggaccctcccatacttctggctaactggctataaattgggggttcctgtgaacccctcatcagtttaataatttgccagattagctcacagaactgagagaaatacttatatttagtagtacattataaaagttacaactctgcaagggcccagtggaagagatgcataggataaagtctgaagtgaggttgaggtgggtgcacggagcccccatgccctcagtgggtacaccagcctcccagcacttcctcatgttcaccaacayggaagcttatcagagcttgttgtttcagaactcaattgccagctcactgctgaagagattggtgggtagggctgaaagaaatatcagtgggtctttgtggtattcagccccatcctgagatggcctatccaggggctctataagaagtcacctcattagcataaactcacatgtgacccaaagggatcttgttatgaataacaaaagaatgtcttattactcaggaaatcccaagagtttagatgctctgtgtcagaaagtggggatgcagaccaatttcttattctatcacattaaccagaatcaagcttataaaaatgtatttttttttgtatggtcctcagtgtgcctacttgaataatttttgctgatttgattaaaaaattctgtttttccattctcttttattagctgtcccatagttttaatacagccatcatcccaagaccagaaggaagtaagtgctcatttataaaaatgattgtatcctccttttccatctattactttgtgtacattatgcatgtcaagctgttgctgggagcttactctctgcaccctctattagacagaggggtattacacgtaataatcctctattgcatgtgttctgttttactcaacggggacctcctcaacatttcttggactactgtagcccttgttgatctttcccatctgtgggcttttcttttctttttttttgatacaaagtcttgctctgttgcccaggctgcagtgcagtggcatggtctt

SEQ ID NO: 25403 - DNA, 2252 bp, Homo sapiens
catttagcctctgtagttttacttctattgattgatcgatggaatctcactctgttgcccagtctgcagtgcagtggcgtgaccttggctcactgcaacctctgcctcctgggtttaagtgattctcctgcttcagcctcccaagtagctgggattacaggtgtgtgtcaccatgcccagctaatttttgtaatttttagtagagacagggtttcaccatgttggccaggttgttcttgaactcctgacctcaaacgatccacccaccttggcctcccaaagtgctgggattacaggcatgagccaccacacccagccttatttctatttattcttaatttgttgttgaaatttttagctgtgaatcaagagtatttacagtgtttatggttactgagactccaaaacaggttatactagtcttctttagtaaagacagcacactcactggaatgtatcgccccagagatgcaggaagtatattggatttgcatccattaaaatacagaaaaaaaataatggtactttggaaagtcagtttgcgtagcgaaaagactaagtcattgaaaaatgagtctgttggcaatgtcagtgtaaccttcaagacgtatataacctctcttttagagtcaggagccaagtgattagttcagagatacacagacaaaggcaagtctgcagaaaaacaatattcagctatgtatttatatggggacactgaagggactgcatatttttggtgggtgttgtaagccttgcaaataatttgccagccttacagttcttaaaggttgcctagaattatcaccgtgctatttctgctgtacttacttaaattatgggcaggagttatctctttaggtaaatactgattttttgaaatattggtgaaaacatgagctccatcttaatggttagaatacagcagtttccttatcactccatagctgtacggctgagtatttcaagtatacacaaattttcaataagtcccttttaaggaccctgccccctttatcttatttttgctcatttggtatacctcagggagagaaaaagtagtctcagagatgttcctttttgttatttatctttgcatctgagcatatgatagtgtgttattaactgagaaaacacagcgcactatctgcctgaagttagtgttggatcccacatgtttagagctcactcccacaagactgcctgagttcaggtgcccatcacaagtctggaccctcccatacttctggctaactggctataaattgggggttcctgtgaacccctcatcagtttaataatttgccagattagctcacagaactgagagaaatacttatatttagtagtacattataaaagttacaactctgcaagggcccagtggaagagatgcataggataaagtctgaagtgaggttgaggtgggtgcacggagcccccatgccctcagtgggtacaccagcctcccagcacttcctcatgttcaccaacacggaagcttatcagagcttgttgtttcagaactcaattgccagctcactgctgaagagattggtgggtagggctgaaagaaatatcagtgggtctttgtggtattcagccccatcctgagatggcctatccaggggctctataagaagtcacctcattagcataaactcacatgtgacccaaagggatcttgttatgaataacaaaagawtgtcttattactcaggaaatcccaagagtttagatgctctgtgtcagaaagtggggatgcagaccaatttcttattctatcacattaaccagaatcaagcttataaaaatgtatttttttttgtatggtcctcagtgtgcctacttgaataatttttgctgatttgattaaaaaattctgtttttccattctcttttattagctgtcccatagttttaatacagccatcatcccaagaccagaaggaagtaagtgctcatttataaaaatgattgtatcctccttttccatctattactttgtgtacattatgcatgtcaagctgttgctgggagcttactctctgcaccctctattagacagaggggtattacacgtaataatcctctattgcatgtgttctgttttactcaacggggacctcctcaacatttcttggactactgtagcccttgttgatctttcccatctgtgggcttttcttttctttttttttgatacaaagtcttgctctgttgcccaggctgcagtgcagtggcatggtctt

SEQ ID NO: 25404 - DNA, 2252 bp, Homo sapiens
catttagcctctgtagttttacttctattgattgatcgatggaatctcactctgttgcccagtctgcagtgcagtggcgtgaccttggctcactgcaacctctgcctcctgggtttaagtgattctcctgcttcagcctcccaagtagctgggattacaggtgtgtgtcaccatgcccagctaatttttgtaatttttagtagagacagggtttcaccatgttggccaggttgttcttgaactcctgacctcaaacgatccacccaccttggcctcccaaagtgctgggattacaggcatgagccaccacacccagccttatttctatttattcttaatttgttgttgaaatttttagctgtgaatcaagagtatttacagtgtttatggttactgagactccaaaacaggttatactagtcttctttagtaaagacagcacactcactggaatgtatcgccccagagatgcaggaagtatattggatttgcatccattaaaatacagaaaaaaaataatggtactttggaaagtcagtttgcgtagcgaaaagactaagtcattgaaaaatgagtctgttggcaatgtcagtgtaaccttcaagacgtatataacctctcttttagagtcaggagccaagtgattagttcagagatacacagacaaaggcaagtctgcagaaaaacaatattcagctatgtatttatatggggacactgaagggactgcatatttttggtgggtgttgtaagccttgcaaataatttgccagccttacagttcttaaaggttgcctagaattatcaccgtgctatttctgctgtacttacttaaattatgggcaggagttatctctttaggtaaatactgattttttgaaatattggtgaaaacatgagctccatcttaatggttagaatacagcagtttccttatcactccatagctgtacggctgagtatttcaagtatacacaaattttcaataagtcccttttaaggaccctgccccctttatcttatttttgctcatttggtatacctcagggagagaaaaagtagtctcagagatgttcctttttgttatttatctttgcatctgagcatatgatagtgtgttattaactgagaaaacacagcgcactatctgcctgaagttagtgttggatcccacatgtttagagctcactcccacaagactgcctgagttcaggtgcccatcacaagtctggaccctcccatacttctggctaactggctataaattgggggttcctgtgaacccctcatcagtttaataatttgccagattagctcacagaactgagagaaatacttatatttagtagtacattataaaagttacaactctgcaagggcccagtggaagagatgcataggataaagtctgaagtgaggttgaggtgggtgcacggagcccccatgccctcagtgggtacaccagcctcccagcacttcctcatgttcaccaacacggaagcttatcagagcttgttgtttcagaactcaattgccagctcactgctgaagagattggtgggtagggctgaaagaaatatcagtgggtctttgtggtattcagccccatcctgagatggcctatccaggggctctataagaagtcacctcattagcataaactcacatgtgacccaaagggatcttgttatgaataacaaaagaakgtcttattactcaggaaatcccaagagtttagatgctctgtgtcagaaagtggggatgcagaccaatttcttattctatcacattaaccagaatcaagcttataaaaatgtatttttttttgtatggtcctcagtgtgcctacttgaataatttttgctgatttgattaaaaaattctgtttttccattctcttttattagctgtcccatagttttaatacagccatcatcccaagaccagaaggaagtaagtgctcatttataaaaatgattgtatcctccttttccatctattactttgtgtacattatgcatgtcaagctgttgctgggagcttactctctgcaccctctattagacagaggggtattacacgtaataatcctctattgcatgtgttctgttttactcaacggggacctcctcaacatttcttggactactgtagcccttgttgatctttcccatctgtgggcttttcttttctttttttttgatacaaagtcttgctctgttgcccaggctgcagtgcagtggcatggtctt

SEQ ID NO: 25405 - DNA, 2252 bp, Homo sapiens
catttagcctctgtagttttacttctattgattgatcgatggaatctcactctgttgcccagtctgcagtgcagtggcgtgaccttggctcactgcaacctctgcctcctgggtttaagtgattctcctgcttcagcctcccaagtagctgggattacaggtgtgtgtcaccatgcccagctaatttttgtaatttttagtagagacagggtttcaccatgttggccaggttgttcttgaactcctgacctcaaacgatccacccaccttggcctcccaaagtgctgggattacaggcatgagccaccacacccagccttatttctatttattcttaatttgttgttgaaatttttagctgtgaatcaagagtatttacagtgtttatggttactgagactccaaaacaggttatactagtcttctttagtaaagacagcacactcactggaatgtatcgccccagagatgcaggaagtatattggatttgcatccattaaaatacagaaaaaaaataatggtactttggaaagtcagtttgcgtagcgaaaagactaagtcattgaaaaatgagtctgttggcaatgtcagtgtaaccttcaagacgtatataacctctcttttagagtcaggagccaagtgattagttcagagatacacagacaaaggcaagtctgcagaaaaacaatattcagctatgtatttatatggggacactgaagggactgcatatttttggtgggtgttgtaagccttgcaaataatttgccagccttacagttcttaaaggttgcctagaattatcaccgtgctatttctgctgtacttacttaaattatgggcaggagttatctctttaggtaaatactgattttttgaaatattggtgaaaacatgagctccatcttaatggttagaatacagcagtttccttatcactccatagctgtacggctgagtatttcaagtatacacaaattttcaataagtcccttttaaggaccctgccccctttatcttatttttgctcatttggtatacctcagggagagaaaaagtagtctcagagatgttcctttttgttatttatctttgcatctgagcatatgatagtgtgttattaactgagaaaacacagcgcactatctgcctgaagttagtgttggatcccacatgtttagagctcactcccacaagactgcctgagttcaggtgcccatcacaagtctggaccctcccatacttctggctaactggctataaattgggggttcctgtgaacccctcatcagtttaataatttgccagattagctcacagaactgagagaaatacttatatttagtagtacattataaaagttacaactctgcaagggcccagtggaagagatgcataggataaagtctgaagtgaggttgaggtgggtgcacggagcccccatgccctcagtgggtacaccagcctcccagcacttcctcatgttcaccaacacggaagcttatcagagcttgttgtttcagaactcaattgccagctcactgctgaagagattggtgggtagggctgaaagaaatatcagtgggtctttgtggtattcagccccatcctgagatggcctatccaggggctctataagaagtcacctcattagcataaactcacatgtgacccaaagggatcttgttatgaataacaaaagaatktcttattactcaggaaatcccaagagtttagatgctctgtgtcagaaagtggggatgcagaccaatttcttattctatcacattaaccagaatcaagcttataaaaatgtatttttttttgtatggtcctcagtgtgcctacttgaataatttttgctgatttgattaaaaaattctgtttttccattctcttttattagctgtcccatagttttaatacagccatcatcccaagaccagaaggaagtaagtgctcatttataaaaatgattgtatcctccttttccatctattactttgtgtacattatgcatgtcaagctgttgctgggagcttactctctgcaccctctattagacagaggggtattacacgtaataatcctctattgcatgtgttctgttttactcaacggggacctcctcaacatttcttggactactgtagcccttgttgatctttcccatctgtgggcttttcttttctttttttttgatacaaagtcttgctctgttgcccaggctgcagtgcagtggcatggtctt

SEQ ID NO: 25406 - DNA, 2252 bp, Homo sapiens
catttagcctctgtagttttacttctattgattgatcgatggaatctcactctgttgcccagtctgcagtgcagtggcgtgaccttggctcactgcaacctctgcctcctgggtttaagtgattctcctgcttcagcctcccaagtagctgggattacaggtgtgtgtcaccatgcccagctaatttttgtaatttttagtagagacagggtttcaccatgttggccaggttgttcttgaactcctgacctcaaacgatccacccaccttggcctcccaaagtgctgggattacaggcatgagccaccacacccagccttatttctatttattcttaatttgttgttgaaatttttagctgtgaatcaagagtatttacagtgtttatggttactgagactccaaaacaggttatactagtcttctttagtaaagacagcacactcactggaatgtatcgccccagagatgcaggaagtatattggatttgcatccattaaaatacagaaaaaaaataatggtactttggaaagtcagtttgcgtagcgaaaagactaagtcattgaaaaatgagtctgttggcaatgtcagtgtaaccttcaagacgtatataacctctcttttagagtcaggagccaagtgattagttcagagatacacagacaaaggcaagtctgcagaaaaacaatattcagctatgtatttatatggggacactgaagggactgcatatttttggtgggtgttgtaagccttgcaaataatttgccagccttacagttcttaaaggttgcctagaattatcaccgtgctatttctgctgtacttacttaaattatgggcaggagttatctctttaggtaaatactgattttttgaaatattggtgaaaacatgagctccatcttaatggttagaatacagcagtttccttatcactccatagctgtacggctgagtatttcaagtatacacaaattttcaataagtcccttttaaggaccctgccccctttatcttatttttgctcatttggtatacctcagggagagaaaaagtagtctcagagatgttcctttttgttatttatctttgcatctgagcatatgatagtgtgttattaactgagaaaacacagcgcactatctgcctgaagttagtgttggatcccacatgtttagagctcactcccacaagactgcctgagttcaggtgcccatcacaagtctggaccctcccatacttctggctaactggctataaattgggggttcctgtgaacccctcatcagtttaataatttgccagattagctcacagaactgagagaaatacttatatttagtagtacattataaaagttacaactctgcaagggcccagtggaagagatgcataggataaagtctgaagtgaggttgaggtgggtgcacggagcccccatgccctcagtgggtacaccagcctcccagcacttcctcatgttcaccaacacggaagcttatcagagcttgttgtttcagaactcaattgccagctcactgctgaagagattggtgggtagggctgaaagaaatatcagtgggtctttgtggtattcagccccatcctgagatggcctatccaggggctctataagaagtcacctcattagcataaactcacatgtgacccaaagggatcttgttatgaataacaaaagaatgtcttattactcaggaaatcccaagagtttagatgctctgtgtcagraagtggggatgcagaccaatttcttattctatcacattaaccagaatcaagcttataaaaatgtatttttttttgtatggtcctcagtgtgcctacttgaataatttttgctgatttgattaaaaaattctgtttttccattctcttttattagctgtcccatagttttaatacagccatcatcccaagaccagaaggaagtaagtgctcatttataaaaatgattgtatcctccttttccatctattactttgtgtacattatgcatgtcaagctgttgctgggagcttactctctgcaccctctattagacagaggggtattacacgtaataatcctctattgcatgtgttctgttttactcaacggggacctcctcaacatttcttggactactgtagcccttgttgatctttcccatctgtgggcttttcttttctttttttttgatacaaagtcttgctctgttgcccaggctgcagtgcagtggcatggtctt

SEQ ID NO: 25407 - DNA, 565 bp, Homo sapiens
tgaaatgaccactgcattggtgtagaaaaatgatgacgctrtaagcatttgtattgttatagcaatcgcttcctaatggatctacctccccctttactccatgctccatatgatttccaaaacgattcttctaaaatgcacctcagatggtgtaacttttctgcttaaaattgcttatctcagggcgggcacagtggcccacgtctgtaatcccagcactttgggtggctgaggtgggtggatcactcgaggtcaggagttcgagaccagcctggccaacatagtgaaatcccatctctactaaaaatacaaaaattagccgggcatggtggtgcacgcctgtagtcccagctacttgggaggctgaagcaggacaatcgcttgaacctgggaggtggaggtttcggtgagccgagatcataccattgcactccagcctggtgacagagtgagactccatctccaaaaaaaaaaaaaaaaaaaaaaaaaaaaattgtttatctcctaggtcaagttgtcatttaaggctgttcttgaaatagttcgtatttaatctgccagattt

SEQ ID NO: 25408 - DNA, 958 bp, Homo sapiens
ctgagttgtgacaaattgatggtaaagacattataaagctgcaataaaggacaagattttaaaatcgtgaccgccaacaatgttgaatttcttttttgccctatcattttgaacagcagtgcaagttaagaaactttcccaccctttgttttccaaagtatagcttactgcagagaaccacccttctccatattacttaaataagattcttagatgcctccgtggtttacctatgacaagtctaaacggggacctttaaaattctctttcttgaacttataaacgattagtggaacygcttgtctctactggacaatgggtacaaaatgcttgttaatcaaactttggttaagcttctctctttcctccaggccactgaactgaagttcccctcaggctgagtcagcatatagtcccttctgaggataggctggcctcaggcaaaactatttctaatatactatcaaattatttcactttttaaatccattttactttctcacacttgattgtttctagccttaattacccctctttatacttaaaacaacaggaaacactttttacaaaacaattaagacacagatcttatggtcagagccttctcctgaatttaatagtttctttcttcagtttgtaataatccttttgaatagagtctctccttactaagtccggagctgtgttttatttgacaccaagttggaataagatcaatagtctggactagcaaaatattcatatagagagagccatcaatattttatgtaacatttttgtattttgtgtttacttttatttgaagagcttacacagagaagatatttacaagataaatatgtgaaacaagtaaaaatgtatcttagaaataaaataatacagaaagtagtttattagaataaagtacttcaaagtaaaagcataaactcttttctttacattaaaataaaaatactga

SEQ ID NO: 25409 - DNA, 1058 bp, Homo sapiens
ataaggaatattctgactttttttaaaggctttttttttttccaatttaggggaaaaaaaagcaattagccagacatcagggtcccagctactcaggaggctgaggtgggaggaaccctggagcctagaaggttgaggctaccatgagccataatcgtcccactgcactctagcctgggcgtcagagcaaaaccctgtctccaaaaaataaaaattaaaaaacaaaggattttctcatgtttctatttaacataaataaaagaataacattttgcaaaatcctaaaatataagctaataaatgagaagaggactgaaaactgaaaagaagaagaaaaaaagaccaaaccatgaaaagacagaaatctacttgctgttcaccatgcatacttcaataaaccaaaacgcaacttaaagttcttgttgaacttttcttgtgcaacctgttcccaggcaaggccaatataatggaaaaccagagagtgtgaagaatggaacataagctcctctttgcttttcaaactatggaagatgtgcaactatacaacagaagaacaaactacaaagtcttaagttagaggttttgtcaaaaatatttttttwaatcacagtctaaatgttagccattatatttaaaagaaccctaattacattccaaagaaaagtgggtatgtgcactgtcactaatgagatctcagggcatgtgaataatttcagaagcagcagccagtatcctaggatgccttttgtcatcatttgcattaagctgaaattttatcagaaggccaattaatagtcaatgtaatagctttgtggaaagagcactaaattaagtatgtcaacaccatatattcggtacctgctcctgtctggcactcatcaagaaaattacattagtgaagcttaattctcacagatgatggcagatcactggcaactcacaacaagacttggttgacaattctagttatcttcaacatgtggtaaaaatcatgacgttaaaaggagctcagtttctgcagatctttcacagggagctataaaataaatttaaaagga

SEQ ID NO: 25410 - DNA, 1026 bp, Homo sapiens
tctttgggattcagaatgcagaggggagtgtgaactgagaacccctctcttggggctgccgatgtcaggaacccagagcaccagaagttttcctttaagccttgtcttcccacagtgcttccaaggacaggacactgcaggtacagttatctgctctgtcacatctgcacagcattggtcatcttgttctcttcagatactggacacttgaaagtttgtctcaatgatctattaatgcactcaaaccacactaaattagctttgtcatctggtccaggttaggctgggcaattctgctggtttcatttaggctcacccaggcagctgaagacaccttggtgcagcatggtctaagttggccttgcctggcctggggtagctgccgttggctgagccgtacatctccagcaggctagcctgggctcctccattggatgcagccttcccagagcaagccacatgtgcaaccgcttcccaagccgctgcttacattgcatttgctgctgtcccattggctaaagcgggtcatgtgaccaagccggcggccaatgtaggagaggattacacaagaggggtgtggctcytgggcactcatggctgtaccaacctacgaccaattcccctgagcgccaggctgtttcctgcctctgcaccatcgcccaagctttccccttcgcttgttatgccctgctgggcgatctcctactcgggcaagtcacaagcttctctgtgtctcagcctcctcctctgtaaaatggggatcacatgagtttaagttattctgaggattaaacaagttaacacacaaacatttaaaacagtgtctagcacgcagtaggtcctccagagatgccagccatcaccatcacagtggtgattcttggtatgacgacccctgccctcttcaaagccccgtttaaggaatctcctctctgaagctgtctctggttctctccaggcaagcatcctcccccaggcctggccctataattatcttttcctcatccacctactccatctacagta

SEQ ID NO: 25411 - DNA, 1026 bp, Homo sapiens
tctttgggattcagaatgcagaggggagtgtgaactgagaacccctctcttggggctgccgatgtcaggaacccagagcaccagaagttttcctttaagccttgtcttcccacagtgcttccaaggacaggacactgcaggtacagttatctgctctgtcacatctgcacagcattggtcatcttgttctcttcagatactggacacttgaaagtttgtctcaatgatctattaatgcactcaaaccacactaaattagctttgtcatctggtccaggttaggctgggcaattctgctggtttcatttaggctcacccaggcagctgaagacaccttggtgcagcatggtctaagttggccttgcctggcctggggtagctgccgttggctgagccgtacatctccagcaggctagcctgggctcctccattggatgcagccttcccagagcaagccacatgtgcaaccgcttcccaagccgctgcttacattgcatttgctgctgtcccattggctaaagcgggtcatgtgaccaagccggcggccaatgtaggagaggattacacaagaggggtgtggctcctgggcactcatggctgtaccaacctacgaccaattcccctgagcgccaggctgtttcctgcctctgcaccatcgcccaagctttccccttcgcttgttatgccctgctgggcgatctcctactcgggcaagtcacaagcttctctgtgtctcagcctcctcctctgtaaaatggggatcacatgagtttaagttattctgaggattaaacaagttaacacacaaacatttaaaacagtgtctagcacrcagtaggtcctccagagatgccagccatcaccatcacagtggtgattcttggtatgacgacccctgccctcttcaaagccccgtttaaggaatctcctctctgaagctgtctctggttctctccaggcaagcatcctcccccaggcctggccctataattatcttttcctcatccacctactccatctacagta

SEQ ID NO: 25412 - DNA, 1162 bp, Homo sapiens
cagccaatccctacccagcagtgagggcgtgctcagtaaactgtagagtgtcgtgccgagggaacgccatggcgccctgccactcacctgtgcctcctaagtaccccaggaggaagctgcacaggctccccacagtgttaacacagctctcccagcacagtctctgcccctgtccaggcccctgacgcccccaggatgatttccagcagcctcttcgttggtcttcctccctctactcctgccccaacaagtcagagggaatctatcaatacctatgtcaggccacatccctcctctgctccacgtcctcccagggctcccgctccccggccaacacggcccttctgaccctgccattcagactcacttttaagagcgagggggtgccaattagtaaacacacaggtgaacgggtgtaaaggggaagtgttctgggcaggctgsgggtgcgggcgcccaagccctaccctcatcccccagactgcagcatcacttcctcctccttcagccaccctagctgctatctgggccattccctgaacaggtcgaacgcgatcctgccttaaggccttggacctaactgcttccctcagccacttgttccaaaactccctcgctcctttccttcaggtctctgctcaaaggccacatccccagggcagctgttcctggccaccctctgtaaaaaacatccctggtcactgtccttcccctgccctgagcctatttctcatcacttattgcttttatattataattgtacatgtgctatctatttaatgtctgcctgtcccactaaaatgtcagtcccaagaaggcagggtctatgtctgtcttgatcactgaacagtgcctggtacctaataggtgctcagctgacattaattgagtaaattaattatacccatttggttgatggggaaactgaggctgagacaagttcaggaatgcacctgaaatcactcagatagaaatcagccatggacctggttcctttttactgatgccaccctggggccagccacctcatgtgccgggcatggtgctggccttggcaagggccccatcatccccagcttcctcgtctgtctcatacagagggaggagactccgaggtaagctgcattcttgtccaagaatagtaatgattcactccagggtg

SEQ ID NO: 25413 - DNA, 1162 bp, Homo sapiens
cagccaatccctacccagcagtgagggcgtgctcagtaaactgtagagtgtcgtgccgagggaacgccatggcgccctgccactcacctgtgcctcctaagtaccccaggaggaagctgcacaggctccccacagtgttaacacagctctcccagcacagtctctgcccctgtccaggcccctgacgcccccaggatgatttccagcagcctcttcgttggtcttcctccctctactcctgccccaacaagtcagagggaatctatcaatacctatgtcaggccacatccctcctctgctccacgtcctcccagggctcccgctccccggccaacacggcccttctgaccctgccattcagactcacttttaagagcgagggggtgccaattagtaaacacacaggtgaacgggtgtaaaggggaagtgttctgggcaggctgcgggtgcgggcgcccaagccctaccctcatcccccagactgcagcatcacttyctcctccttcagccaccctagctgctatctgggccattccctgaacaggtcgaacgcgatcctgccttaaggccttggacctaactgcttccctcagccacttgttccaaaactccctcgctcctttccttcaggtctctgctcaaaggccacatccccagggcagctgttcctggccaccctctgtaaaaaacatccctggtcactgtccttcccctgccctgagcctatttctcatcacttattgcttttatattataattgtacatgtgctatctatttaatgtctgcctgtcccactaaaatgtcagtcccaagaaggcagggtctatgtctgtcttgatcactgaacagtgcctggtacctaataggtgctcagctgacattaattgagtaaattaattatacccatttggttgatggggaaactgaggctgagacaagttcaggaatgcacctgaaatcactcagatagaaatcagccatggacctggttcctttttactgatgccaccctggggccagccacctcatgtgccgggcatggtgctggccttggcaagggccccatcatccccagcttcctcgtctgtctcatacagagggaggagactccgaggtaagctgcattcttgtccaagaatagtaatgattcactccagggtg

SEQ ID NO: 25414 - DNA, 634 bp, Homo sapiens
catttgtgtagagaccatgcttctcacgggctgttctggtatcaggaataccacggccaatctatttcttggcaacaccgaactcctgtgatagccaactgtggttcagagactcaccagcagccgtaatgggccttccttaggctgcacaactacgtaggatgcttctacctgactttcctcccctctctccttcacctgtgggcaaacttgtttcatcgtctgccaactgccccaagatgttccatctccctctccattttttctaacacaggcctttcccctaagaaaattctcgcacacttaatcctgtctcggcatctgcttcttgggaaatctggactaatacaccaggcaggatcaggtaccatgtttgggaaagaaaaacaaactggaaaattgtcacagcttcatccctttctakttgtgtcaagctacttctaaaaacctcatttcctcatctgccaaatgaattagctggattaggtatctctaaagtctcttctagcttcgacctcttggattctgtagctcccattctgtcatttatgaccacaggttaccagcatcctaggagacagtgtctctcagcacaattggcttattctacttacggagtctcaggtgaggagtt

SEQ ID NO: 25415 - DNA, 585 bp, Homo sapiens
tgtgtgtgtgtgtgtgtgtgtgtgtgtgtgagacagagtctcgctctgtcactcaggctggagtgcagtgcacgatctcggctcactgcaacctccgcctccctggttcaagcaattcttgtgcctcagcctccagagtagctgggattacaggtgcctgccaccacrccctgctgatttttgtatttttagtagagatggggtttcaccatgttggccaggctgatgattcagacacattttttaaatgctttctctgagagtcaagatttaaagttgtggcacgaattgggatagatctatgtttttaaaagtagcccatgcctccctaccactttcgccaggaagtatgatgctgttggcactcagattctctggtgctcatgtttttcacctgccaaatgaagacagtaatgcctaccaagacaggcgatcatcagaatgaaaagtaaagcctgaaaagcatccagtctagagtctggttcatgataaatgctcaataaagtctatggttatttgtggtctccactgctagcaggtttccagagaagaagaatctgtcttcttcctttttgcatctcctcc

SEQ ID NO: 25416 - DNA, 585 bp, Homo sapiens
tgtgtgtgtgtgtgtgtgtgtgtgtgtgtgagacagagtctcgctctgtcactcaggctggagtgcagtgcacgatctcggctcactgcaacctccgcctccctggttcaagcaattcttgtgcctcagcctccagagtagctgggattacaggtgcctgccaccacgccctgctgatttttgtatttttagtagagatggggtttcaccatgttggccaggctgatgattcagacacattttttaaatgctttctctgagagtcaagatttaaagttgtggcacgaattgggatagatctatgtttttaaaagtagcccatgcctccctaccactttcgccaggaagtatgatgctgttggcactcagattctctggtgctcatgtttttcacctgccaaatgaagacagtaatgcctaccaagacaggcgatcatcagaatgaaaagtaaagcctgaaaagcatccagtctagagtctggttcatgataaatgctcaataaagtctatggttatttktggtctccactgctagcaggtttccagagaagaagaatctgtcttcttcctttttgcatctcctcc

SEQ ID NO: 25417 - DNA, 497 bp, Homo sapiens
gtctttggattcctaagaaaatcaagggaaacaacaattctttctagtgaaggaacgtaacttgctttgtaaagattcctgtattcattatggggtactcataggaaacaaatattcaatttgataccctggatgagtccttcacctacaggaaaaaccagcatgaaaatgaaatccagctgagatgayttttttccccctcagtttatcagacatttgtaaccactcccatctttttagttaaaaaaaaaaaatactgatttacatatgttttctcaattctaagctggtagaaacaaagtactttaaatttcactatatactgaaaatgaactctgatattaagagaaaatttaaatacaacattcttagaaaccactcagttgtgcttagaattctatatttaacaaagctctgtttaaagtacattttaatgaacagagtagtcatatataaatactactttcacagataaacattctggaatcaactaatct

SEQ ID NO: 25418 - DNA, 1054 bp, Homo sapiens
tgaacatccatatatcagtctgggaggaacatttccaggagttgagaagtcattggaataactagctcctcctttagttcaaattttatttttcttttggaggaagattttctgtaattactgtaaaagactagctccagggataagcaactccttcttcctgccacatgcacacactttttgttattgacaccaaggataaaaattacatggcatgtatacctattccccttcttcccaatcccatggcagacataattaattgttcattgcaccctttctgcttgggtccagacacagctgtgaattccctcccaataggcaagccacagccaatcaatctgagttgccacttgacttcacctttgtttacctctcctcaaccaatagaatgggccttggccatgttgagccttcttggtggaccacaagggaactagagttccctttcctgctttcctaagtcccatcttcccaggccccattcctaactcaggaactgcctctttccatgatggacttcaggaattaccaaaccaatcaggtgagaccttggcccctacacaggtgtgtggcctaaccacagcctgaaagctgctgtatctgcccttccttatagcatccttacccaccccctgccttaaggatgttaccgttaacattctgatcttccaaggagggtgtcagagttgtgacacgatgatagaatatgaaatatgatagtaaataaaatcaagtgtctaagttatgaaatataaactgcagttctttttctttttgcagcactataaatrccatgctattttgttcaagataaaaaccagaaacaaatgtaatccaattactggatgcagcgggggtatcactctgcttggggaagtaaaatactcagcaatatccaatgctaatatggtggaaatccactaaccctcctaatatctccaggaatctgtcagctttagcttcctctgaatcttgaactcaatgccctgtctccctacccctgcttctgctctgccaacttaggttgggaactgggtccatttttcttgga

SEQ ID NO: 25419 - DNA, 2075 bp, Homo sapiens
tctgcagagctaggggctaggagctgcgaggattcaacacatcttttctcctctcctggatgtcttgccaggaccacttccacaggctcttcccatgcaggggcgcaggggcctctccaaggagcagttgtcctgcaggagtagagggacctctccagggtcctccacaacaagccccagagggaaactaagtctccttttgcacctggcagggctttggcccctgcctgctccccacaggcctgtagctgtgcatctcagacgaggrccctgtgcttgcattggggtcgggagaggagagcgctggagtcagagaaatcccttcctgcttccatctttcctttggcttggcgcaccaaagcacacgcccctctgagggcatttacggtcattcatattcatgacttgctggcccaaattctggctctacttagaataaatatgaagccatttttcagaataaagtttttatttcctagttgtaaggttaaaatggccattaaatgattagtgtgactgaagacatgaagtaacattcatttgaaaatcgagttctttgaatgtgtgcaatccatttcattaccatgtatcttctgtggctagttttggcttttcttttctgagctttcctggggtggcacgggatcaaaagagcatggtggagtgaaatgtctacattttatgcagggactacatgaccaaatcccaagatccattaatggaaaaatggatatgcatatacctcttgtgccctattatgaaaatgggccttatcttacctgattaaattgtcagctcttattaaaatggatccatgtagctaaagaaattcaagcttggtggaacttgcagagaagtgtagctaaattgttacctcagtgacatctgtgtttcttatcagaatctcagcctttctgaccctttggatgtggagagatgtggtaaaaacaaattgtctcactctatggctcctgagggggaaagaatccccaaattaactttgctgggggtctggcgagaggggaagagaccacgtccacatttgcatttctgtgtcttacagattatctttcctgccttgaatagcagagctgagcttctccctgaaggctgaggactttttgctaaagcaatttctctctaccttttaaaaaagtgcatatatatggtgtattttttttctttcaactgaggatcaagtctgagaaagaaaatgaggaatcaagatagccaaacaattcaggcaaaataaattacctgcaggcatttttttggtgatggttgttgctttgtgagggcttctgggtgatgcccaggtgatgctggtttcccctgggctcagttttactcagggactgagaatgagtccggcagaagaccaggacagactgctacccgagcaaggccgagaggtcagatggcttctccgaatctgtgtttctggatggagcccagccttgatgcgggaatcatcctgtcaaggtgggtggaagggaagcctcagggcaggaactgcatgcaggaaaagccacactttgggttcagtgaacacaaccatcccttccgctcaagcttgtcccacctaatttcaactccaggcttcgagctcagccacttttgacgagcttgagtacctctttgcaacctttgagtcgaaggggagggcctctggatttgcggtgaagcaatctcctgtcaagctggccttgatgggctcctccctctgcatatggctcgtcttgtcacgcagcagatgcttcccccattctaatgtttgtattgattcaaccacaccactgtgaggccttttcggcctgggaggtatataagaaccctttcatagacagaggttccctatcacctaagaactgagggccaggagctgttttcagcaccttatatgaattatcacacttcgccttcacatcaacctgggaggcaggcacaactcttagggcccttttacagttaaggaaactgaggcacagagggcttcagcagctcacctaagttcacacagctagcaatcagggcagccaggggtgaaactcaggtatattgttttatccacaaca

SEQ ID NO: 25420 - DNA, 579 bp, Homo sapiens
gaagagctgactctaattgctgacctcatcccacccactggtgcaacttcgccaggactaaggaaaaagcacagtccatgtaactctaggcagaagggatctttgggtttctagatctgccatctatatcagatcctgccttcctggaaaaacatgttcttagatacagatttgtttggtctgacaaactcctccagggaaaggatgcaggcgtttctgacagttgcacgtgaggatgtttcccgctagacaggtaggagaaagtgtctgtgctgccaacctctttcctttacatcagcacaaagactgatacctggtcctcttttcctaaacttcccatgtggcatttgaggggccccttgggaacacataagacctgcattttggcccctctcacaggttcaaaagcaatctgagctattctggtgttcacagctagtagtagtagcagtagcagcagtagttgtagtagtgttggtttactaagccttctttcctcattgtcaacgggctaggaaagtcctagtgacaaggaagsccactgagtggccaaatccaagtgttcattttattctttga

SEQ ID NO: 25421 - DNA, 1504 bp, Homo sapiens
  misc_feature (1)...(1504): n = A,T,C or G
acaggccctgccttcccccacaccctgtaggctgcgcagctcccccagcaagacatggagctgtcttcccacccctggaattgctggtcatgtgctgtgcctcagccagcagaggtgacagggtgaccttggcctggttccccctgagctcactggctttttttttttgctttaagttctgggatacatgtgcagaacgtgcaggtttgttacatagctatacatgtgccatggtggtttgctgcacctgtcaacccgtcacctaggttttaagcccggcatactttaggtatttgtcctaatgctctccctctcctttcccccaaggtgagcaggtccctggcacagccacacccaaaccaaaggtgcccttggaaaggtcactgtcttcattgctcaggctggtttgagtcaggttcctgtcacttggaacaaatcccactggatttccntgcctccaaccacacctctgcctcnngtcccgtgccctgagacccnnnnnnnnnnnnnnnnnnnnnnnnnnnnnnnnnnnnnnnnnnnnnnnnnnnnnnnnnnnnnnnnnnnnnnnnnnnnnnnnnnnnnnnnnnnnnnnnnnnnncgtaatccagtactccccatgacctggtcctaatctgcatctccaccaccatygcccatcattcactagataagcacatgcctactattgcaggcactcagatcgtgaacacatattggatgaagcagcaaagagccctgcccccggggggaagacagacaccaaatggggaacacaataaataagtaaattgtatagtatgtgagaagattgtaagtgctttgacggaaaggaagggagggagggagggagggagggagggagggaaaaaaataagagaaagaaagaaaatgtcccctttccaaaaacaagaacgctggcttccaacagcactggtggaatcttgtatttgctcaaccctacaagacagaaaatcattacagaattgctaccttgcaccacagtgaaagcaaacccacaagtcaagttcaatatttgtttgcaggtattttgtctgcaggacaagggttataggtcaaggttccgtgttcaatgttacttgggttagtttctgttgtggtggtggggttggtttgttggtttggtttcttgccttgttttgatttggtttggttttggcgtggtcatgttactatctgaaatacagttagctcatatttcccacatgctgtgataaatgttgttaataagtcagcctctgtggaccagctggattgtgtgttctccctgctaacccagagcacactgaaggcaggtgcttattatcctattcatctttatgtctttaacgccaatcacaatttctgtcatagagtaggtgcacaggaaatatttgttaaattcaaccactgaacctaaagggtttctggaaaacttttttgcaaaatccatgtaaatgccataataaataatttgcctatatattcatagactagcatccaaacc

SEQ ID NO: 25422 - DNA, 1120 bp, Homo sapiens
ttccacaagcaccagttaagtgcatggatttctctcccagggatttccttcttcccagaccttggggccttcatctccagcctctcagaaggaataaattctcagaaatacaggatccacacacatagcctgccagaagcctgtgccactgcgtaagtgtgagtgactacggaagacaaggtggactccaaacccgacgctatgatccactcgagcctcgtccagggaatttatggagcacgtgggacctccctgccatccagaagcacagaggaggtgcgtccccacaacaatgccaggaacacacagcggggaattctctgacatcgagaggcttccagtgaggggcactggctgccctggaggtgacagagactccacatcagctacctgctgagatggtgctgggagcctcgtggagcagagcagccgatccgatccagggtacctgctacaggcctggcaccacctggtaggtcattgcgggaggacttgttcaggctctgatgaccctgtcagacagagagacagagagtccgagagaaacagagacacagagaaacagagaagcagagacagagacagaccaacggagggagagaaaaatacagagagagacagagatagagagaagcagagacagaccgagagaaaaaaatacagagagacagggacagagacagaatcagagtgagacagagagaacaagggaaagacccggagagagaaatgcagagaaagaaagagacagagacagagagagatacaaagagacagagacagaaatagagagacacgcgtgtctcccaggccgccgtcccgcccagttctaggcctggctgcagtcctgcccccggtgcccagagagcccttctcccatcacgggccatctccactgagccatgtgctaagcatcagctcctgggagccacggtgtcccctcacacctgcagtgaggactgagaaagctgcagatgggaggcgaggcagcgacacagccggctggcacyaggcatggggtgacaaggtgcatggcgcggccaggacagccttgtgcaggggacagcggaagctcaggagacaaggtcagaggtggtggggccccgccacggagggcacc

SEQ ID NO: 25423 - DNA, 1391 bp, Homo sapiens
ttccaccttgctcaatgcgtgtgtttggcaagctttcccatgacaatgcctggggtggacgtccactcatctgcctcctatgcccccttccttcccttcaggacagcccctggtttcccgtggggaatcacccgcctcgtctcagtccagggctcttgtggtgccgcccactctcctcatcaccagtgagcagtgacctcacctcacccagggggttccacccctgggccctgggactggtcatggatgagcatgtcaccccagccaggccaaygacaccatccccaggacagttttaaacatgtatcacaaaaatgttcttcacttttctcattgagttttctactaggagctctctttgccactgagagcatgagaatgaagccagcccagaggaaagtgtttgactattagaaaccggttgtttgactatgagaaaccggttgtttgactatgagaaaccggttgtttgactatgagaaaccggttgtttgactatgagaaaccggttgtttggctatgagaaaccgtttgtttgactatgagaaaccggttgtttgactatgagaaaccggttgtttggctatgagaaaccgtttgtttgactatgagaaaccggttgtttgactatgagaaaccagttgtttgactatgagaaaccggttgtttgactatgagaaaccggttgtttgactatgagaaaccggttgtttgactatgagaaaccagttgtttgactatgagaaaccggttgtttgactatgagaaaccggttgtttgactatgagaaaccggttgtttgactatgagaaaccggttgtttggctatgagaaaccgtttgtttgactatgagaaaccggttgtttggctatgagaaaccgtttgtttgactatgagaaaccggttgtttgactatgagaaaccagttgtttgactatgagaaaccggttgtttggctatgagaaaccggttgtttggctatgagaagccggttgtttgactatgagaaaccggttgtttgactattagaaaccggttgtttgactatgagaagccggttgtttgactatgagaaaccactcatttaatttgcacacctttaaaaaaaaaaaaagtaactttacggtggagaaatctggcaacctcagccaagcaatcaaggggtgaggaaatggcactgtttctgtagtcttcttcccccaaacccacagccctagtccaatcatgagaaaaatatccgacagtctcaatcgagggatacgctacgaaatgctcgaccagccctcctcaaaactgtccaggtcatcaaaacaaggaaacaaagggaactgccacagccaccaggagctaaggaggcctgacaagtaaaggtgacgtggaatcctgcata

SEQ ID NO: 25424 - DNA, 1391 bp, Homo sapiens
ttccaccttgctcaatgcgtgtgtttggcaagctttcccatgacaatgcctggggtggacgtccactcatctgcctcctatgcccccttccttcccttcaggacagcccctggtttcccgtggggaatcacccgcctcgtctcagtccagggctcttgtggtgccgcccactctcctcatcaccagtgagcagtgacctcacctcacccagggggttccacccctgggccctgggactggtcatggatgagcatgtcaccccagccaggccaacgacaccatccccaggacagttttaaacatgtatcacaaaaatgttcttcacttttctcattgagttttctactaggagctctctttgccactgagagcatgagaatgaagccagcccagaggaaagtgtttgactattagaaaccggttgtttgactatgagaaaccggttgtttgactatgagaaaccggttgtttgactatgagaaaccggttgtttgactatgagaaaccggttgtttggctatgagaaaccgtttgtttgactatgagaaaccggttgtttgactatgagaaaccggttgtttggctatgagaaaccgtttgtttgactatgagaaaccggttgtttgactatgagaaaccagttgtttgactatgagaaaccggttgtttgactatgagaaaccggttgtttgactatgagaaaccggttgtttgactatgagaaaccagttgtttgactatgagaaaccggttgtttgactatgagaaaccggttgtttgactatgagaaaccggttgtttgactatgagaaaccggttgtttggctatgagaaaccgtttgtttgactatgagaaaccggttgtttggctatgagaaaccgtttgtttgactatgagaaaccggttgtttgactatgagaaaccagttgtttgactatgagaaaccggttgtttggctatgagaaaccggttgtttggctatgagaagccggttgtttgactatgagaaaccggttgtttgactattagaaaccggttgtttgactatgagaagccggttgtttgactatgagaaaccactcatttaatttgcacacctttaaaaaaaaaaaaagtaactttacggtggagaaayctggcaacctcagccaagcaatcaaggggtgaggaaatggcactgtttctgtagtcttcttcccccaaacccacagccctagtccaatcatgagaaaaatatccgacagtctcaatcgagggatacgctacgaaatgctcgaccagccctcctcaaaactgtccaggtcatcaaaacaaggaaacaaagggaactgccacagccaccaggagctaaggaggcctgacaagtaaaggtgacgtggaatcctgcata

SEQ ID NO: 25425 - DNA, 1391 bp, Homo sapiens
ttccaccttgctcaatgcgtgtgtttggcaagctttcccatgacaatgcctggggtggacgtccactcatctgcctcctatgcccccttccttcccttcaggacagcccctggtttcccgtggggaatcacccgcctcgtctcagtccagggctcttgtggtgccgcccactctcctcatcaccagtgagcagtgacctcacctcacccagggggttccacccctgggccctgggactggtcatggatgagcatgtcaccccagccaggccaacgacaccatccccaggacagttttaaacatgtatcacaaaaatgttcttcacttttctcattgagttttctactaggagctctctttgccactgagagcatgagaatgaagccagcccagaggaaagtgtttgactattagaaaccggttgtttgactatgagaaaccggttgtttgactatgagaaaccggttgtttgactatgagaaaccggttgtttgactatgagaaaccggttgtttggctatgagaaaccgtttgtttgactatgagaaaccggttgtttgactatgagaaaccggttgtttggctatgagaaaccgtttgtttgactatgagaaaccggttgtttgactatgagaaaccagttgtttgactatgagaaaccggttgtttgactatgagaaaccggttgtttgactatgagaaaccggttgtttgactatgagaaaccagttgtttgactatgagaaaccggttgtttgactatgagaaaccggttgtttgactatgagaaaccggttgtttgactatgagaaaccggttgtttggctatgagaaaccgtttgtttgactatgagaaaccggttgtttggctatgagaaaccgtttgtttgactatgagaaaccggttgtttgactatgagaaaccagttgtttgactatgagaaaccggttgtttggctatgagaaaccggttgtttggctatgagaagccggttgtttgactatgagaaaccggttgtttgactattagaaaccggttgtttgactatgagaagccggttgtttgactatgagaaaccactcatttaatttgcacacctttaaaaaaaaaaaaagtaactttacggtggagaaatctggcaacctcagccaagcaatcaaggggtgaggaaatggcactgtttctgtagtcttcttcccccaaacccacagccctagtccaatcatgagaaaaatatccgacagtctcaatcgagggatacgctacgaaatgytcgaccagccctcctcaaaactgtccaggtcatcaaaacaaggaaacaaagggaactgccacagccaccaggagctaaggaggcctgacaagtaaaggtgacgtggaatcctgcata

SEQ ID NO: 25426 - DNA, 1391 bp, Homo sapiens
ttccaccttgctcaatgcgtgtgtttggcaagctttcccatgacaatgcctggggtggacgtccactcatctgcctcctatgcccccttccttcccttcaggacagcccctggtttcccgtggggaatcacccgcctcgtctcagtccagggctcttgtggtgccgcccactctcctcatcaccagtgagcagtgacctcacctcacccagggggttccacccctgggccctgggactggtcatggatgagcatgtcaccccagccaggccaacgacaccatccccaggacagttttaaacatgtatcacaaaaatgttcttcacttttctcattgagttttctactaggagctctctttgccactgagagcatgagaatgaagccagcccagaggaaagtgtttgactattagaaaccggttgtttgactatgagaaaccggttgtttgactatgagaaaccggttgtttgactatgagaaaccggttgtttgactatgagaaaccggttgtttggctatgagaaaccgtttgtttgactatgagaaaccggttgtttgactatgagaaaccggttgtttggctatgagaaaccgtttgtttgactatgagaaaccggttgtttgactatgagaaaccagttgtttgactatgagaaaccggttgtttgactatgagaaaccggttgtttgactatgagaaaccggttgtttgactatgagaaaccagttgtttgactatgagaaaccggttgtttgactatgagaaaccggttgtttgactatgagaaaccggttgtttgactatgagaaaccggttgtttggctatgagaaaccgtttgtttgactatgagaaaccggttgtttggctatgagaaaccgtttgtttgactatgagaaaccggttgtttgactatgagaaaccagttgtttgactatgagaaaccggttgtttggctatgagaaaccggttgtttggctatgagaagccggttgtttgactatgagaaaccggttgtttgactattagaaaccggttgtttgactatgagaagccggttgtttgactatgagaaaccactcatttaatttgcacacctttaaaaaaaaaaaaagtaactttacggtggagaaatctggcaacctcagccaagcaatcaaggggtgaggaaatggcactgtttctgtagtcttcttcccccaaacccacagccctagtccaatcatgagaaaaatatccgacagtctcaatcgagggatacgctacgaaatgctcgaccagccctcctcaaaactgtccaggtcatcaaaacmaggaaacaaagggaactgccacagccaccaggagctaaggaggcctgacaagtaaaggtgacgtggaatcctgcata

SEQ ID NO: 25427 - DNA, 781 bp, Homo sapiens
gtgtttctggaatatggcttaagagttggagaagaaaaatagctataaatgacttgaatcaaatatctgaaatggactggtggtgatggtgaggggcagcaatgtgtaatttagggaagtgctgaccacaacataaaattgggaggaatctaaggcattggccaaatttataaatactacaatagaaatgcagatgctaagctgttggctaatcttactagttaagtgactaacttctgatgccatctggcagagtgattcaaatttgtgctagacacaaaatatatgtctttttccctctatttgcctgcatgyattaataaaaacactgttgcagtagacacataccaattttacaaggaaatgtttaggggtgaggtgggactgttaaatacttacatcaggtcaaaggtcactctgctgtttccagaggactgtcaggtagccaggaggcccagggccacttttgggcctgcttacaaaaccctaaattttccgcagttgaatgccaagagtcttttgcagttattttagagcaggggaaaaaatacaatgtgttgccaaataagcttaatttggtaggcaagcagtaaaaataacccaacagccaacatttagagaatgcgtactctcttaaatgctttatgtatattatttaatccttaaaacactgtgggatcagtactttaattatccctattttcagatgagaaaacagtttgaaaggttaactaaatttacccaaagtcatgcaactgctaagtagtgagcaagccgcctg

SEQ ID NO: 25428 - DNA, 633 bp, Homo sapiens
cttgatgatccccattgaatctgtgaagcaggcattgctgttaccactctttagatgagaagggggttcacggaggagggtgagattgagcagaattttagagaagtagaattcacagtggtggtcagaaggcatttcctgtggggagctgtgaacagcatcrgcaacgagttggcactgagagtgtctgggacaatcagaccagcctggctagacagaggggccccgtttggggagtgatgggagaggaggttaggcaggtggtagttgagttggatgagtaagacctcatggagctggcttaggaacttggactttatccttttggcctagagatttttgggaggtatttgggtgggtactgacaaaatataaggttacatgcagccatcaaatggttccacggtgtaatacctcaactgaaacattattttcaccattgaattaatttttattaggttcctgtcagggtctgggtagtttgtagaggcagtagtaagcactctagagtttactgtaccttggagttccagtccagttttcccagaaaactgacctggtggcccctctaccccttcacacccctccaacacatgcacagctgtgcctgcacacacacccacatgtaccaca

SEQ ID NO: 25429 - DNA, 633 bp, Homo sapiens
cttgatgatccccattgaatctgtgaagcaggcattgctgttaccactctttagatgagaagggggttcacggaggagggtgagattgagcagaattttagagaagtagaattcacagtggtggtcagaaggcatttcctgtggggagctgtgaacagcatcagcaacgagttggcactgagagtgtctgggacaatcagaccagcctggctagacagaggggccccgtttggggagtgatgggagaggaggttaggcaggtggtagttgagttggatgagtaagacctcatggagctggcttaggaacttggactttatccttttggcctagagatttttgggaggtatttgggtgggtactgacaaaatataaggttacatgcagccatcaaatggttccacggtgtaatacctcaactgaaacattattttcaccattgaattaatttttattaggttcctgtcagggtctgggtagtttgtagaggcagtagtaagyactctagagtttactgtaccttggagttccagtccagttttcccagaaaactgacctggtggcccctctaccccttcacacccctccaacacatgcacagctgtgcctgcacacacacccacatgtaccaca

SEQ ID NO: 25430 - DNA, 1347 bp, Homo sapiens
ttgtagactaaagttcttgttttaatagtgagctctgtgcttccagtgtctatatgtaaactacaagcctgcctaaggcaagtggcaaccttgcatataaagggcaatcacccatttatactcctggaagatccatcttgtgagaacatattctacattctcaccactctggagagactttttttcttgtaaaatttgagaatacatttttacagcctagagtcaagtcttcctgtgaagacggtgactttttaagaaacacatcagcagtctgttgcttgtctcctgtcagtgctgacccttcttgggtttaggatgaccattttccgagaatagaaaatttgggctaaataagaaatactctttaaaattgctttattgctatgttggtttttctttgtaattatggttgagttattccataaaatttgctgctacaatagtcttataatggcaatacagtccaaccaatttgtttttcactggagtagatggtaaatgggccacggaatataaacttgttttgctggagatgctggttaggttttccagaagctgttggttgggttttccataagaattggactagaagcaaggctgaatttgaggtatcctagaaatagcatgagaaaaatgccttttaagccatatttccatcttaaataatgagcagaaccgtgcgttgaaagggaatcgtttgtgttggactcaagcagtgaaggagggaaaaagaaaaagaagaaaacatggaaagaccagaacaaaagtaggcagagtgcctggaaataaatatgaatatacatataattttaaaatgttaaaactatagacttgaagaaatagaactctcaaactctgaagacaggagtcaactggcataattttgctttgcaaagtgatattgcagaaagtgtggatccatcagtatttaatttgaatcagaattatagtatattagaaatttggatctgtctatttttgtaaaggcttttattccattcatagacaatattttatatattgaaacttaaaatttgtttagtttgtcacaaataatattttaattttacctgcatattcatatcttcctctattctaatttccctctgtccttattaaaagtgagagaataggcttaataaagtatctagctcaggtaggtcctgaataaatgttaattcactttcattctccaaatttmttttgcttcaacctctgacattcaagttcatagttataaagagagcttagtaataattgaacatatgacacagggccaagtgccgctgtgtctaaaacaagtaataaaaattttacccacaccctctctgaaatttatattctatt

SEQ ID NO: 25431 - DNA, 1058 bp, Homo sapiens
ttacctatgctagaaaagatttattatttcattctgtaatttggataataagattaagaatgcatgatttttttcaaggtttgacatggataagtttcttaactcataagcaaatgccttttttatttacttatttattttttagcagcagtgtctcactctgtcacccagattggaatgcagtggtgcaatcatagctcactgcagctccaaactcttgggctcaagcgatcctcccacctcagccccccagtggctgggaccacaggtgcatactatcatgcctaatttttaaaaaattgtctgtaaagacgggtctctctatgttgcccaggctgtcttgaactcttggcctgaagtgatactcctgcctcaacctcccaaagcactgkcattcgaagtatgagctgccacacccggcttgaatgccttttttaaaatcatgagcctcagcatcatccttactcacatttattaacactgtttgcaaagcattcctgctgatactgccttatttgagccatattcacttgtttactccacaattctttttaatctttacaatgtgactaattagtaagatgactaagagagtgttccctactcccgttgccatcacaggccagtgatggagataaaagtaaacaagtgattccagcatgctagacacaactctacaatggaattcgggagcccaaactattatggaagcatataaaagttggactcaaaccagaatgaggtgagaaggacaccttggtcaatttttgtattattataaagaagtaactgagtctgggcaattcaaaaagaaaagaggtctatttggctcacagctctgcaggctgtataaggagtatggcaccagcatctgcttctggtgagggcttcaggaagattccactcatggcggagggggaagcagagctggcatgtgagaggaggaagcaagagagggaggaagagatgccaggtttttttcaacaaccagttctcatgggaactaagtgagaattcagttactcctgcaagaatggcaccaagccattcattaggga

SEQ ID NO: 25432 - DNA, 1708 bp, Homo sapiens
ccattccacttccacttcctcatctttgaaaggaaggcattggatggcatgttcacttccagctctaaaatgctgttcctctaatttacatgcaaaatagcatgtagacagcctttagggccatctgaatgtaaataccacatctacctttttgaagccatggggcctagctaaaactcaatttactcatctataaaatgagaataataataatatctaccccttagggttattgagaatattaaataagagaataaatgttaaagcctttagcatatcatttagctttggctatgtgactagtacatagtaagtgttcaagaaattttcctttatcactatcatcatcatcatcatcaccctgtgtgtaggtgctacttgcgaaggtgctccaattttaattccctgcagatgcaataaagagttggcaaattcccagctgggcgcggtggctcacrcctgtaatcccagcactttggaaggccaaggcgggcggatcacgaggtcaggagatcgagaccatccaggctaacacggtgaaaccctgtctctactaaaaatacaaaaaaaaaaaaattagccaggcctgttggcgggggcctgtagtcccagctactcgggaggttgaggcagaagaatggcgtgaacccgggaggcggagcttgcagtgagcggagattgcgccactgcactccagcctgggtgacagagcaagactctgtctcaaaaaaaaaaaaaaaaaaaaaaaaaaagagtcggcaaattctcagagttggccaatttggaaccaagtatactatgactaccttcttttaatgttaaaaaatgttatttagcttgctcttgtaaaactgacatttcagagactttgggtaaagtgatcattcaaaatcaattcccttgaattacccctacatgtttctgcagcatggtctatagaagaagaaagaattcatcatcatttctaggaatatccccaatcataatcctaagactccagctcaaaacaataactggcaactcttcaataattaattaaaggaaggcacaccctcttttcagctttttgggaaattatactatgctatcccactatccaatttcatgttatctatcatttagaggtagcacagtattgtaaaaaaaaggcattgaactggaaattgagtatggaaactcagattctaattccagatttgctactaagtagctctatgactttgggcaactcatttgccctttctgtgtccattttccaccagcaaaatgtggggcctgtactagacaggatttatgggcccttctaaatccaagcttttgtggttgactcctaataaattatttcattgttcttatgacagagtgtaatctctttacctctttcctcccgctcagggtgtacccaaatgcctgaattcatacccagaattaagggcttcagttcagctcccagaaccttgcttatatagaaactataggtcattaacaaaagaggtctcctgctactgttgggaggacaatgtcagggccattggagattgaaacctccatcctgaagagtctgtaaggatggatagaatttcaacacctaatgtctccagacataaaactgctgaagacataaaaaaattatttaaacaaaagaatgtggctctaatatgttgaaattgccatggcaactcacaccagggtcataatatcagtggaa

SEQ ID NO: 25433 - DNA, 1049 bp, Homo sapiens
aggtcccacttaaagaagcagcctggccatgatctggcaaagcagctgtgctcgttgtgggggacccttccttgtcaggaccatttggactctccaaagccagcaggctggaacagctgagtcaaccaaaccacasagatggcggctgcccctccctctgggagctccatcccagggaaagatcagagctctatccatataaccctggctggagtggttgaagctcccacagggagatcccacccagtgaggaggaatggatccgggtcctgcttaaagaagcagtctggccgggtgtggtggcttacgcctgtaatcccagcactttggaaagccgaggcaagtggattgcttgagttcaggagtttcagaccagcctgggcaacagggtgaaactcccatatctaccaaacacacacacacacaaacacacacacacacgagctggacgtggtgatgtgtgcctgtagtcccagctactccactcacttggtcctattgtttgaccccatcccttctcccgtgcaccctttgatttcttatttctgggatctggtgtggagagcccctcatcctgggaaacagggtgcgggaggctgaggtgggaggattacttgagctcaggaggcagaggttgcagtaagccgagattgcgccattgcactccagcctgggtgacaaagtgagactatctccaaaaacaaaacaaaacaaagacaaaacaagcagtctggccaccaactgacaaagcagctgtgcttgcgttgggagggacctttccttgtctggactgtttcgattctccaaagccgcaagctagaatggctgagtcaactgaaccacagaggtaacagtcatcctcccgctgggagctcaattctctctcaggcagactctggcttttactgttggctggctggaattccaagtcagtgggtcttatcttgtgaggtgccagggaagtggggcctgcagaaagatgctgcttggctccctggtttcagccctcttcctaggggtatgtgcagatggacctcccgccttgccag

SEQ ID NO: 25434 - DNA, 1049 bp, Homo sapiens
aggtcccacttaaagaagcagcctggccatgatctggcaaagcagctgtgctcgttgtgggggacccttccttgtcaggaccatttggactctccaaagccagcaggctggaacagctgagtcaaccaaaccacacagatggcggctgcccctccctctgggagctccatcccagggaaagatcagagctctatccatataaccctggctggagtggttgaagctcccacagggagatcccacccagtgaggaggaatggatcygggtcctgcttaaagaagcagtctggccgggtgtggtggcttacgcctgtaatcccagcactttggaaagccgaggcaagtggattgcttgagttcaggagtttcagaccagcctgggcaacagggtgaaactcccatatctaccaaacacacacacacacaaacacacacacacacgagctggacgtggtgatgtgtgcctgtagtcccagctactccactcacttggtcctattgtttgaccccatcccttctcccgtgcaccctttgatttcttatttctgggatctggtgtggagagcccctcatcctgggaaacagggtgcgggaggctgaggtgggaggattacttgagctcaggaggcagaggttgcagtaagccgagattgcgccattgcactccagcctgggtgacaaagtgagactatctccaaaaacaaaacaaaacaaagacaaaacaagcagtctggccaccaactgacaaagcagctgtgcttgcgttgggagggacctttccttgtctggactgtttcgattctccaaagccgcaagctagaatggctgagtcaactgaaccacagaggtaacagtcatcctcccgctgggagctcaattctctctcaggcagactctggcttttactgttggctggctggaattccaagtcagtgggtcttatcttgtgaggtgccagggaagtggggcctgcagaaagatgctgcttggctccctggtttcagccctcttcctaggggtatgtgcagatggacctcccgccttgccag

SEQ ID NO: 25435 - DNA, 1871 bp, Homo sapiens
caaatctacggaaacttttggtgttgtgcttaaataatgattctccttgtccatggcgctgctcagggaaattaatagtttctggtaatagtccagaatttcactggctaggtgtcctccaaatcgcctatattaataaaaaagaaaacacagaggctayaaaaatcataatttaaaaaatcacatttagctctattattttcaggtaactaaccatttcagtttataggtaactaaccaaggaaatatgtggacaattcttcacagtgccttgtggaaacttcttcagtgcctacttcttttgcagaatttcttcttttttttttaatttttattttttaaagagaaagggtcttgctctgtcacctaggctggagtacagtgatgtaatcacagcttactgcagcctcgaactcctgggctcaaatgatcctttcacctcagcctctagagtagctgggactacaggggtacaccaccatgcatggctaaaggactctgcttcttacaggagaccctttcatgggttccaggccatgacaagcttcttgacctttctagggtaccctctcctcacactgtcctcatacccttactcaacatgccctctgtacctgccctggtcattgcacagaagagccagtgcactggctgagctctcggaatgcaccaggcagtgtgctacttcacacacataatcacatgtggccccctcatcaccccaccctgcattgagagtggtattattacttccacttaattcaccagggcattgcaaactttggacgcatcagcatcactgggagggtttaaaaacagattcctgggccccacttgcagacattctgactcagaaagtccagatgggatccaagaatatgcatttctaacaagctcacagatgctacagaccccctaccttaagtaacattgtaacagatgatttagaggggttgtcatttgccaaggtcacaaagtcaaaagtcctagaccatcgttttttttttttttttgagacggagtctcgctctgtcgcccaggccggactgcggactgcagtggtgcaatctcggctcactgcaagctccgcttcccgggttcacgccattctcctgcctcagcctcccgagtagctgggactacaggcgcccgccaccgcgcccggctaattttttgtatttttagtagagacggggtttcaccttgttagccaggatggtctcgatctcctgacctcatgatccacccgcctcagcctcccaaagtgctgggattacaggcgtgagccactgcgcctggcctagaccatcgttttaaacccagctttgttttgagtcagaagtttgggtgattaccaatggatcaaaatgtccttctttttgagctgcataaataaggctccagcacttgtttgttgttgcctgagatagtatttgttcgctggttataaacaatatgttaggacttacatagtgagataaaagctaatattctattcagaatcccatgtataaaatgggcatgatgatgcaatcctgaaatgagtttttgaggtaagtggctagcaaaattgttatgatacaaaatctccacaacatttaacattttcacaatgttgcagagaagggccgtattttattactgctttgatcacaggaggtatcacgaaatattattttttctaaaatgaattgcatgattgaaaccacctttgcaaagattacggcagtgaaagaagtctagcatggctgactccatcttgtttctagtctcacaggctggatgttcttgttcattcctcctaaccatgggaggaatttcgtttatagtttaacttggaagcaaggatgataatagtacctccctaaaac

SEQ ID NO: 25436 - DNA, 1871 bp, Homo sapiens
caaatctacggaaacttttggtgttgtgcttaaataatgattctccttgtccatggcgctgctcagggaaattaatagtttctggtaatagtccagaatttcactggctaggtgtcctccaaatcgcctatattaataaaaaagaaaacacagaggctacaaaaatcataatttaaaaaatcacatttagctstattattttcaggtaactaaccatttcagtttataggtaactaaccaaggaaatatgtggacaattcttcacagtgccttgtggaaacttcttcagtgcctacttcttttgcagaatttcttcttttttttttaatttttattttttaaagagaaagggtcttgctctgtcacctaggctggagtacagtgatgtaatcacagcttactgcagcctcgaactcctgggctcaaatgatcctttcacctcagcctctagagtagctgggactacaggggtacaccaccatgcatggctaaaggactctgcttcttacaggagaccctttcatgggttccaggccatgacaagcttcttgacctttctagggtaccctctcctcacactgtcctcatacccttactcaacatgccctctgtacctgccctggtcattgcacagaagagccagtgcactggctgagctctcggaatgcaccaggcagtgtgctacttcacacacataatcacatgtggccccctcatcaccccaccctgcattgagagtggtattattacttccacttaattcaccagggcattgcaaactttggacgcatcagcatcactgggagggtttaaaaacagattcctgggccccacttgcagacattctgactcagaaagtccagatgggatccaagaatatgcatttctaacaagctcacagatgctacagaccccctaccttaagtaacattgtaacagatgatttagaggggttgtcatttgccaaggtcacaaagtcaaaagtcctagaccatcgttttttttttttttttgagacggagtctcgctctgtcgcccaggccggactgcggactgcagtggtgcaatctcggctcactgcaagctccgcttcccgggttcacgccattctcctgcctcagcctcccgagtagctgggactacaggcgcccgccaccgcgcccggctaattttttgtatttttagtagagacggggtttcaccttgttagccaggatggtctcgatctcctgacctcatgatccacccgcctcagcctcccaaagtgctgggattacaggcgtgagccactgcgcctggcctagaccatcgttttaaacccagctttgttttgagtcagaagtttgggtgattaccaatggatcaaaatgtccttctttttgagctgcataaataaggctccagcacttgtttgttgttgcctgagatagtatttgttcgctggttataaacaatatgttaggacttacatagtgagataaaagctaatattctattcagaatcccatgtataaaatgggcatgatgatgcaatcctgaaatgagtttttgaggtaagtggctagcaaaattgttatgatacaaaatctccacaacatttaacattttcacaatgttgcagagaagggccgtattttattactgctttgatcacaggaggtatcacgaaatattattttttctaaaatgaattgcatgattgaaaccacctttgcaaagattacggcagtgaaagaagtctagcatggctgactccatcttgtttctagtctcacaggctggatgttcttgttcattcctcctaaccatgggaggaatttcgtttatagtttaacttggaagcaaggatgataatagtacctccctaaaac

SEQ ID NO: 25437 - DNA, 577 bp, Homo sapiens
atctctgagcctcagtttgctcattcgtaaaacagaatacctacctcagaggattgtagttaatactaagtgaaataatgcatgtgaagtacctaaccctgggcctggaacrgaacagattctcaataagctgtgcctttgttattcctataaacacccatagccagttaacaggagttggacaggaaagggaggatgttgtatttgaaaatagaacagctttatccactgatattaaaaggtaaagaaaatgacagtattttaaaatgtaaccctacttaggaatgtttagtgtttaccattttccctcacatgtgtgtaaatctctgcagcaccacatctctgtaagacctgagaaacatgattagtgtgtgccctaagaggctcttcccaaaagagctcttcatggtccccagagtctaaagcagaaatggacattggcacttgctcagcagctgcagagaaatgagaaaccttctgagaaagtgctttcactcactgtggctttctcctcagtaaatagccccttcccacaaccattacaaacccatacattctaaaatgtctcataaatcac

SEQ ID NO: 25438 - DNA, 577 bp, Homo sapiens
atctctgagcctcagtttgctcattcgtaaaacagaatacctacctcagaggattgtagttaatactaagtgaaataatgcatgtgaagtacctaaccctgggcctggaacggaacagattctcaataagctgtgcctttgttattcctataaacacccatagccagttaacaggagttggacaggaaagggaggatgttgtatttgaaaatagaacagctttatccactgatattaaaaggtaaagaaaatgacagtattttaaaatgtaaccctacttaggaatgtttagtgtttaccattttccctcacatgtgtgtaaatctctgcagcaccacatctctgtaagacctgagaaacatgattagtgtgtgccctaagaggctcttcccaaaagagctcttcatggtccccagagtctaaagcagaaatggacattggcacttgctcagcagctgcagagaaatgagaaaccttctgagaaagtgytttcactcactgtggctttctcctcagtaaatagccccttcccacaaccattacaaacccatacattctaaaatgtctcataaatcac

SEQ ID NO: 25439 - DNA, 594 bp, Homo sapiens
gtggttgggcacagtgactcacgcctgtaatcccagcactttgggaggctgagatgggtggatcacctgaggttgggagtttgagaccagcctggccaatatggtgaaacctcgtctctactaaaaatacaaaaaaaattagctgggtatggtggcatgtgtctgtaatcccagctacttgggaggctgaggcaggagaatcgtttgaaccagggaggtggaggttgcagtgagccaagatcatgccactgcactccagcttgggcaacagagtgagactctgtctcaccaaaaaaaataataataataaaataaaataaaataaaattcctttggtaawaaattccagatgagaattccatctcccaaaactccactattagaggctttttcagagaagtctcctattccaatatagaagaaggaaagggagaaaaaaaagcttacccctgcagtatattttaagagggtcactgcggtcttcaggggaaatcagagatgaaaggttgactgtgcttgtaaatagggaagatttttctgtgcagccttgtgcattgttgcagagaatgtcacgctgatgtcaatctttgttaa

SEQ ID NO: 25440 - DNA, 584 bp, Homo sapiens
gatgttattccaaaacccacagccctcattgctcttccaagctagctcacatatgtccaggtcagctaggctcttcctaatcagatgctctttcctgcctgcatggaggccaagtgctcttggggttgtactgcaagtagtgggtccttttcagtggagtgacttttgtaggaaagaaaaaacagcaacaactgaccctgcaaagaaactctacctaaaaaccgacatcatgtaatttgcctggccagccctttaaggctgtccatcccctcttccaatcaggaaaagttcccatgttattttattatacccagatggatatgattggccttactagatgtacaagacagtatgagaggattcaaggaaagtctgcctactcacacccaccacttacctctccccaaaagcttcctacatctgctcactgatcccagaaattactttaacagatgatcaagcctttagttcacaattagagagaatgatagtagaagggatatgaggtaagggaggccagttaccttaaattcacacaaaaactgcaccrgacaatagcaaatctttttgtatacaattctgac

SEQ ID NO: 25441 - DNA, 1841 bp, Homo sapiens
ctaaaacccaaccaacaaacactgtcactagtcatctttggaaataatcagagcatcaactcataacaatgaaaatttaccctgcctttcttattgaaagtaacggcaaaaactgcaataacttttgtaccaacctaataaaaccaatatatatggaaaattaaaaagcagatgagagaaatttattctttatcattggctaaaatagggagaaagaataatagaatgagaaaattgctgtttataactcctgaataaaataatagatctgggcaattattatcaaaagatgctaaaaccattaggtgaaaatttgatggagaattttattgtgagagaccaggctgagaccacctaaacacatcagtcttaggatcactaaatgggacaggcagccattatgcacctctttttgtgagtcattaggaaatacatagtaccacctgtaaagtactacattcccccttccctcaaattcaaatctaatacagcctctagatctaattacatcttcgtaggaaatacaggggataggaggagccagctcagaaaatacagaatggaagcaaccagttccatattctataatatagaatacggacattctctgtgataaatgacccaatttctctagaaatcaatgacatttaaaaagagaaggtagagaggattgttacagaataaaagatacttaagaggcataatccaatatatcatatagacctgtttggatcctgattcacacaaaccaaccctgaaaagacatttttaagatcactagagaaatttaaatatgttctaggtataaaatggtattatagaattattgttatgtgataaaagcacagtgttattaaaaatattttttatctgttagagatgcatactgaaacatttttagataaagaaatgtgatacctggttatgctttaaatacccagcaatgaatacagtacgtatgaaagaatacacaaaacaagattagcaaaacagtgatatatattcaagctgcatgctgagatatgaaggttcattttaatactctttccttggttgtctgaaatttcctgtaataaaaaactttaaagaatgaacataatataaataaataaaagtgtccctagtccatttaatcaattttcatcattgaaacagtgaaaggttaaaatatttgtgcaacaaattctcttcagttttctgaacaattttttatcagtaataatttgacttctattattttaagattgaacacttttcaccttatatggaaaaagagcttacaattgaccccaatttcaatttatataacaaaaaaactatcataataaaatattactcctaatgctcaatgaaaaaaggggtaatatgtcatctgtttctatttgtgtgggggcaaacacacggcttcyggtcactttttatactaaaaattgaatagagtggagacttctttatggtttttgtggtcaaggttagtgttattacatttgtcagaaatgcttacctctcagttttttggtaacaaactagtaggtttgctttaaagtgtttgtcttatgtaaaatctagtttagatgcttaattaacaatattactctgttgccagattttgaagtccaacagagacgtctgtatgagaaacaagaggctacaggacaaaatagattcatcttcaacattccctgcatattatcagagctgatataaagtaattgaattcataggataacacctctgaaacttataggaaagctcctaagcaataatcctagcagtggaacaaaatataaacctcttattagactatccagaaagcctttaaaagtattcacaacaataga

SEQ ID NO: 25442 - DNA, 765 bp, Homo sapiens
gtagaggagattctcctttaggtgaagtggtttttcattccagtgagtcaaaacgatctgataacatacatcgtgaaattaattatttaatcttcattacatatataaatatggatataagtatattgatgtatgtttatacatgttaggtatatcttctttaaaaataatacataaattatcatatatatataatatttaaagcctcatcatgctttagtaggcttggttacctttgacttggggctttattcagttataccccacaccctaaaaaatgcgttgtcatgcaaaaaaaaaaaaggttcttaaagrcattggcagctgtgtcttcataaattgatagctatgacagcaaaccatagtcattacccagttctgagtggaaaacaatggctcaattataatggtagaaactggtgtccaaggcctctaaacttatttaagtttacatttgatgcctttcaaaaatcaattatgaaaaatgcctctgctccctagatcagggtgaaattagcatgtgaaaacccagagaaaaccatatggttaaaaaatatatctcctatgagctttgttgacaatttggctgagatcacctacaattaaagatttcctctattcctcctcctcctcttcctcctcctcctcctcttcctcctcctcctcaccctcctcttctccatctataactttaaattcagtcgaacaactctttgcttttgaatttttttcaatttatacctgtttcacggctttcatattctc

SEQ ID NO: 25443 - DNA, 568 bp, Homo sapiens
acctagaactrtatgagacacagaaatagtcctaatttgaaaaattagtttgggaaatgggctaaaaagcatttagaagcatgcctttcacttccttctccttagaaacattaagttatgttattagtgtgaacatggtcttgaatacctcttttcacaagttcagggttcaaaatgtgatcacagccactgtttgacttacgttttctcatatgcttttgtaaaataaagggaatagactgcaattgtttctaaaattatttgtatctctaaaaagagtatggttccctttatctctggaagatcatccaggcttactaaagggtgagcaataatcctgagggtttaatctgagtatcgtaataatactatttaggaatttataattgcttgaaactttcctctgctaaattttgtatatgtgttataaatatactaatttataatttatacagaatcacgtttttattttagtcgaaaagaaatatcctaagtataacagtggttctctgggcttgtaatgtaatgtctctaccacacttaagcctttagtaaaataattgagatg

SEQ ID NO: 25444 - DNA, 523 bp, Homo sapiens
atcaccccacccctcccttccccttctgctccagggcctgcccaggacctccagcctcccgccccattctctgccagactccatcatcccctctggagccgtcacgccgctcggtaaaacctgcccgcttcctacccgcttcctggccgctctctgcctgcttcccggccgcttcctgcccacttcctgcctgcttcctggccacttcctgtccgctycctggccacttcctggccgctttctgcctgcttcctgcccacttcctgcctgcttcctggccgcttcctggtcgctctctgcctgcttcccagccacttcctgccagcgtgcgtttgcactgcccttcgcggagtgtgctgaggggagaaggcccagccgtcccgatctgcgctactttgaattcctgatcacaaacttcaaggaacctctttaagccacccgggaatcctgctgcaggtcccagtgccggaaccagaagcatctgtgccatctgggaacattctggtggagcaatcgccctgtc

SEQ ID NO: 25445 - DNA, 614 bp, Homo sapiens
tctactttctgaaacttgaaaatcaaattgatttagataagattgtatttcttagtgtctgaactcaggaaccaaatagatgtggatagcatgggatttttggaatacaagataagataatttacatgggattgcaaaagttcaaataactaaagttctgtcaatgaaaatatatgctctaacctcaacatcttctagatgaacccttttttctagcagtatttgacaggatgggatatattttataaataaacttggactattatcctatctgctgcagtatcactgttcattcatttatgccctttacttcctacttgaagggtctttaaacatagccaacatatccaatcattgctgtgcattttggatgagggtggattgcggggctgcattcaaagccatcctgggccacatgcagcctatggrgcgtgggttggatgagcttgatgtaccacgttttctttatccagtctaccattgatgggcacctgggttgattccccatcattgctattgtgaatagtgctgcgatcaacatacaagtgcatttgtctttttggtagaatgatttcttttcttttgggtagatacacagtaatgggattgctggg

SEQ ID NO: 25446 - DNA, 1800 bp, Homo sapiens
aggaagggctcacaaaagctaaagttcttaaggcccacaaaattcttaatgatgccttcatggggaggggaaaaaaagggtatgtgtaaaaccgtacggagtaggaacaaagtaggacaactcacacttcccaattgcaaaacttaatacaaagcaagaaagtgtggtactggcatagagacagacatatagaccagtggaatataactgaaagtctgtaatgaaacccatacatctgggccgggcgcggtggctcacgcctgtaatcccagcactttgggaggccgagacgggcggatcacgaggtcaggagatcgagaccatcctggctaactcggtgaaaccctgtctctactaaaaataaaaaaaaaaaaatcagccaggtgcagtggcgggcacctgtagtcccagctactcaggaggctgaggcaggagaatggtgtgaacccggtaggcagatcgcgtcactgcactccagcccagggaacagagtgagactccgtctcaaaaaaaaaaaaaaaaaaaaaaaactacggccagctgatttatgacaagtggccaaggccattcaattgagggaaaaaaaacatctctttaggagatggtactggataactggatattcacatgcaaaagaatgacactggatgttatgtattttactacaaaaacagtaacaaaaataccatatgtgagatgtgatgctccttctggtgaaggagtcctctcatgacagaagttgtagtcatctttgaacaggacgtaagagcagatgtggtagatgtggtggtcaagggatcccttctttacctgttatgatctctattcttgacttaatggcacagcaacaagtttgatgtgtgccttcctggaataatgtccgcccccagccaggaaggccaatcaccaagttcccctcacctgcagggaaatgtcattgatctgcacatcatcggtgctccacttcccaaagagcttgatgtctggggtctctgccaccgctggtgctgctgtctcccactcggtcatcctgggacagggtgatgacaggaaaaaaacgtcagagcycagctagcatggagcaaaggcgcactcattcccaactctgaggctagccgccatctagtgatgaactggggggtcgcaaaggaccaagaaaggccgtgaacgtgttttcaagcactagaaaaattactcagctgtcagcaagaagcatctgtctttcacctagaacccctgggcccaagacttggcagccaccagtcaacagctgctgcactgggaccaaggtataatggctcagcagatgccatacgtcctcacactgcatgggctgtaattcaaaccacaatctcgcgatttacatggtctttgacccaagtcaacgttccgtctcggactgtttctttggccgtgaggcgggaccgttatatgacatcaaggaccacggtaggtaccgtgtggcacaatcaacccaaaggtttcgattcttgaccgacagtatgaaggctctaggggctgctattacggggggaaagttacacagagcaaaagagggcatcgtgtccctaagaaatggaaacttcctatctcagagtacaaccgcatagttcaaaccaagttccccaagccccgctatggggaaaagctagaagcggcggagcaccagaaagaagtcaagagtaactcggcccgcgcccgtttcttctacattttcttttccagagacagaaatgagacctaatgagaaaaggcccaggccgcggggcactatccccgaaagaccatgaaccgtcccta

SEQ ID NO: 25447 - DNA, 1800 bp, Homo sapiens
aggaagggctcacaaaagctaaagttcttaaggcccacaaaattcttaatgatgccttcatggggaggggaaaaaaagggtatgtgtaaaaccgtacggagtaggaacaaagtaggacaactcacacttcccaattgcaaaacttaatacaaagcaagaaagtgtggtactggcatagagacagacatatagaccagtggaatataactgaaagtctgtaatgaaacccatacatctgggccgggcgcggtggctcacgcctgtaatcccagcactttgggaggccgagacgggcggatcacgaggtcaggagatcgagaccatcctggctaactcggtgaaaccctgtctctactaaaaataaaaaaaaaaaaatcagccaggtgcagtggcgggcacctgtagtcccagctactcaggaggctgaggcaggagaatggtgtgaacccggtaggcagatcgcgtcactgcactccagcccagggaacagagtgagactccgtctcaaaaaaaaaaaaaaaaaaaaaaaactacggccagctgatttatgacaagtggccaaggccattcaattgagggaaaaaaaacatctctttaggagatggtactggataactggatattcacatgcaaaagaatgacactggatgttatgtattttactacaaaaacagtaacaaaaataccatatgtgagatgtgatgctccttctggtgaaggagtcctctcatgacagaagttgtagtcatctttgaacaggacgtaagagcagatgtggtagatgtggtggtcaagggatcccttctttacctgttatgatctctattcttgacttaatggcacagcaacaagtttgatgtgtgccttcctggaataatgtccgcccccagccaggaaggccaatcaccaagttcccctcacctgcagggaaatgtcattgatctgcacatcatcggtgctccacttcccaaagagcttgatgtctggggtctctgccaccgctggtgctgctgtctcccactcggtcatcctgggacagggtgatgacaggaaaaaaacgtcagagctcagctagcatggagcaaaggcgcactcattcccaactctgaggctagccgccatctagtgatgaactggggggtcgcaaaggaccaagaaaggccgtgaacgtgttttcaagcactagaaaaaytactcagctgtcagcaagaagcatctgtctttcacctagaacccctgggcccaagacttggcagccaccagtcaacagctgctgcactgggaccaaggtataatggctcagcagatgccatacgtcctcacactgcatgggctgtaattcaaaccacaatctcgcgatttacatggtctttgacccaagtcaacgttccgtctcggactgtttctttggccgtgaggcgggaccgttatatgacatcaaggaccacggtaggtaccgtgtggcacaatcaacccaaaggtttcgattcttgaccgacagtatgaaggctctaggggctgctattacggggggaaagttacacagagcaaaagagggcatcgtgtccctaagaaatggaaacttcctatctcagagtacaaccgcatagttcaaaccaagttccccaagccccgctatggggaaaagctagaagcggcggagcaccagaaagaagtcaagagtaactcggcccgcgcccgtttcttctacattttcttttccagagacagaaatgagacctaatgagaaaaggcccaggccgcggggcactatccccgaaagaccatgaaccgtcccta

SEQ ID NO: 25448 - DNA, 1800 bp, Homo sapiens
aggaagggctcacaaaagctaaagttcttaaggcccacaaaattcttaatgatgccttcatggggaggggaaaaaaagggtatgtgtaaaaccgtacggagtaggaacaaagtaggacaactcacacttcccaattgcaaaacttaatacaaagcaagaaagtgtggtactggcatagagacagacatatagaccagtggaatataactgaaagtctgtaatgaaacccatacatctgggccgggcgcggtggctcacgcctgtaatcccagcactttgggaggccgagacgggcggatcacgaggtcaggagatcgagaccatcctggctaactcggtgaaaccctgtctctactaaaaataaaaaaaaaaaaatcagccaggtgcagtggcgggcacctgtagtcccagctactcaggaggctgaggcaggagaatggtgtgaacccggtaggcagatcgcgtcactgcactccagcccagggaacagagtgagactccgtctcaaaaaaaaaaaaaaaaaaaaaaaactacggccagctgatttatgacaagtggccaaggccattcaattgagggaaaaaaaacatctctttaggagatggtactggataactggatattcacatgcaaaagaatgacactggatgttatgtattttactacaaaaacagtaacaaaaataccatatgtgagatgtgatgctccttctggtgaaggagtcctctcatgacagaagttgtagtcatctttgaacaggacgtaagagcagatgtggtagatgtggtggtcaagggatcccttctttacctgttatgatctctattcttgacttaatggcacagcaacaagtttgatgtgtgccttcctggaataatgtccgcccccagccaggaaggccaatcaccaagttcccctcacctgcagggaaatgtcattgatctgcacatcatcggtgctccacttcccaaagagcttgatgtctggggtctctgccaccgctggtgctgctgtctcccactcggtcatcctgggacagggtgatgacaggaaaaaaacgtcagagctcagctagcatggagcaaaggcgcactcattcccaactctgaggctagccgccatctagtgatgaactggggggtcgcaaaggaccaagaaaggccgtgaacgtgttttcaagcactagaaaaattactcagctgtcagcaagaagcatctgtctttcacctagaacccctgggcccaagacttggcagccaccagtcaacagctgctgcactgggaccaaggtataatggctcagcagatgccatacgtcctcacactgcatgggctgtaattcaaaccacaatctcgcgatttacatggtctttgacccaagtcaacgttccgtctcggactgtttctttggccgtgaggcgggaccgttatatgacatcaaggaccacggtaggtacygtgtggcacaatcaacccaaaggtttcgattcttgaccgacagtatgaaggctctaggggctgctattacggggggaaagttacacagagcaaaagagggcatcgtgtccctaagaaatggaaacttcctatctcagagtacaaccgcatagttcaaaccaagttccccaagccccgctatggggaaaagctagaagcggcggagcaccagaaagaagtcaagagtaactcggcccgcgcccgtttcttctacattttcttttccagagacagaaatgagacctaatgagaaaaggcccaggccgcggggcactatccccgaaagaccatgaaccgtcccta

SEQ ID NO: 25449 - DNA, 1800 bp, Homo sapiens
aggaagggctcacaaaagctaaagttcttaaggcccacaaaattcttaatgatgccttcatggggaggggaaaaaaagggtatgtgtaaaaccgtacggagtaggaacaaagtaggacaactcacacttcccaattgcaaaacttaatacaaagcaagaaagtgtggtactggcatagagacagacatatagaccagtggaatataactgaaagtctgtaatgaaacccatacatctgggccgggcgcggtggctcacgcctgtaatcccagcactttgggaggccgagacgggcggatcacgaggtcaggagatcgagaccatcctggctaactcggtgaaaccctgtctctactaaaaataaaaaaaaaaaaatcagccaggtgcagtggcgggcacctgtagtcccagctactcaggaggctgaggcaggagaatggtgtgaacccggtaggcagatcgcgtcactgcactccagcccagggaacagagtgagactccgtctcaaaaaaaaaaaaaaaaaaaaaaaactacggccagctgatttatgacaagtggccaaggccattcaattgagggaaaaaaaacatctctttaggagatggtactggataactggatattcacatgcaaaagaatgacactggatgttatgtattttactacaaaaacagtaacaaaaataccatatgtgagatgtgatgctccttctggtgaaggagtcctctcatgacagaagttgtagtcatctttgaacaggacgtaagagcagatgtggtagatgtggtggtcaagggatcccttctttacctgttatgatctctattcttgacttaatggcacagcaacaagtttgatgtgtgccttcctggaataatgtccgcccccagccaggaaggccaatcaccaagttcccctcacctgcagggaaatgtcattgatctgcacatcatcggtgctccacttcccaaagagcttgatgtctggggtctctgccaccgctggtgctgctgtctcccactcggtcatcctgggacagggtgatgacaggaaaaaaacgtcagagctcagctagcatggagcaaaggcgcactcattcccaactctgaggctagccgccatctagtgatgaactggggggtcgcaaaggaccaagaaaggccgtgaacgtgttttcaagcactagaaaaattactcagctgtcagcaagaagcatctgtctttcacctagaacccctgggcccaagacttggcagccaccagtcaacagctgctgcactgggaccaaggtataatggctcagcagatgccatacgtcctcacactgcatgggctgtaattcaaaccacaatctcgcgatttacatggtctttgacccaagtcaacgttccgtctcggactgtttctttggccgtgaggcgggaccgttatatgacatcaaggaccacggtaggtaccgtgtggcacaatcaacccaraggtttcgattcttgaccgacagtatgaaggctctaggggctgctattacggggggaaagttacacagagcaaaagagggcatcgtgtccctaagaaatggaaacttcctatctcagagtacaaccgcatagttcaaaccaagttccccaagccccgctatggggaaaagctagaagcggcggagcaccagaaagaagtcaagagtaactcggcccgcgcccgtttcttctacattttcttttccagagacagaaatgagacctaatgagaaaaggcccaggccgcggggcactatccccgaaagaccatgaaccgtcccta

SEQ ID NO: 25450 - DNA, 1800 bp, Homo sapiens
aggaagggctcacaaaagctaaagttcttaaggcccacaaaattcttaatgatgccttcatggggaggggaaaaaaagggtatgtgtaaaaccgtacggagtaggaacaaagtaggacaactcacacttcccaattgcaaaacttaatacaaagcaagaaagtgtggtactggcatagagacagacatatagaccagtggaatataactgaaagtctgtaatgaaacccatacatctgggccgggcgcggtggctcacgcctgtaatcccagcactttgggaggccgagacgggcggatcacgaggtcaggagatcgagaccatcctggctaactcggtgaaaccctgtctctactaaaaataaaaaaaaaaaaatcagccaggtgcagtggcgggcacctgtagtcccagctactcaggaggctgaggcaggagaatggtgtgaacccggtaggcagatcgcgtcactgcactccagcccagggaacagagtgagactccgtctcaaaaaaaaaaaaaaaaaaaaaaaactacggccagctgatttatgacaagtggccaaggccattcaattgagggaaaaaaaacatctctttaggagatggtactggataactggatattcacatgcaaaagaatgacactggatgttatgtattttactacaaaaacagtaacaaaaataccatatgtgagatgtgatgctccttctggtgaaggagtcctctcatgacagaagttgtagtcatctttgaacaggacgtaagagcagatgtggtagatgtggtggtcaagggatcccttctttacctgttatgatctctattcttgacttaatggcacagcaacaagtttgatgtgtgccttcctggaataatgtccgcccccagccaggaaggccaatcaccaagttcccctcacctgcagggaaatgtcattgatctgcacatcatcggtgctccacttcccaaagagcttgatgtctggggtctctgccaccgctggtgctgctgtctcccactcggtcatcctgggacagggtgatgacaggaaaaaaacgtcagagctcagctagcatggagcaaaggcgcactcattcccaactctgaggctagccgccatctagtgatgaactggggggtcgcaaaggaccaagaaaggccgtgaacgtgttttcaagcactagaaaaattactcagctgtcagcaagaagcatctgtctttcacctagaacccctgggcccaagacttggcagccaccagtcaacagctgctgcactgggaccaaggtataatggctcagcagatgccatacgtcctcacactgcatgggctgtaattcaaaccacaatctcgcgatttacatggtctttgacccaagtcaacgttccgtctcggactgtttctttggccgtgaggcgggaccgttatatgacatcaaggaccacggtaggtaccgtgtggcacaatcaacccaaaggtttcgattcttgaccgacagtatgaaggctctaggggctgctattacggggggaaagttacacagagcaaaagagggcatcgtgtccctmagaaatggaaacttcctatctcagagtacaaccgcatagttcaaaccaagttccccaagccccgctatggggaaaagctagaagcggcggagcaccagaaagaagtcaagagtaactcggcccgcgcccgtttcttctacattttcttttccagagacagaaatgagacctaatgagaaaaggcccaggccgcggggcactatccccgaaagaccatgaaccgtcccta

SEQ ID NO: 25451 - DNA, 1576 bp, Homo sapiens
atgaatacataaatttttcccctattttggccatctctctatctcagactttgaagacaacatccctcctcctccaatttacccagtaattctttcccaatgtatatttcattattaaacagaattctgaactgacagtgggtagattatgtaagtcacaaactcctttatactttaagatgtcctctgaccaatcattacatcaaaaatctgtcccaaaatgttgctaactgctaaagcttggtaatgggtatataacgatttattatattattttccaaacttttgcatacatttgaaaatttccataataactttttaaatctgcttacctgaaatgttacagtttaattaggataatagtgattttaaaggaagtgatagtattaaagcatctactcaaatcttctgggtataattgcaaaagaagctattgatatttgtttcagccatagtgaagcactgatttaaaagtagtttagttagaaagctagtgaaaccattttaatttaaaactggatggatcgatggatcctttggaaataatatttattttttctctttctcgtggaatgtggcatttgtcttaccacacagtgacctatcagttctmagatgctgacggaatctaggtaataatgctaacgtttcctgaggacttaaatagaaaattgtaccagtgagaaaatagactagaaacttaaagcatataagatgacttctgtatgcatgttgtctatagatgtagacaaatatttatactgagagatatttccactaaagataaataagaaaatgctggctatagccattaacattgatggctcagaaatgtagaaacagcaggcttctgtttcaattagactttgctattatacaattgtgttaactgactaaaggcattaggatatccttatctatggtaatatatctatttcaaacaaaccagactatggcttttcatggtagtatccatcttcagtatgttggaatttttaaaaatttatataacctacataagaaaatgaagtaaacttaggctaaaattctttggtatttgtaatttttagaagaacttgagattgaggctgaacacactggcctaggactgtgactcaaatacacactacttgctcccactacacacgtttctgaagttctctggtgtctcagttccccagtttctttaacgtgcagagattattcaagttagaattgcaattcatcaatttagaaattcaaagattgttcttaactttttcatttggagttttttctcaaatatacaatatctgaagaaactggtccaaactccttaagacaacaacacttatttctacttgaaattcagttccttcttttttgttaaaaaggcttgtctttctttgatagcttttttttttaaccatttgagtttctttggtattaagaatgtttaagaaacttctgagattctgtattacctagagtacgtgtatacctacctatgaagacagtggcatcaaagaagaatctgtaaattaagttaattaagttatggttggcaataattctggtgagactactgctgcaccta

SEQ ID NO: 25452 - DNA, 634 bp, Homo sapiens
aaagaaaaaaagaaacttactggccgggcacagtggctcaggcctgtaatcccagcactttgggagactgaagcgggtggatcacttgagctcaggaattggagaccagcctggccaatgtggtgaaaccccgtctccactaaaaatacaaaaacatgagctgggtgtggtggtgggcgcctccagtcccagctactcgggaggctgaggcacgagaatcgcttgaattcaggaggcagaggwtgcagtgagctgagattgtgccactgcactccagcctgggcaacaagagcgagactccatctcaagaaaaaaagaaaaagaaaaagctgctgtggagcatgggcgagcactgctgcctggacaaagaccgagggtcctcgggagggcagtactgatgtacaggtttccagcaggtcggcgtgtgtgttctctcctgcaggtctgcagccaggcgtgccaggagagggggagtctgagggattgatgtaggttgggaaagcatgatgagaggagacagagtgggggctgtgaagaagagagcgacttgatggtggcggtagttacacaggtgtatgtatttattaaaatccgctgaaaagtacattttaaatacaagcattttattgtatgc

SEQ ID NO: 25453 - DNA, 634 bp, Homo sapiens
aaagaaaaaaagaaacttactggccgggcacagtggctcaggcctgtaatcccagcactttgggagactgaagcgggtggatcacttgagctcaggaattggagaccagcctggccaatgtggtgaaaccccgtctccactaaaaatacaaaaacatgagctgggtgtggtggtgggcgcctccagtcccagctactcgggaggctgaggcacgagaatcgcttgaattcaggaggcagaggtkgcagtgagctgagattgtgccactgcactccagcctgggcaacaagagcgagactccatctcaagaaaaaaagaaaaagaaaaagctgctgtggagcatgggcgagcactgctgcctggacaaagaccgagggtcctcgggagggcagtactgatgtacaggtttccagcaggtcggcgtgtgtgttctctcctgcaggtctgcagccaggcgtgccaggagagggggagtctgagggattgatgtaggttgggaaagcatgatgagaggagacagagtgggggctgtgaagaagagagcgacttgatggtggcggtagttacacaggtgtatgtatttattaaaatccgctgaaaagtacattttaaatacaagcattttattgtatgc

SEQ ID NO: 25454 - DNA, 554 bp, Homo sapiens
taaccacctggattgcccagctataaaatgtcatattaacaccaattttttttacccctttaaagactctactgagcaagtggtaggcgttcagttagtgcttgctgactgtttgctggatgaaggtgttcagtaagataggtgtaattgcaatagttactggattgtaacaggaatagatccaaagcaacccactcttaattttaatcaaatatttctaarggaatttgaaaataaaacataacaaaatttccccttggaaattggagatagtaaatgatgcctaagactcaatttccttctaaagatggtttggagatggcccagtttctccagattctttttgctcccagtgatgaattgttgatctatttctcatttgtgggttggattgatattcatcatggagaattacacttgggaggacacaatggtgaattcctacaaattgtgaaatcttaaaaaattcttgtagactgtgatctcacattaacttctgagatgggaactaggaggcctggtgcattttcttgggggttgttttctattgagct

SEQ ID NO: 25455 - DNA, 616 bp, Homo sapiens
aaaatactcctcccaccaatgccaccatgcagagacagttactattagcacattcatrtatttttatttttatacatatttttatacttacatgagattgtaatgtttgtgtaagatattatattccacatttttacttaacctttacttaaccttattccagaaccactttctcatggtactaattttttttttaagagagaaacagggtctcactctgttgtccaggatgaagtgcagtggcacgatcacagctcactgcagcctctaattcctgagttcaaatgatcctcccacctcagcctcctgagcagctgggactacaggcgtgcaccacattgcccagcaaatgtcttaattttttttgtagagatggggtctcaccatgtttcccaggcttgtctccaactctgggccccaagcaatcctcccttctaggcctttcaaagtatgaaattacaggggtgagccacagcacccggccttaaaattttttttaattatatgtttaagatgtaagtgacataggcattgtcagtggccatccatttcagtcttttccggtagcctagtttactgacccaatctcacttaggttgtttaccttttcaattct

SEQ ID NO: 25456 - DNA, 980 bp, Homo sapiens
cactgaggtctttgttgcgacctcagcagagttcagtttctctctctgccagatgctgatcctttgcccccatagacgcgaatcctctctgcacacagagctctgtctcagaatctgcttctcagaataccccacctacgacaagtggatttcccaaacacttagctagtaactaaaaatcagtgtccagatccttctggagagctctgtcctgtttttcaataccaggatgatattccccccaacacaartattcaccttgagcagctgggcactctccagccagtgtgaggagcccaccacacttttatactttttggagacagattccaataaacaaacaacagaggaaaacctactgtggccttcggctcaaccgcattattgagggaagatagctaatgatctgcaatgaggcgatttttcatcaggtcattatctgttcatcactgtgagctttactctgttgccaccttactcatatgatttccagtggagttaacccctgtgtccctgagaatccatagcaataacaacccagactcaactgtacctgagagagaggaaaaggtgtcagttattttagcgtgactgggactcagtgctcaagggacagctggatgcaaagagggggcagagatgggagagggctaggactggtcagggactagccagagatgtggcttgttaactcagtagggatagagcatgggttgatgggaggacccaggttcgaatcccacttctgcagcttgctaactgtgtaaccctgggcaagtcccctaacctcactctctgttgccccgtctgtaaaatgagatcataacatcttatgatcaggactgtggtgaggattaacatggaaacctgttgatgattgattgattcattgaaacagagtcttactctgttgctcaggctgagtgcagtggcgcaatcatagctcactgcaacctggaactcctgggctaaagggatcc

SEQ ID NO: 25457 - DNA, 980 bp, Homo sapiens
cactgaggtctttgttgcgacctcagcagagttcagtttctctctctgccagatgctgatcctttgcccccatagacgcgaatcctctctgcacacagagctctgtctcagaatctgcttctcagaataccccacctacgacaagtggatttcccaaacacttagctagtaactaaaaatcagtgtccagatccttctggagagctctgtcctgtttttcaataccaggatgatattccccccaacacaaatattcaccttgagcagctgggcactctccagccagtgtgaggagcccaccacacttttatactttttggagacagattccaataaacaaacaacagaggaaaacctactgtggccttcggctcaaccgcattattgagggaagatagctaatgatctgcaatgaggcgatttttcatcaggtcattatctgttcatcactgtgagctttactctgttgccaccttactcatatgatttccagtggagttaacccctgtgtccctgagaatccatagcaataacaacccagactcaactgtacctgagagagaggaaaaggtgtcasttattttagcgtgactgggactcagtgctcaagggacagctggatgcaaagagggggcagagatgggagagggctaggactggtcagggactagccagagatgtggcttgttaactcagtagggatagagcatgggttgatgggaggacccaggttcgaatcccacttctgcagcttgctaactgtgtaaccctgggcaagtcccctaacctcactctctgttgccccgtctgtaaaatgagatcataacatcttatgatcaggactgtggtgaggattaacatggaaacctgttgatgattgattgattcattgaaacagagtcttactctgttgctcaggctgagtgcagtggcgcaatcatagctcactgcaacctggaactcctgggctaaagggatcc

SEQ ID NO: 25458 - DNA, 980 bp, Homo sapiens
cactgaggtctttgttgcgacctcagcagagttcagtttctctctctgccagatgctgatcctttgcccccatagacgcgaatcctctctgcacacagagctctgtctcagaatctgcttctcagaataccccacctacgacaagtggatttcccaaacacttagctagtaactaaaaatcagtgtccagatccttctggagagctctgtcctgtttttcaataccaggatgatattccccccaacacaaatattcaccttgagcagctgggcactctccagccagtgtgaggagcccaccacacttttatactttttggagacagattccaataaacaaacaacagaggaaaacctactgtggccttcggctcaaccgcattattgagggaagatagctaatgatctgcaatgaggcgatttttcatcaggtcattatctgttcatcactgtgagctttactctgttgccaccttactcatatgatttccagtggagttaacccctgtgtccctgagaatccatagcaataacaacccagactcaactgtacctgagagagaggaaaaggtgtcagttattttagcgtgactgggactcagtgctcaagggacagctggatgcaaagagggggcagagatgggagagggctaggactggtcagggactagccagagatgtggcttgttaactcagtagggatagagcatgggttgatgggaggacccaggttcgaatcccacttctgcagcttgctaactgtgtaaccctgggcaagtcccctaacctcactctctgttgccccrtctgtaaaatgagatcataacatcttatgatcaggactgtggtgaggattaacatggaaacctgttgatgattgattgattcattgaaacagagtcttactctgttgctcaggctgagtgcagtggcgcaatcatagctcactgcaacctggaactcctgggctaaagggatcc

SEQ ID NO: 25459 - DNA, 625 bp, Homo sapiens
ttggcatggtgtgggaagtttgggagcttcacttccagggaactttctctagcagtgagctccagacccaccataaacaggagaaaagagagaaggcgacaggggaggtgactgagaaaggacaatggtccaacctagctgcctacaaaccttttctgaggttgtaccatgtgccagaatctcagacagacaggaaatgagctacgggaagcctgtagtgcagcaggtaaggtgaggcatggtcaccactttctcagacaggctggacatagccacaggacccaaaagaggacagacgaggccatggacttgttcagagccaygagagatcacctctctctagggcatgtctgagtgtatccctgaagcagtggtcttcataatcctgcagtggatttggccatagggagctagaggaagagcaccagaggcatggtgagaggtgagtggtggggaatagtggggatatacaggaaggtggaggggccagatttcacagggctctgcatgccaggctgggttccgacgctggagccagtaggtgcccttgaatgtcctctttccatataggaaagcaagagttccatgccagagaagagcaagatcaggatcatgtttcaggagc

SEQ ID NO: 25460 - DNA, 625 bp, Homo sapiens
ttggcatggtgtgggaagtttgggagcttcacttccagggaactttctctagcagtgagctccagacccaccataaacaggagaaaagagagaaggcgacaggggaggtgactgagaaaggacaatggtccaacctagctgcctacaaaccttttctgaggttgtaccatgtgccagaatctcagacagacaggaaatgagctacgggaagcctgtagtgcagcaggtaaggtgaggcatggtcaccactttctcagacaggctggacatagccacaggacccaaaagaggacagacgaggccatggacttgttcagagccatgagagatcacctctctctagggcatgtctgagtgtatccctgaagcagtggtcttcataatcctgcagtggatttggccatagggagctagaggaagagcaycagaggcatggtgagaggtgagtggtggggaatagtggggatatacaggaaggtggaggggccagatttcacagggctctgcatgccaggctgggttccgacgctggagccagtaggtgcccttgaatgtcctctttccatataggaaagcaagagttccatgccagagaagagcaagatcaggatcatgtttcaggagc

SEQ ID NO: 25461 - DNA, 668 bp, Homo sapiens
ccacgcccctctaatgtccatctcaccccctcgtctcaacactgatccctgctggcccctcttctgccccatcttctgcctaccccagcggccaaagttgatcatgatgtctgcctctccatcatggattcgagaaaaccgcagtggggtcacatcgctccagacttggaaggcacgagcaaaggcatcatccactgtctctgggtccaaatcaggtgtgtagccaatgatcctggaggtggtagaactgcatgtgagtgtgtatgcatgtgyataagtgtatgtatatgcaagtatgtgtgtgtgccacagatgtatgaaaaagtttgagtgtgtgtgtgtatgtgaacatacaagtatatgcacaagcacgggaagggtgcacaggtatgtgtatgtatatgtgagcatgtgcctgcgtgtatgtgtgtgtaggctgggcagggctcactgccaaggacaaccctcccagaatgccttgaagacccagggagtcccaggccagccaacatttttaggccccagctcaggagttccatctgtcacttctggctggtgggggagggccataagtagtgcattatggggcacagggcaaagatcccaccattggaacccagcaccacccatacagagcacagctcttggcccaattagcaaccagttat

SEQ ID NO: 25462 - DNA, 572 bp, Homo sapiens
gataaaatcccttaattaaaaaaataaaataaaacataatcttacgtcctgattattttaaagcactgaattactgccattttgcttaatttcttttcaaatcatttgtatctgagtgtgactaacacatggtacttacaatataaaaagacttaaaatatcagattttaataatccttaggtggctttatgcaaagcagatgttctattatgctttccagatgctagctgaaagcasaattaattaaagacagtgcttacatatcattttagtacatttcagtacatagttaaaactatgttaaagaaaagagagactgagcaaaagccagcactgcttaactgcaaagagaattgccaagaaagagtaagttcacgtgtcttatgccaacaataggcagaactaaaaagcaactgtaaccaaactaagaagcgcttgcttggcacattgtgatggcactaagaatgataaataccaactttgttcacagctttgcacactgcatgccttgggtgaggtttcaacacagttattagttattccagaaatcttcggccaatttaagatgcaa

SEQ ID NO: 25463 - DNA, 443 bp, Homo sapiens
ctgagaggggctacatcccccctcccagggtctgagactcctcctcaaggactgacactgtgccacttttcaacaatagccatggtacctgtagaagtggctgtgggaggcaaagaaggaggagcatgtgagataaagaactcagacttaaccaagacctaagttacctcacccacattctcatcctgttgcccaagaygctcagcccagccatgtcaagattccctgttgctatcctctctccccttcccgtcttaggcactgactgacacgcctctagaactatgctgggtaggtagatactagcaactgtgtggttgaggaggaggccaccatgagggagcagtgtggagcaaaatccccacctgccatctcacaaagagcttttctttttctcctccaaagtcccgggacaaaacagccacccgtaaacatattctaag

SEQ ID NO: 25464 - DNA, 443 bp, Homo sapiens
ctgagaggggctacatcccccctcccagggtctgagactcctcctcaaggactgacactgtgccacttttcaacaatagccatggtacctgtagaagtggctgtgggaggcaaagaaggaggagcatgtgagataaagaactcagacttaaccaagacctaagttacctcacccacattctcatcctgttgcccaagacgctcagcccagccatgtcaagattccctgttgctatcctctctccccttcccgtcttaggcactgactgacacgcctctagaactatgctgggtaggtagatactagcaactgtgtggttgaggaggaggccaccatgagggagcagtgtggagcaaaatccccacctgccatctcacaaagagcttttctttttctcctccaaagtcccgggacaaaacagccacccrtaaacatattctaag

SEQ ID NO: 25465 - DNA, 1177 bp, Homo sapiens
tgaagctggagaggtcgaggccaggttagggtatggggtacccagggtaggggaggcaggagcaagaagctgctcagcctccactcttgagcctcagtttcctcacaagggccctggcccccagcaaaggcctgtgatctcacctcctagctggccaacctcccaaagctcctttctcacgtgcgggcctcatcragtcccttagtgggacagggcagagcccacccggaggtcccatggagagcctgcctttgcccccatccctaccctggagctctgcactccctcaagtataccctactcttcaggcagggagactgaggccctgcccagagctgccccgtctcagctccctggttcctgcccagagcccggagtgggggctgtgtggggaggggctgccagatggctgtaatcccatgtcaacaggggtttagacacctgctcagctccttgccaccccctcaggcctgccccgcattccggcacatctcggcttccaaggggctttccccacttggctggagtctgggcctcccacactggggtgggggtgctgtctccccacccctgccccatctgaagcacagacttcacagcctggtctcaaaggccaggcctgccgctgcccccactcactgtcctgccacgggtccaggcctgggaatgggctgggcactgtggcaaatcacacgagtgaattttctggacaattggggctggagatgtggtggtgtctgaagcagcatcatggggctgggtcagggaggctgaggcccccacttggtgctgagccgcagaggagggatggcaagaggtcttgggaaggggtctactgctggggcagagggtcccagggctgagctccggggtggccaggtcaggtgggcaggacctggtgggtggaggctgggggaatggtgaacggggcaggcagagctggaggccagggccctgtggaaggagccaggaccggggtctgtgagacaggagggcccagtgcccacatggctgaggctagctctgggacaatctcctgatgcggacatgggtcacgtctggagacaagcccttggaggaactggagcttagagttgtagttggagctgggatcagctgggaatgaggacaggggtcaggcgagcctcgggggtgctagcttcttcccatgctggga

SEQ ID NO: 25466 - DNA, 1177 bp, Homo sapiens
tgaagctggagaggtcgaggccaggttagggtatggggtacccagggtaggggaggcaggagcaagaagctgctcagcctccactcttgagcctcagtttcctcacaagggccctggcccccagcaaaggcctgtgatctcacctcctagctggccaacctcccaaagctcctttctcacgtgcgggcctcatcgagtccmttagtgggacagggcagagcccacccggaggtcccatggagagcctgcctttgcccccatccctaccctggagctctgcactccctcaagtataccctactcttcaggcagggagactgaggccctgcccagagctgccccgtctcagctccctggttcctgcccagagcccggagtgggggctgtgtggggaggggctgccagatggctgtaatcccatgtcaacaggggtttagacacctgctcagctccttgccaccccctcaggcctgccccgcattccggcacatctcggcttccaaggggctttccccacttggctggagtctgggcctcccacactggggtgggggtgctgtctccccacccctgccccatctgaagcacagacttcacagcctggtctcaaaggccaggcctgccgctgcccccactcactgtcctgccacgggtccaggcctgggaatgggctgggcactgtggcaaatcacacgagtgaattttctggacaattggggctggagatgtggtggtgtctgaagcagcatcatggggctgggtcagggaggctgaggcccccacttggtgctgagccgcagaggagggatggcaagaggtcttgggaaggggtctactgctggggcagagggtcccagggctgagctccggggtggccaggtcaggtgggcaggacctggtgggtggaggctgggggaatggtgaacggggcaggcagagctggaggccagggccctgtggaaggagccaggaccggggtctgtgagacaggagggcccagtgcccacatggctgaggctagctctgggacaatctcctgatgcggacatgggtcacgtctggagacaagcccttggaggaactggagcttagagttgtagttggagctgggatcagctgggaatgaggacaggggtcaggcgagcctcgggggtgctagcttcttcccatgctggga

SEQ ID NO: 25467 - DNA, 1208 bp, Homo sapiens
tcaaacatatgctttaggcaattatagttcttctgtttagcacacaggaaaagtgggtcaccagacagatttagtaatgggcccaatgttgcatacttatgatagttcctgtattcaacaggtgagtgcagaaacgtattttattcttcttatgacccttatatcagttgcaaaagtccctgagtcacagtaggtcttcttttctgaaattttattttttatgtttgaatttatatttgtgaaatggaaatacgtttgaaagtccaggagactctcctcttcccaagcattttctctctagctttttattgttgcataaaacccatccaataggcctctattaagtaggattgagtatgattgtctatttatatacaaatatctccaaagaaggtggtgagtttggtaatagatttagctattaaatcttttcatacattaaccaaagccaaagttataagttttcatattaaccggttcaaatgttcatctatgagcattgttctaatgcctgaaacgagcactacttcaagtacttctttgtcactaaaagctattcaattctactgaaggtcagttattcaagcttcatcttatgtactttttttttatcaaagttaattatgactgaaggtttgcctctatgatgtatgaatctggttttgtgctgtgttatcgtacagagaagataaaggcagatcacttggattcaaattctagagtttccactcattatgtgtgatcctaaacaagttatttaaacttctctcaatttcttcatctgtaaagtggagataataatggtaccaaccttatagagttattatgaggttaaaattagttaatatttataaagtgcttagaagtasgtcacagagaagcccacataagcagtcattaattaaatagaccataatgatctaagacctcatcagcacaattgtacatgcttttatttggagagttttataagaactataattttcctactttactaatgggaaaactgaagcctggagaaatattagtgatttgtctaagttaacactgttaattaatcacagaactggacttctggactaatcacagaagtcctaaatcttctgatccttgacacagcttttactcctgtgcacctgtaccaacaaagttaaaatttttacaaccaaataggtctgtagtttcaaatgatagtaatacacatttca

SEQ ID NO: 25468 - DNA, 2002 bp, Homo sapiens
aaataaatcccaaacaagaaccaacatagacagctatctgccctacccggctgttctacccgctcagcctgcgggtctttcagtacctggtggggccgcaggggcggggcgcccctggacaccgccactccacgtccccagtgtcaagtcacaaaaggcaagctcatcaaggcaaatgggttctaggagcccaggtccacgaggttggctgacatggggttgaggatggagtcctgcaggccatggtggtgttgcagtgggtccgctccacctccgcctggcaccggcactggcactgcgctggggcccggagggtggcccaggctgtgcagggacggcagcccagggggcggcgggctgaggagcagtgcggggctggatgatgagtggtctggcgtccccgatggagtcttctcatcctccgagctgcctaacaccgacttgccgctgccattcagcgggttgtggctgttagaattggagttctcgttgttctccctgcaagtgcgggagcaaagcagcggggtcagcagggacatcgagaccacccagcgccatctcagtcacagtcagagccagccaccagcctcgggagacagatcccgggcttgtggcctgcgggtgttttcggtttctaccatttcctcgacctggtctgggttctcctttctgcccgttctctccatctctcaacacccaatttctcttgcccctctgcccttatcgtccccacctctcatgctgtcaatctcatcaatatcttttctatatttcctctttccccccttccccaatatttcttttcaggaacagaggtgcaggagaacagggttccctgaagttgtggggtgagccgggaggaagagacgatgcctggattttcagatcactctaggctccacaagccaggtttgctgggtagatgtggggctagsaggttaaggaaccctggatcccaggtcaagggatttagggcctctcacaagacttcatttccctttgctttttctgcccgagggagacccctggctgggagacaggctcctggggctaagcgtcctttccctgtagctccaaactgggcagccctgtgagggctctccttgctgggcctagagacaagggtccaaggatggaggactccctttccgtggtggtacagtgaaaacgtcagctcggagaccagaagcttgggggataaagggcagcccctgggagaaggccgaggcttttccattgtaaccagccactccgggaatctgcagctctcatctggggcctggtctgagaacccaggttttcaggagtctgatcacatgccggtttgggtggagggggacccagcagagagaacccacctccttctatgcctttgactgacagctcctccccagatttggatatttaaaatcctgggtaggatctcttgtcaccagcttcgggagggtttttctttctgctttcctgggagggagcttcccacagggctggcagctgagacctcaccactgtggaaactccaacctcagggtctcagatacctggaagtatctgagcctgcagcactccccctaagatgtttctggttcagcaccctcacctctgaccctgatcattcaaactcagggtggaacacaccccatatcaccaaccccaggtgtcctgttttgctcttaccccgggctggattctgttcccataataagtttctctccaggtttgaggtcctgaggggttatagggcaggcagtggcaagggcctaatgatcaacctttaggctggttcaggaagtcctggtttacctgaggacatccaactcccagcccctctgtgcctctcagctcaccgcagacattccgacctacccatcagaggtagggcctaaggagagaggcatcaagggcctggagtgccagggaagggcggctatctctagcaaggcagaaaacagggcatgcgtctcttctctcccagaactgacacttcctccctttcacctct

SEQ ID NO: 25469 - DNA, 544 bp, Homo sapiens
tgctcaatctctcacctgcttaacatcaagaatttcagtgtctaattccttttctatttaattgtaacagaatcctagggagtttttcattctataggagtttctgcaccattgaaaccaggttgccactgtttctcactgctatagtgtgacagctgatgactggtaacttacaggctgatggtcaggtcagcccactcttctgatgtcgttactgcttgttgaggttctgcagaaaccacagtagtttttgaaagagaaggatcccctagcctccagggcaagtgtcatcattcctcaggttcccaggatcatagctcttaataatcatccatttaaatttatacagctagccccagcctcaaagtattggatctggactcatgcctctgtctgcaccctccaacatctggaaaaatcatccatttttccttctactgaccacctctcccaggctrtggtacattttttttttaatccccacaaatcaatggatcttgttatattcctctctatgaacaattggctagtgtaggatttgctc

SEQ ID NO: 25470 - DNA, 544 bp, Homo sapiens
gtaacatgctagcacttaaaaatgacttatccttaaccctgtctctacaaaaaaaatataaaaacttagccagacctggtggggcacacctgtattccctcctcctcaggaggctgaggtaggagggttgcttgagcccagtggtttgcggcttcagtgagccatgatygcaccaccgctctccagcctgggaaacagtgtgagatgctttcacacagaaaaaaaaagaaaaaagaaaaaaaaattggctaggagtggtggctcacacctgtaatcccaccattttgggaggctgaggcaggcggatcacctgaggtcaggagttcaagaccagcctgcccaacatggcaaaaccccgtctctactaaaaatacacacacaaaaaaaagttagccaggcatggtggcgggcacctgtaattccagctattcaggaggctgaggcaggagaatcgcttgaactgggaggcagagggtgcagtgagccgagatcgtaccactgcactccagcctgggtgacaggagcaaaactccatctcaaaaaa

SEQ ID NO: 25471 - DNA, 540 bp, Homo sapiens
ggctacacatggggtgggcgccacagattttatattacccataagtttcaaaggaagtttctgtgttctttacttggagacctgttacaaaagctatgtaggcttctagaggtcccacttcttttcacagcacaaggccaaggccaggagagctgactgggatgagtttatgggcagcacagagcactggctacattctgatttaatagacactgtctatcctacaaagcaagcacygggtccagatggatttcctagcgagttccactaaacacttaggaaccacctaattccaatttcacataataaatgtttctaaggataaaaagataaataaaagagggaacatatccttactttattttatgaaagtagtagaaagtaaaactttgatattcaagccagataaggatacaggaaaaaagaaaaatcacagatcattcttactcacaaataaacctgcaaaaacactaaatattagcacacgaaatccacaaatatatattaaaaatgcaatatggctaagttgggatgcagtat

SEQ ID NO: 25472 - DNA, 572 bp, Homo sapiens
aaggtcttggactatcaggagtccttgaaccacactttgagaattgcattctaaatagtagctcgcttcctggaattaagcatctaggtatagatatatctatctatctagatagatagatcgatagacagatagatatatctagatagattgatatatatctagatagatctatagayagatatagatctatacaagattattaggtgtaagggataatcctaagtattatatctatatatatctatatagatgtatctgtctataaatatctatatagatatatctatctataaatttgtggttttggccactatgtttgggataatctgtcactgagcaagagaaaactaacacagttgaaaaagaacttacgcagttcaaataccttaagaaaaacctcttatttaagcacggagattttaaaaacaaccaaaactgcggagtataaaataaatgagcaccctattatactcagagcatccactgactttcctctgtagcacttgctgtcaccatgatgctaccctcagtgatgcagcaaactgtagcttttataaacatttcaaata

SEQ ID NO: 25473 - DNA, 919 bp, Homo sapiens
aggattatcataccacatccaagtcatgttgtcagaaattttaagcagctccacatttccccttacttcagggatcttcctagcttattataagctcaccttaaaaccctgaaacccagtttcattacaattctgcttcatacatattagagtaacacataagccagcagactcaagacaaaamcaaaaatagcataggagaagaaatatttcacaaatctgcatgcagtctgccaaactgatttttttagcctgcctttgaggagtcattcaacacatcctaaatgcacaggagcatcagaaagtggtctggctcacctttgttgaccacacagcatcactcagaataagccctctctcttcatcaccctcatttttgcttcctgattggccacttgaagtacttgatgcatcctttgaatgagcaaaagggtctgaatttttgggctgaattcttcctcctctggctcgataatcggccagcattctacccaagctctggctatcgcccagatgctcagcaattctagtgctcactagctcatgtgagggtaagacttgaatagacttggcctgaatacttccattcatgccctgaagtccagagagatccctgagcagctgtttcttcctcctgttctccatttctttgaattctttattgaggagaggagaccagtaaacctgctctgcaaaataatctcgggtagagcatctcatccccttttcagttaaaagaaagggttctcggaatgtgattactggggagatacagaggatcacatcttttaattcctgcttaaaggccaaagaataagtctttcgtttatcttcagaggaggtgacttcctcagtaacatataatccagtgtcatcctgtagagggtctctaaaggctcttatctggcttttgggatcc

SEQ ID NO: 25474 - DNA, 919 bp, Homo sapiens
aggattatcataccacatccaagtcatgttgtcagaaattttaagcagctccacatttccccttacttcagggatcttcctagcttattataagctcaccttaaaaccctgaaacccagtttcattacaattctgcttcatacatattagagtaacacataagccagcagactcaagacaaaaacaaaaatagcataggagaagaaatatttcacaaatctgcatgcagtctgccaaactgatttttttagcctgcctttgaggagtcattcaacacatcctaaatgcacaggagcatcagaaagtggtctggctcacctttgttgaccacacagcatcactcagaataagccctctctcttcatcaccctcrtttttgcttcctgattggccacttgaagtacttgatgcatcctttgaatgagcaaaagggtctgaatttttgggctgaattcttcctcctctggctcgataatcggccagcattctacccaagctctggctatcgcccagatgctcagcaattctagtgctcactagctcatgtgagggtaagacttgaatagacttggcctgaatacttccattcatgccctgaagtccagagagatccctgagcagctgtttcttcctcctgttctccatttctttgaattctttattgaggagaggagaccagtaaacctgctctgcaaaataatctcgggtagagcatctcatccccttttcagttaaaagaaagggttctcggaatgtgattactggggagatacagaggatcacatcttttaattcctgcttaaaggccaaagaataagtctttcgtttatcttcagaggaggtgacttcctcagtaacatataatccagtgtcatcctgtagagggtctctaaaggctcttatctggcttttgggatcc

SEQ ID NO: 25475 - DNA, 919 bp, Homo sapiens
aggattatcataccacatccaagtcatgttgtcagaaattttaagcagctccacatttccccttacttcagggatcttcctagcttattataagctcaccttaaaaccctgaaacccagtttcattacaattctgcttcatacatattagagtaacacataagccagcagactcaagacaaaaacaaaaatagcataggagaagaaatatttcacaaatctgcatgcagtctgccaaactgatttttttagcctgcctttgaggagtcattcaacacatcctaaatgcacaggagcatcagaaagtggtctggctcacctttgttgaccacacagcatcactcagaataagccctctctcttcatcaccctcatttttgcttcctgattkgccacttgaagtacttgatgcatcctttgaatgagcaaaagggtctgaatttttgggctgaattcttcctcctctggctcgataatcggccagcattctacccaagctctggctatcgcccagatgctcagcaattctagtgctcactagctcatgtgagggtaagacttgaatagacttggcctgaatacttccattcatgccctgaagtccagagagatccctgagcagctgtttcttcctcctgttctccatttctttgaattctttattgaggagaggagaccagtaaacctgctctgcaaaataatctcgggtagagcatctcatccccttttcagttaaaagaaagggttctcggaatgtgattactggggagatacagaggatcacatcttttaattcctgcttaaaggccaaagaataagtctttcgtttatcttcagaggaggtgacttcctcagtaacatataatccagtgtcatcctgtagagggtctctaaaggctcttatctggcttttgggatcc

SEQ ID NO: 25476 - DNA, 1041 bp, Homo sapiens
atatcaaggatatatacygacaaatgtccccaccccatttattagaaaatggcttgagttgctctatccccaaattttgaaaattgttgctcttcataaagtggctatgatgcatcatgaatttaaaatgttttagctgacaaccactgcttccaataacaaatgattaacctgtatgatatagccatgcttcttagtatattacgatataaagcctaagaaaaataaaatataaagcctaaataaccaaaatctttgaaataaataattagaatatagtaagtaaaagcatgtacaaatatatgattaaatttttactacttatttgagttagctcagaccatatttttggagtcagcaaatatatagtttggcaaagaggatatttttagttgaatactaatgatttcttgaacaggttcaattttgaaaattgcagcattgtgctatactttatgcagtaaatgaaaagtctattaagaagagaattattctccatgcttgtggtcaaggcttgaatggaaggtggaaaaatgtaatgctttgagtggtaccatagctctgccttagtttgagaacaattattatttttcttatgaatctcttcagcatagcttgtattgagttggtgcaaaaattatcacggttttttgccattgaaagtaatagcaaaaaccgtgattacttttgcaccaacctaatacaatcttaaatattaagtgcttacaatatgcttttcaattgtaaaatttactaaaatcttcatgtacaaagtacgaactgggtgcaacatggtcccatccatatgtttattccacagagggtatttagtaacttatgtgcccctcccttcctaggcctcccctgccttcaggtggtcttctgtccagatttttcaggctaacaatcctctacatttttgagagattttctctctaagcagaagttggtgtcactttgtagcaacattggtcttcagcctgacgttctctgaggctctgctcctctttgtccttgttgcttcagtaggccataagtcat

SEQ ID NO: 25477 - DNA, 2636 bp, Homo sapiens
tttaaagaaattgaaatcttcccacaaaataactttaggcccaaccgatcccaccgataaattctcccaaacatttaaaaagaaaataataccaatttcatatgaactctttcagaaaataaaagaggagagaatattttctaactcattttatgagatcagtattactttgataactaaagtcactcaaaaacattttttaaaaaagaaaattgtgtaacaatactcctattgaatatgaggatagaaattcttaacaaaatgttagcaattgaatccagcaacatgtaaaaagggattatacaataccatcaagtaaagtttatcccaggaatgcaaggttggtttaacatttgaaaattagtgtaactcagcattctaacaaaataaagcggataaaaacttacatgtttatttcaacagattcagagaaaacatttgagaagattcaacacccattcatataaaaattctcaaggcatctgtgaaaggacatctgtgaaaaatcctcagctaacataattaatggtgatatactaaacactttccctctagaattgaaaacaagacaaattctcacttgtattcaacattgtacaggtgattctaaacagtctactggtacaaagaactgaaataaaaacatatgcaggtcggaaaggaagaagtaaaaatgcctttctccatagcaaacatgatcatgcaagtggaaaatctaaaagaattacaaagaaaagtaccagaattaaggctatgaaatgtcacttgaggaagctacaatcagtacagcaggattcaagagtggatccgaattacttgggggtaaataggaactataacacaagtgaaggacgtccttcatgctcacccacgtctcccaacccacagcctctgacacaaagagctcagactttaagaaggcattcggttacctctaatgtcaggttcacatccagctagagcccagcacattgctggagaaagcaatcagcagttttaaactgactctgtacacctgtgttaataattgctgaagctgtagatggacacatagcgactcatgatatcatttctctacatctgaattttgtaaaatttttcttaataaaaaggcaatttttgatttgattattatttctgtttgcctggcaaagcactggtttgaatagagcactagattggtcagctgaattaagacctkactaaactattaacgtgctgcctgatcttaggcaagtctgtttctccctctgggcttcagcaactagagttgaaatgagaatgtgaattatattactgtttttaaactgtcacatgggggcttttgcttcccagagattgttttataggcagtgctagcacaggttaggggtggggttggcataggaatgggggcatgaatgtgcaccgctcaacaatcctgcttttatctgccttgtctgtgtcaggcttgcatcagggtactatttgttcgttttgtttgatttccctccctcagactctgccatgggccatttttcagtccccagttgatactaaagcagaaaaacatttctggttgcagagtacatttttctgctccaaagactaaagaagggggatgaggggaaggaagaggaaatcagtgggtgactcagacagaggaggtttttcagggagcagcatcctctaaaatggggaggagatgagagcccttctgaccatggattacatacagcacagaaagaaaagaaatcagcctgccgtcactggccagtgtagaacccccatccccatgtccatagttattttcaatgtttgtcctagaattgaatggtggatccatttttcccaataatctgggatttgtcaaaagtgttgatgtgggtccggggcttctcccatcagaggtcggcctatttcccctcaccttgccgctgggctggcctagaacttctttggccaataaagtagagtggaagtgacactatgccagttctgggtatagcctttaagaggactggcaatttctttttgtttttcttcaagccttgagcctccatgtaagaagtctagctaatcagctcaagagaccatgtggagaggccctgaaaccacatggaaaggggaatgggtctggtggacccagccttccaaccataccaccaaggtgccagagatgtgggtgaaccatcttgtctcctacagaccagccagttgccagctgaacatcactgagggattccagccaatggtgaaatgaaggcgtctctcacctgaactcatccagggctaatggaatacaacagagaatggggttggaaaatactagctcaccgctacgtcaaatagcccttgaactccagcaaccatggagcgtcaaatcattccctgggaaatccccccctcaagaaacttctgtgggtggcacagagcaccttggctggtacggacctcagtaatgtgggaagtgaccaggctcatctgagactcttgccacaaacctggaatgcatgtcttcatttattttgaaaagcttcaggacattttctctcccagatgttaagcattacatggcaaagatgatagaaacaggcctaatgagcctttgattgttgtatacgccatgatgctgtgctggaggaggttgaagatgg

SEQ ID NO: 25478 - DNA, 2636 bp, Homo sapiens
tttaaagaaattgaaatcttcccacaaaataactttaggcccaaccgatcccaccgataaattctcccaaacatttaaaaagaaaataataccaatttcatatgaactctttcagaaaataaaagaggagagaatattttctaactcattttatgagatcagtattactttgataactaaagtcactcaaaaacattttttaaaaaagaaaattgtgtaacaatactcctattgaatatgaggatagaaattcttaacaaaatgttagcaattgaatccagcaacatgtaaaaagggattatacaataccatcaagtaaagtttatcccaggaatgcaaggttggtttaacatttgaaaattagtgtaactcagcattctaacaaaataaagcggataaaaacttacatgtttatttcaacagattcagagaaaacatttgagaagattcaacacccattcatataaaaattctcaaggcatctgtgaaaggacatctgtgaaaaatcctcagctaacataattaatggtgatatactaaacactttccctctagaattgaaaacaagacaaattctcacttgtattcaacattgtacaggtgattctaaacagtctactggtacaaagaactgaaataaaaacatatgcaggtcggaaaggaagaagtaaaaatgcctttctccatagcaaacatgatcatgcaagtggaaaatctaaaagaattacaaagaaaagtaccagaattaaggctatgaaatgtcacttgaggaagctacaatcagtacagcaggattcaagagtggatccgaattacttgggggtaaataggaactataacacaagtgaaggacgtccttcatgctcacccacgtctcccaacccacagcctctgacacaaagagctcagactttaagaaggcattcggttacctctaatgtcaggttcacatccagctagagcccagcacattgctggagaaagcaatcagcagttttaaactgactctgtacacctgtgttaataattgctgaagctgtagatggacacatagcgactcatgatatcatttctctacatctgaattttgtaaaatttttcttaataaaaaggcaatttttgatttgattattatttctgtttgcctggcaaagcactggtttgaatagagcactagattggtcagctgaattaagacctgactaaactattaacgtgctgcctgatcttaggcaagtctgtttctccctctgggcttcagcaactagagttgaaatgagaatgtgrattatattactgtttttaaactgtcacatgggggcttttgcttcccagagattgttttataggcagtgctagcacaggttaggggtggggttggcataggaatgggggcatgaatgtgcaccgctcaacaatcctgcttttatctgccttgtctgtgtcaggcttgcatcagggtactatttgttcgttttgtttgatttccctccctcagactctgccatgggccatttttcagtccccagttgatactaaagcagaaaaacatttctggttgcagagtacatttttctgctccaaagactaaagaagggggatgaggggaaggaagaggaaatcagtgggtgactcagacagaggaggtttttcagggagcagcatcctctaaaatggggaggagatgagagcccttctgaccatggattacatacagcacagaaagaaaagaaatcagcctgccgtcactggccagtgtagaacccccatccccatgtccatagttattttcaatgtttgtcctagaattgaatggtggatccatttttcccaataatctgggatttgtcaaaagtgttgatgtgggtccggggcttctcccatcagaggtcggcctatttcccctcaccttgccgctgggctggcctagaacttctttggccaataaagtagagtggaagtgacactatgccagttctgggtatagcctttaagaggactggcaatttctttttgtttttcttcaagccttgagcctccatgtaagaagtctagctaatcagctcaagagaccatgtggagaggccctgaaaccacatggaaaggggaatgggtctggtggacccagccttccaaccataccaccaaggtgccagagatgtgggtgaaccatcttgtctcctacagaccagccagttgccagctgaacatcactgagggattccagccaatggtgaaatgaaggcgtctctcacctgaactcatccagggctaatggaatacaacagagaatggggttggaaaatactagctcaccgctacgtcaaatagcccttgaactccagcaaccatggagcgtcaaatcattccctgggaaatccccccctcaagaaacttctgtgggtggcacagagcaccttggctggtacggacctcagtaatgtgggaagtgaccaggctcatctgagactcttgccacaaacctggaatgcatgtcttcatttattttgaaaagcttcaggacattttctctcccagatgttaagcattacatggcaaagatgatagaaacaggcctaatgagcctttgattgttgtatacgccatgatgctgtgctggaggaggttgaagatgg

SEQ ID NO: 25479 - DNA, 2636 bp, Homo sapiens
tttaaagaaattgaaatcttcccacaaaataactttaggcccaaccgatcccaccgataaattctcccaaacatttaaaaagaaaataataccaatttcatatgaactctttcagaaaataaaagaggagagaatattttctaactcattttatgagatcagtattactttgataactaaagtcactcaaaaacattttttaaaaaagaaaattgtgtaacaatactcctattgaatatgaggatagaaattcttaacaaaatgttagcaattgaatccagcaacatgtaaaaagggattatacaataccatcaagtaaagtttatcccaggaatgcaaggttggtttaacatttgaaaattagtgtaactcagcattctaacaaaataaagcggataaaaacttacatgtttatttcaacagattcagagaaaacatttgagaagattcaacacccattcatataaaaattctcaaggcatctgtgaaaggacatctgtgaaaaatcctcagctaacataattaatggtgatatactaaacactttccctctagaattgaaaacaagacaaattctcacttgtattcaacattgtacaggtgattctaaacagtctactggtacaaagaactgaaataaaaacatatgcaggtcggaaaggaagaagtaaaaatgcctttctccatagcaaacatgatcatgcaagtggaaaatctaaaagaattacaaagaaaagtaccagaattaaggctatgaaatgtcacttgaggaagctacaatcagtacagcaggattcaagagtggatccgaattacttgggggtaaataggaactataacacaagtgaaggacgtccttcatgctcacccacgtctcccaacccacagcctctgacacaaagagctcagactttaagaaggcattcggttacctctaatgtcaggttcacatccagctagagcccagcacattgctggagaaagcaatcagcagttttaaactgactctgtacacctgtgttaataattgctgaagctgtagatggacacatagcgactcatgatatcatttctctacatctgaattttgtaaaatttttcttaataaaaaggcaatttttgatttgattattatttctgtttgcctggcaaagcactggtttgaatagagcactagattggtcagctgaattaagacctgactaaactattaacgtgctgcctgatcttaggcaagtctgtttctccctctgggcttcagcaactagagttgaaatgagaatgtgaattatattactgtttttaaactgtcacatgggggcttttgcttcccagagattgttttataggcagtgctagcacaggttaggggtggggttggcrtaggaatgggggcatgaatgtgcaccgctcaacaatcctgcttttatctgccttgtctgtgtcaggcttgcatcagggtactatttgttcgttttgtttgatttccctccctcagactctgccatgggccatttttcagtccccagttgatactaaagcagaaaaacatttctggttgcagagtacatttttctgctccaaagactaaagaagggggatgaggggaaggaagaggaaatcagtgggtgactcagacagaggaggtttttcagggagcagcatcctctaaaatggggaggagatgagagcccttctgaccatggattacatacagcacagaaagaaaagaaatcagcctgccgtcactggccagtgtagaacccccatccccatgtccatagttattttcaatgtttgtcctagaattgaatggtggatccatttttcccaataatctgggatttgtcaaaagtgttgatgtgggtccggggcttctcccatcagaggtcggcctatttcccctcaccttgccgctgggctggcctagaacttctttggccaataaagtagagtggaagtgacactatgccagttctgggtatagcctttaagaggactggcaatttctttttgtttttcttcaagccttgagcctccatgtaagaagtctagctaatcagctcaagagaccatgtggagaggccctgaaaccacatggaaaggggaatgggtctggtggacccagccttccaaccataccaccaaggtgccagagatgtgggtgaaccatcttgtctcctacagaccagccagttgccagctgaacatcactgagggattccagccaatggtgaaatgaaggcgtctctcacctgaactcatccagggctaatggaatacaacagagaatggggttggaaaatactagctcaccgctacgtcaaatagcccttgaactccagcaaccatggagcgtcaaatcattccctgggaaatccccccctcaagaaacttctgtgggtggcacagagcaccttggctggtacggacctcagtaatgtgggaagtgaccaggctcatctgagactcttgccacaaacctggaatgcatgtcttcatttattttgaaaagcttcaggacattttctctcccagatgttaagcattacatggcaaagatgatagaaacaggcctaatgagcctttgattgttgtatacgccatgatgctgtgctggaggaggttgaagatgg

SEQ ID NO: 25480 - DNA, 2636 bp, Homo sapiens
tttaaagaaattgaaatcttcccacaaaataactttaggcccaaccgatcccaccgataaattctcccaaacatttaaaaagaaaataataccaatttcatatgaactctttcagaaaataaaagaggagagaatattttctaactcattttatgagatcagtattactttgataactaaagtcactcaaaaacattttttaaaaaagaaaattgtgtaacaatactcctattgaatatgaggatagaaattcttaacaaaatgttagcaattgaatccagcaacatgtaaaaagggattatacaataccatcaagtaaagtttatcccaggaatgcaaggttggtttaacatttgaaaattagtgtaactcagcattctaacaaaataaagcggataaaaacttacatgtttatttcaacagattcagagaaaacatttgagaagattcaacacccattcatataaaaattctcaaggcatctgtgaaaggacatctgtgaaaaatcctcagctaacataattaatggtgatatactaaacactttccctctagaattgaaaacaagacaaattctcacttgtattcaacattgtacaggtgattctaaacagtctactggtacaaagaactgaaataaaaacatatgcaggtcggaaaggaagaagtaaaaatgcctttctccatagcaaacatgatcatgcaagtggaaaatctaaaagaattacaaagaaaagtaccagaattaaggctatgaaatgtcacttgaggaagctacaatcagtacagcaggattcaagagtggatccgaattacttgggggtaaataggaactataacacaagtgaaggacgtccttcatgctcacccacgtctcccaacccacagcctctgacacaaagagctcagactttaagaaggcattcggttacctctaatgtcaggttcacatccagctagagcccagcacattgctggagaaagcaatcagcagttttaaactgactctgtacacctgtgttaataattgctgaagctgtagatggacacatagcgactcatgatatcatttctctacatctgaattttgtaaaatttttcttaataaaaaggcaatttttgatttgattattatttctgtttgcctggcaaagcactggtttgaatagagcactagattggtcagctgaattaagacctgactaaactattaacgtgctgcctgatcttaggcaagtctgtttctccctctgggcttcagcaactagagttgaaatgagaatgtgaattatattactgtttttaaactgtcacatgggggcttttgcttcccagagattgttttataggcagtgctagcacaggttaggggtggggttggcataggaatgggggcatgaatgtgcaccgctcaacaatcctgcttttatctgccttgtctgtgtcaggcttgcatcagggtactatttgttcgttttgtttgatttccctccctcagactctgccatgggccatttttcagtccccagttgatactaaagcagaaaaacatttctggttgcagagtacatttttctgctccaaagactaaagaagggggatgaggggaaggaagaggaaatcagtgggtgactcagacagaggaggtttttcagggagcagcatcctctaaaatggggaggagatgagagcccttctgaccatggattacatacagcacagaaagaaaagaaatcagcctgccrtcactggccagtgtagaacccccatccccatgtccatagttattttcaatgtttgtcctagaattgaatggtggatccatttttcccaataatctgggatttgtcaaaagtgttgatgtgggtccggggcttctcccatcagaggtcggcctatttcccctcaccttgccgctgggctggcctagaacttctttggccaataaagtagagtggaagtgacactatgccagttctgggtatagcctttaagaggactggcaatttctttttgtttttcttcaagccttgagcctccatgtaagaagtctagctaatcagctcaagagaccatgtggagaggccctgaaaccacatggaaaggggaatgggtctggtggacccagccttccaaccataccaccaaggtgccagagatgtgggtgaaccatcttgtctcctacagaccagccagttgccagctgaacatcactgagggattccagccaatggtgaaatgaaggcgtctctcacctgaactcatccagggctaatggaatacaacagagaatggggttggaaaatactagctcaccgctacgtcaaatagcccttgaactccagcaaccatggagcgtcaaatcattccctgggaaatccccccctcaagaaacttctgtgggtggcacagagcaccttggctggtacggacctcagtaatgtgggaagtgaccaggctcatctgagactcttgccacaaacctggaatgcatgtcttcatttattttgaaaagcttcaggacattttctctcccagatgttaagcattacatggcaaagatgatagaaacaggcctaatgagcctttgattgttgtatacgccatgatgctgtgctggaggaggttgaagatgg

SEQ ID NO: 25481 - DNA, 2636 bp, Homo sapiens
tttaaagaaattgaaatcttcccacaaaataactttaggcccaaccgatcccaccgataaattctcccaaacatttaaaaagaaaataataccaatttcatatgaactctttcagaaaataaaagaggagagaatattttctaactcattttatgagatcagtattactttgataactaaagtcactcaaaaacattttttaaaaaagaaaattgtgtaacaatactcctattgaatatgaggatagaaattcttaacaaaatgttagcaattgaatccagcaacatgtaaaaagggattatacaataccatcaagtaaagtttatcccaggaatgcaaggttggtttaacatttgaaaattagtgtaactcagcattctaacaaaataaagcggataaaaacttacatgtttatttcaacagattcagagaaaacatttgagaagattcaacacccattcatataaaaattctcaaggcatctgtgaaaggacatctgtgaaaaatcctcagctaacataattaatggtgatatactaaacactttccctctagaattgaaaacaagacaaattctcacttgtattcaacattgtacaggtgattctaaacagtctactggtacaaagaactgaaataaaaacatatgcaggtcggaaaggaagaagtaaaaatgcctttctccatagcaaacatgatcatgcaagtggaaaatctaaaagaattacaaagaaaagtaccagaattaaggctatgaaatgtcacttgaggaagctacaatcagtacagcaggattcaagagtggatccgaattacttgggggtaaataggaactataacacaagtgaaggacgtccttcatgctcacccacgtctcccaacccacagcctctgacacaaagagctcagactttaagaaggcattcggttacctctaatgtcaggttcacatccagctagagcccagcacattgctggagaaagcaatcagcagttttaaactgactctgtacacctgtgttaataattgctgaagctgtagatggacacatagcgactcatgatatcatttctctacatctgaattttgtaaaatttttcttaataaaaaggcaatttttgatttgattattatttctgtttgcctggcaaagcactggtttgaatagagcactagattggtcagctgaattaagacctgactaaactattaacgtgctgcctgatcttaggcaagtctgtttctccctctgggcttcagcaactagagttgaaatgagaatgtgaattatattactgtttttaaactgtcacatgggggcttttgcttcccagagattgttttataggcagtgctagcacaggttaggggtggggttggcataggaatgggggcatgaatgtgcaccgctcaacaatcctgcttttatctgccttgtctgtgtcaggcttgcatcagggtactatttgttcgttttgtttgatttccctccctcagactctgccatgggccatttttcagtccccagttgatactaaagcagaaaaacatttctggttgcagagtacatttttctgctccaaagactaaagaagggggatgaggggaaggaagaggaaatcagtgggtgactcagacagaggaggtttttcagggagcagcatcctctaaaatggggaggagatgagagcccttctgaccatggattacatacagcacagaaagaaaagaaatcagcctgccgtcactggccagtgtrgaacccccatccccatgtccatagttattttcaatgtttgtcctagaattgaatggtggatccatttttcccaataatctgggatttgtcaaaagtgttgatgtgggtccggggcttctcccatcagaggtcggcctatttcccctcaccttgccgctgggctggcctagaacttctttggccaataaagtagagtggaagtgacactatgccagttctgggtatagcctttaagaggactggcaatttctttttgtttttcttcaagccttgagcctccatgtaagaagtctagctaatcagctcaagagaccatgtggagaggccctgaaaccacatggaaaggggaatgggtctggtggacccagccttccaaccataccaccaaggtgccagagatgtgggtgaaccatcttgtctcctacagaccagccagttgccagctgaacatcactgagggattccagccaatggtgaaatgaaggcgtctctcacctgaactcatccagggctaatggaatacaacagagaatggggttggaaaatactagctcaccgctacgtcaaatagcccttgaactccagcaaccatggagcgtcaaatcattccctgggaaatccccccctcaagaaacttctgtgggtggcacagagcaccttggctggtacggacctcagtaatgtgggaagtgaccaggctcatctgagactcttgccacaaacctggaatgcatgtcttcatttattttgaaaagcttcaggacattttctctcccagatgttaagcattacatggcaaagatgatagaaacaggcctaatgagcctttgattgttgtatacgccatgatgctgtgctggaggaggttgaagatgg

SEQ ID NO: 25482 - DNA, 527 bp, Homo sapiens
taaaaccagccaattacaagaagaatcatgcagtatgcttcttatttgaacttcaagaatagacaaagctaaatatgtttaaggatgtatatgtagttggtaaacacaaagagaagcagggaataattaacccaaactgagcatcacatttacctctggattggagggacagggatataatcagaattagggggtggttggcatgcagagttgttttttgttttttgattttttttttttgagacagagtcacgctctgtcgcccaggagtgcaatggcgccatcttggctcactgcaacttccgcctcccaggttcaagccattctcctgcctcagcctccctaatagctgggactacaggcgtgtgtcaccaggcccggttaaatttttctgytttttaacagagatggggtttcaccatgttgcccaggctggtctcgaactcttgagctcagacaatctgcccacatcggcctcccaaagtgctgagattacaggcgtgagtcactgcacccggccgcagggg

SEQ ID NO: 25483 - DNA, 567 bp, Homo sapiens
ttctggaacaggggccacaccttatatgtatatgaagacctcctggcatcttaccagggctttgcacattgtgagcactgaattaatacaaaaagaatgagtgaatgctttgcttctgtaaagctgacttttttctctttcttaaactcaccatacatttttctctcacttcctggaatgcttccctacttgctcttcgccatgtagccaagtcctagacatttgccaaggtcaagaacaaacccttccactttcacaaagtcttccagactyacctggccctagcaagaaatccacctccaaagacctgcatccctgatgactaatttttaacatcctggttggtaaggaggatgtggtgtttattagttgtcttttaaaaatatgtcctatatctccaactggatgccaacctctgtgtgtgaccaatctctggatacttcccactccacattccagcaaacacacagtctctgtggcatgatgcctggtccataatgggctctcaatcagtgatcatgattggtgatgggttcgatggttctctgacaggctgtattataggtt

SEQ ID NO: 25484 - DNA, 567 bp, Homo sapiens
ttctggaacaggggccacaccttatatgtatatgaagacctcctggcatcttaccagggctttgcacattgtgagcactgaattaatacaaaaagaatgagtgaatgctttgcttctgtaaagctgacttttttctctttcttaaactcaccatacatttttctctcacttcctggaatgcttccctacttgctcttcgccatgtagccaagtcctagacatttgccaaggtcaagaacaaacccttccactttcacaaagtcttccagactcacctggccctagcaagaaatccacctccaaagacctgcatccctgatgactaatttttaacatcctggttggtaaggaggatgtggtgtttattagttgtcttttaaaaatatgtcctatatctccaactggatgccaacctctgygtgtgaccaatctctggatacttcccactccacattccagcaaacacacagtctctgtggcatgatgcctggtccataatgggctctcaatcagtgatcatgattggtgatgggttcgatggttctctgacaggctgtattataggtt

SEQ ID NO: 25485 - DNA, 1248 bp, Homo sapiens
tgagctaaggacttaatttctttttattattattattattattattattattattttattattacactttaagttttagggtacatgtgcacaatgtgcaggttagttacataggtatacatgtgccatgctggtgcgctgcacccactaaaaggacttaatttcttatggacatctatggtaaatgaaaaaatgataccaaactgtttcctttttatgcaatatataaacataaaagccaagtaattttttagtcataaaacttaacttttaaataactcctcaaatattacatataaaatattatcttgcaggtaaattcaaagaaaaaattatgactgatcaacctaaattcaacagtagatgacctttcctaattagctattgttaaatttaaaaatccatgtttaaaattctgggccgggcgtggtggctcacacctgtaatcccaacactttgggaagccgaggagggtggattgtttgaggtcaggagttccaaagccagcctggccaacatggtgaaaccctgtctctactaaaaatacaaaaattagctgggtgtggtgtcggatgcctgtaattccagctactctggaggctgaggcaggagaatcgcttgaaccagggaggtggaggcttcagtgagcagagattgcaccactgcactccagcctgggcaacagagactctgtctcaataaataaaataaaataaaataaaataaaataaaataaaataaaataaaataaaataaaatratataagaattgtatataataggttttctagattttagtttggtatgcagcaccaaatggaaagtagagaaaaaaattcttggtcctttatcggaagacagttcaatcttgtctcctgatcatattaggttagatcagaaaatagatgttattcaacctatagagtcttaaagacaacattaattttgcagaataatcttctcttgactaaaacttttatgaattcaaatatgaagtgtgagatcctgttataaaacatattttctatatttgagccataataatatatacacatttttttcactaaggtggacagatcttaagtgtacagctccatgaatttttacatatgtattgtactctcttgtgcttggcttattttgctcaacatgaatctgtgataaatctctaagattcgtgtatgtagttgtagatagcagcagttagttctttttcactgctatctaacattccatcatataatagaa

SEQ ID NO: 25486 - DNA, 568 bp, Homo sapiens
gagttaatgggtgcagcacaccaacatgcacatgtatacatatgtaacaaacctgcacattgtgcacacgtaccctagaacttaaaagtataataaaaaaaattgcaaaaaaaacccagacatacttgattttgaacaaattgcatgtttagcatataaacttcacagacattgtataaaaagctcattgtttcctattgtttagacattttaaaatatttaattcaggattgttcagcctatatgcataaaaatgtataactggtaattgattggtaatattaacctgatgtattaaatcttttaatactacacattaatttccactttgacagakgaaaactatattgctattgatttctgctattctgccctaataaatttttattgcttcctatgtctattcatgcatgacatcattttatttattacttggatggttctctattgagactcttctttagtcttattcaataattcatttaaagttttctgtgtgtatgcatgttctaaaatctcagccagaaagaatactccctcttatttcagtgtggctgtgactctagtt

SEQ ID NO: 25487 - DNA, 517 bp, Homo sapiens
aaaagactaagaaccatgacacggcatggggaaaagtgtagttttcaaattgactgaagtgagaaatacagctagagaaaaaggcacatgtattagcaaatattgtatgacttttattcacattaatcacatataagaaaggttacaatatattccatagttattgagatactgttgatgaccttatagtactgaaaaaatggccatrtttgttctctgtgttcactctgaacgtaaagcgcaatgccatgaaaggggccacactgggaagaagaaaaccagtaaggagaatgtaaacatgactcccggtgagggctggagggcctttttaaagattttactttttctgtttttaaaacatatttcttgggttagatgaacctaagaaaatatatggagttctgtttatttcttacatactttaagttacatgtttacatctgcaaatatctctgtagttgttgggttatcattgtccatcaaactctttcaaagtagtcattacatccttttcaag

SEQ ID NO: 25488 - DNA, 517 bp, Homo sapiens
aaaagactaagaaccatgacacggcatggggaaaagtgtagttttcaaattgactgaagtgagaaatacagctagagaaaaaggcacatgtattagcaaatattgtatgacttttattcacattaatcacatataagaaaggttacaatatattccatagttattgagatactgttgatgaccttatagtactgaaaaaatggccatgtttgttctctgtgttcactctgaacgtaaagcgcaatgccatgaaaggggccacactgggaagaagaaaaccagtaaggagaatgtaaacatgactcccggtgagggctggagggmctttttaaagattttactttttctgtttttaaaacatatttcttgggttagatgaacctaagaaaatatatggagttctgtttatttcttacatactttaagttacatgtttacatctgcaaatatctctgtagttgttgggttatcattgtccatcaaactctttcaaagtagtcattacatccttttcaag

SEQ ID NO: 25489 - DNA, 470 bp, Homo sapiens
gaccaaaaacttcttagtaatgtgtatcctaatcatcattataattccaggatttagcagagtctggtacctggtaggtgcttaayatataattatatgataaagcaatcacttattgaaaaactaaatctaatgttaatatttaaaaaactaaatttaatgtttctcgatagtactagactgagcttatatggcagttcaggagctcacatggtttgaactctgttctttcacagtggtttcacatttattgcttcttgaagccaaggtaaacactgaggagggaatttccatagtttcttacttattagcaaaggctgcctggggttaatggcagtccagttatgtcagccacttcaaatcttttgacaaagtcaggcaaatagagaagagtagaggaaaggtaacttttagttaccttagattccagcaataatttaagatggagacagggctgaaaaacaacatca

SEQ ID NO: 25490 - DNA, 1157 bp, Homo sapiens
agcatactctacccagagtagaggaaaaatctatacaatcagtaaaagatgacaatatctaccatccgcacccaagacccaggtaccccattcaccaacaatgacatacctgctacaaaataaggggtacagtgctcagtaactgaggacctctctgcagctcagcactgggctctgcctcatctaccaggaagcaccccaaagacagtgtctgccacaattcactgtggtctacactgccctgagacccaaagccagtcaggcagtgagtgagtctattgctttcccttggttagcaatgaataatgatttatggaatagattataatgcacactgctaccagtacacatcccaacctaccatgctcctcactgagtatgtgatttgtttcctagagacttgagttcacctcccagctctgagactctggttgtcagaragttccagtgagacccttaacatctcagtctacattttctaatctgtgaaacggagctaacacttgccttacagggctgttgtgaggtcaaacagacaaggtacctatggcagtgattggtcaacagaacagtgtttgcacatactagttgttgctattcctattatcttataactccttggcacgaaaccttcaacgactctctgttatcaagtgaataacaatgaaactctagcccaacaatcaacgccctcaccagcccctattctctctcctatatctttcaaactcccaataggaaccatctattccaaatatacgtcattttacttatccccgaacacatgatgccaattcctacccctcacactttgtttctaccatcctgaaatacttgtacttctgtcttcagcaaagcttagcctatctaaattctatactttcataaaacaataatatatttttagaatctatatgtgttccacaagaataggcacaagacccagtcctaccactgggtgtactacatcccagccctgcacaaagttatactgctgcagggtggagaaggaggtgtcacatgaaccagcctaagctagtgagtatttttttaaggattcattatagaaaaagttagactttttcccttaggtctcttgctgtagaggaactgcctgtgaatagagaaaagccaacacaggaacactttgactccct

SEQ ID NO: 25491 - DNA, 588 bp, Homo sapiens
ttgacttagtgaatccacttgggaccatctatctctatttgtaaacagtaaatgccctcatggttttagccatcattagttgtgtattctgttacctgcggacagatatatcctaaatgaaatagaatttgtctaataactaaattaaaggagattttctccaattcctatcttgactttatgtttttagtaataccaaataaaacatcagctaatcctgacaaatacaaatgtatgaattaatttttttactatattttcacttctcttccagacaccccattgtggcatagatagacatgcttttctgaagaatgckttgggccagtgttctagaacctctgtttcaaaataatgcaaactagaatgacatttcaaaaccttacttttgtcatacaattgctgatataaacaaatagaatgttcaaacacatagtaaaacacactgtttatatcagtcttttttaataagaggaattgtattttcacctgacacatttttgtaagttggtgtatatctcctgatgtttttacaaagtctgacatggaatatctgtttcaaagtccatactacaacactttaagtca

SEQ ID NO: 25492 - DNA, 790 bp, Homo sapiens
gtgcacaagaaattagacaaaagaaactgtgcataagaattgcattctagttgataaagttgtttcccatggggatatgggttaataactctgaagccaccatacatgtacamtggaattgaacaatttagtaaatagatggcagagggtgagagccctgtttttaagtgttggagtaggagcttacagataaaccaggggagaagttgcgactgttccacgtagaaatgatcacagttggagataccagtatgaactcatgtttaccttaacatacataaaataatatatagaaatatttatgcatatgtttttatacacagatatatacacacctatatatctgcttgccctgtcagttgaaaagccctagataaaaagatatcccatatcttggattttagtaccattcactgacaaaagaaaccagaactccttaaagaaatggcggactctatggctgggacaggaaatacaagatcagcccttgagcatcttgtaggatcagaaaataagaaaatgttaaaacacaacacacacacacacacacatgcacacacacacacacacacacacaaaaaaaatgatgggatatatcagaaaagtgtgctatacatagtgactttcttttaaagattacattatagaaggaagaaacgaaacagtgactttactgtggaaataatggacaaaaccttcctccaccagattttcaaggttagtatcaacagtgacaagtcatgctgatagtacatacccttgatataatgtgatgagaatagaactttgc

SEQ ID NO: 25493 - DNA, 790 bp, Homo sapiens
gtgcacaagaaattagacaaaagaaactgtgcataagaattgcattctagttgataaagttgtttcccatggggatatgggttaataactctgaagccaccatacatgtacactggaattgaacaatttagtaaatagatggcagagggtgagagccctgtttttaagtgttggagtaggagcttacagataaaccaggggagaagttgcgactgttccacgtagaaatgatcacagttggagataccagtatgaactcatgtttaccttaacatacataaaataatatatagaaatatttatgcatatgtttttatacacagatatatacacacctatatatctgcttgccctgtcagttgaaaagccctagataaaaagatatcccatatcttggattttagtaccattcactgacaaaagaaaccagaactccttaaagaaatggcggactctatggctgggacaggaaatacaagatcagcccttgagcatcttgtaggatcagaaaataagaaaatgttaaaacacaacacacacacacacacacaygcacacacacacacacacacacacaaaaaaaatgatgggatatatcagaaaagtgtgctatacatagtgactttcttttaaagattacattatagaaggaagaaacgaaacagtgactttactgtggaaataatggacaaaaccttcctccaccagattttcaaggttagtatcaacagtgacaagtcatgctgatagtacatacccttgatataatgtgatgagaatagaactttgc

SEQ ID NO: 25494 - DNA, 644 bp, Homo sapiens
ggttcatcatctatatttcctgccccagtcttggaatcagtcatttctccaagaaactagttcctctcatcagaggaaggttttagaaactaagatcttggcactagatgtgctgtttgctggtggagtgtcacatcttttaggtcctctctggtgataaaacaaagaaatgtatatgtgtataatttatgtataggcaccgtctacaaatatttctatatgggaccatttttatctacactaaactaagcatacactaatactgatgtctccaattctaatctactatgacatggatcttctatctgctactctttgcttaactgtaaattccctctctaacagtaagaaaccttgctcccaccatctgccatccacttagttgttcaagtccagcatacatatacataayatacatgtatataacatacatgtttcagaattgttaacctatacccccatgggaaaccattttatcaactagagtatagaatttatgtacagttctttttgccattagttagtcttacagactccactcatttccaaggtcagcattttttactacagctcccttcagtgtggttccttcatacatttgtaatacaattagattctcttgttgcattctgcattccttcctg

SEQ ID NO: 25495 - DNA, 1154 bp, Homo sapiens
taatttgcaattcaggcagttgaaactgattcagaacgaaaaacaattgacatcactccttgaaaaaagaaaatgattttgtcattggcaatataaaaaggcctagttctaaaagcaatctgccttccacccagaaggtttgcactggacaggtgagggttctgtcccctcctgccacgctcaatgacaacatcctcacttggtttcctccaggtgggaagtgatcaacacaggagaggcagcccctcccgcctatgctgacctgatccagccccacctctccctgtccagcctttacctcttygtgtgtgttccgtaaggaagctctgtgcatgatgcgtataagttgaccaccttaagtacttttctgagccccaagttgctctggcccatgcattgggttaaaggcaatatctatcaagtactcttcctcccaaagggtagcttggaagtaggactctatataagcctgcggggtggctgagatcttccccaggcagcccctgcccaaacccattgacttcctcttgttcccagcacataaggaccccgggtcatagcaagaagacagagcctggtttctgctggttcttgagaactcatgaaaccctgaggttcatttatctggagtgtgtagaggcaaaggaatgctttagtgcgtcaccatccagcccgctgcaggccaaatatccaagtgtgttggctggggccccagccctgatctgggttcccagtgaaataactacactgtgcaggttaaatccagttcctgtcctggactcccagtgcctggaagaactgtagagatcttggctactggcaggattgcatttgtcaagctaatgtgctgctgctgttgtcaaggttgcagtattttctgcattgaggactatatcaagtgtatgtccaaggctcccaggcagtgagaatactccgtctctgtgtcctgagtgctaatcacggcaaagcaactcaaaaagaaggcaggcagctgcctctggggctggaggtaaggtcttctctcttgacatccttctgcccattgccccctttccactaccccctccctttctctctcctcttttcctctccctagctcctcctgtttgtccctgctcccctagcctgggcctgcaccctggctcatatcatca

SEQ ID NO: 25496 - DNA, 797 bp, Homo sapiens
ccaggcaggagaacaccgagttaggaatggtgactggcttcccagtagagtctgggttttgaactcatgagtaaggacagcagctcctccgttttgcaggggcatccacctgaaccacaggcaaggcagaagtgatcctaaggcgttaaatagatagtgcaggctaggcacggtggctcacgcctgtaatcccagcactttgggaggctgagatgggtggatcacttgaggccatgagttcgaaaccagcctggccaacatggtgaaaccctgtctctactaaaraaaatacaaaaagtagcctggcatggtggcgcatgcctgtaatcccagctactcaggaggctgaggcaagagaatcacttgaacctgggaggtggaggttgcagtgagccacgatagcaccactgcactccagcctaggcaacagagagagactctatctcaaaaaaaaagatagtgcacagtctacaagcaaagtgaatatattttacctgtgcctgtgtgccctcactttatacacaattgtaataaacttcatcatgtggttgtcaaatccgcagcggactacgagcagcaaactagggactcaacaggcacaccaagcagagagcagtgatagctgacagtctgacaaagagacagaaaaaaatacaaaggcagactgagaattcaccaagagtcacagctctcaggctctttagagaggtttcttccgcccttcgacttctgagtgctgcactatgtgatgatccaaatcataactgatgttcgaatcttgaccctgtaaaaggata

SEQ ID NO: 25497 - DNA, 797 bp, Homo sapiens
ccaggcaggagaacaccgagttaggaatggtgactggcttcccagtagagtctgggttttgaactcatgagtaaggacagcagctcctccgttttgcaggggcatccacctgaaccacaggcaaggcagaagtgatcctaaggcgttaaatagatagtgcaggctaggcacggtggctcacgcctgtaatcccagcactttgggaggctgagatgggtggatcacttgaggccatgagttcgaaaccagcctggccaacatggtgaaaccctgtctctactaaagaaaatacaaaaagtagcctggcatggtggcgcatgcctgtaatcccagctacycaggaggctgaggcaagagaatcacttgaacctgggaggtggaggttgcagtgagccacgatagcaccactgcactccagcctaggcaacagagagagactctatctcaaaaaaaaagatagtgcacagtctacaagcaaagtgaatatattttacctgtgcctgtgtgccctcactttatacacaattgtaataaacttcatcatgtggttgtcaaatccgcagcggactacgagcagcaaactagggactcaacaggcacaccaagcagagagcagtgatagctgacagtctgacaaagagacagaaaaaaatacaaaggcagactgagaattcaccaagagtcacagctctcaggctctttagagaggtttcttccgcccttcgacttctgagtgctgcactatgtgatgatccaaatcataactgatgttcgaatcttgaccctgtaaaaggata

SEQ ID NO: 25498 - DNA, 797 bp, Homo sapiens
ccaggcaggagaacaccgagttaggaatggtgactggcttcccagtagagtctgggttttgaactcatgagtaaggacagcagctcctccgttttgcaggggcatccacctgaaccacaggcaaggcagaagtgatcctaaggcgttaaatagatagtgcaggctaggcacggtggctcacgcctgtaatcccagcactttgggaggctgagatgggtggatcacttgaggccatgagttcgaaaccagcctggccaacatggtgaaaccctgtctctactaaagaaaatacaaaaagtagcctggcatggtggcgcatgcctgtaatcccagctactcwggaggctgaggcaagagaatcacttgaacctgggaggtggaggttgcagtgagccacgatagcaccactgcactccagcctaggcaacagagagagactctatctcaaaaaaaaagatagtgcacagtctacaagcaaagtgaatatattttacctgtgcctgtgtgccctcactttatacacaattgtaataaacttcatcatgtggttgtcaaatccgcagcggactacgagcagcaaactagggactcaacaggcacaccaagcagagagcagtgatagctgacagtctgacaaagagacagaaaaaaatacaaaggcagactgagaattcaccaagagtcacagctctcaggctctttagagaggtttcttccgcccttcgacttctgagtgctgcactatgtgatgatccaaatcataactgatgttcgaatcttgaccctgtaaaaggata

SEQ ID NO: 25499 - DNA, 818 bp, Homo sapiens
cgcagggctgtggagggttaaacgaggtgatgcatggacagcagccgcactgaccttgctggtgtggggctcctgcttctgttcttcccgtgcagccttgggaatgttggaggccgtatccagggacccctgggcctcctgggatggcctctctggatcagccttggaaggttccaggctgcccttaggctcccacattcttccccagtcacgctctcctcgccctgcccacaccagtcctgtgacccttgcctgagttgtgacttcccacccctccccggcctagaggaaagctgcctggcccctcagtgggactcccgcccactgaccctctgtccaccatacacagacaggggcactatccacaaggtggtggaaccgggggagcaggagcacagcttcgccttcaacatcatggagatccagcccttccgccgcgcggctgccatccagaccatgtcgctggatgctgagcgggtgagccttcccccactgcgtcccatgggctatgcagtgactgcagctgaggacagggctcctttgcatgtgatttgtgtgttcttttaagagcttctaggccttagggcctggacatttaggactgagtgtggggtggggcccgggcctgacccaatcctgctgtccttccagaggaagctgtatgtgagctcccagtgggaggtgagccaggtgcccctggacctgtgtgaggtctatggcgggggctgccacggttgcctcatgtcccgagacccctactgcggctgggaccarggccgctgcatctccatctacagctccgaacggtacgttggccg

SEQ ID NO: 25500 - DNA, 620 bp, Homo sapiens
ctgggaataaatacagaaagtgcaatcatgtcatcattactttgtaaaaatatgtatagtggaaataatagatacaatgatgataactaatgaactaaggataatgacaargagtaaattaaaatgcagaagccaactaagcagagggtaaaggttttaaggaccaaaagtctacataaaaacaatgaaaaaataaatgggtaaaatatccattataaacaagcttccttttccctaatattagcccctggcttgcaaggtggtatttacacttggttgtgagaccacatcatagccccagcaacataacgtgtagcaattatacaaatttccatatactcagcactcaacataagtaacaagggccacctccaaatcaccaatttcattcaacactttcaaataaacaataagtggtttgacaatatatgggtttgcccttccttttgctttaataaagtggtcaacaaagtgctattagtgcaatttacagtctccgagtcaatgtgaataattagaaagtaggttagaggtatttttaaaatatagttttttcttcactccaaccaaacaaaaaagttagagccttaattgaaatggttacttgtatacaatattaa

SEQ ID NO: 25501 - DNA, 1320 bp, Homo sapiens
cttggccaacatggagaaactctgtcactactaaaaagtacaaaaattaggcatggtagcacaagcctgtaatcccagctactcaggaagctgaggcacgagaactgtttgcacctgggaggcagcggttgcagcaagccgaaatcgggccactgcactccatccggggtgacagagcgagactccatctcaaaaaaaaaaaaaaaaagaatgggggcaagtaatgcaggatgggcagctaaaggtattctctctctttaaactcttccttggagctaaaaattaggaatagagtagaggagagtcagtagaatggagcaggcagtctgctgtgtatatagagaagggaagagaaaggagacaaaaaattctagggtctctggtcacacagctaaggcaaccatttccagatatgctggctgctcagtgtggccactcccgtgtcagagtcctaagtctcgggctgcctgcacaggtggttgtcagaaaataactcagccttccaagctctgtgttatgtgcacttctgactcattccctgcagcctttgcttctgctgggcccctgatatactttggatatttgtcccttccaaatcccacgttgaaataggacctccaatgttggaggtgggcctagtgggaggtatttgggtcatgggggcagatagcgcctgaactgcttggtgctgtcctcgtgataataagtggcttcttactcctaagagttcctgtgagatctggctgtttaagagaggctggtacctcctccctcttgctcaccatgtgacacacccgctcccccttagccttccgccatgattgtaaaccccgaggccctcactagaagcaaatgccagcaccacacttcctgtacagcctaaagaactgtaggccaaaataaacctgttttcctcataaattacctagccttaagtatttctttatagcaacacaaaggaactaacacccagcccctaatgccgccttctgcttcctcggggcaaggtcatcccttacgtatgccatcaggcacaagggcacccagcrtagcactgaggacatagcagagtataaaagagggtccactgaaggactaagagctatgtatcgaaaccaggtaactaaatcaaaacacgatgaggtaataataacagcagcagcgctgtttttgggcactgactatgctacctaggcactacccttctgcaactgcctgataacggaggcaaactaaactgactttactcctgtattacattatctaaggaacggctcaattttcggctagattctgggccacagagaagtcttggagtcc

SEQ ID NO: 25502 - DNA, 1869 bp, Homo sapiens
  misc_feature (1)...(1869): n = A,T,C or G
ttccacagttgattcaatggagcaaaagatagtggggaaatccaaaggtaaaggttaaactctgttttattatgtttacaggatttaaagggtaagtcaggaagtgcttacataacatgaagtgaaagtggtggattagtaaccagagcgagacttaaaagcagccttaatcctccgaatctccaggggtgaaaggtcaacctctaacaccaggttgtgtaaagaatggagaaggcacaagcttctgtttcatcgtggccctgctaatccactgaggaaatgagcagccggggcttggggagaggtaaacgcctcctccaaggaaagccacctgtgaatttagccaaggaggacgtaattaaagtcagaagggcccagtgcaggggggcaggcaggcagacggacacagcccccagctgcagcgtttgacagtgggcagggggcttctaccacctctgaggagtcaactgtgctgggcccccagccaaacctgcacacggaccattgcttttttcccaacaggctcttgccattctgaaaaatgggctggcagaccaatgacaatcacacatatatggacacacacacacatacacacacacacacacacacacacacacacacaacctcatcagtaattctggaagaggatggttgacatactaaaagagtcagttgccaagtacaggggcccaaagaaatattaataaatcaggcctgcctcgcttgctttcttgctggcttgccctctcttgctcatcaaaaatggagaaaaaraaaaccttttcttactcatgaatataggatttaaatagatcctctaaaattatattcaggcttgtcccctaggattttaaatacttttggaagtaattgcctgtaatatattgaagcgtgtttatctagctatctgagctgccgactgtccatctccatatccatctcactgtctacctacttactgattggatgtgtatttaaagcatcttaagacacaaaaataaacctgagggcaagggtgacatcatatggatataagcacttaaaaaaagagaagcctaattgtaaggacagcaaaatccatgatgcagacacctttttctcctctgtctcccttggcagccatttttggccaagaaaagtagtcaacttttggatcctcagcccctnggctttgcccaagaaagcatctttccctgaattccccataaaaccacagtgcgttacatggaacatttaaagtccacgacttagtaaatgtcgaaacaaatcggaactttgaatacaatcaatttacaaaagaaagtttgaacacgtttcagcacaaagctaaaaaagctttcagagtagccgttccatatttagtctgagctggcctttattaaatcactggtgaaaaacacggagattcgtctcagctgtagtttcatcatcttaaaacagcagaggcatttatcttatgaaattgcagaagtcgagccctgtgcagactgatggctccaaggtgcttttggcattagtatctgattgtctcgcctaaggtgtttatgacgcgtgcggctgttaatagcttatgctgttcattttttacagaatttgtggtttaagcaatatgcttagaatatctaaaatatttctttccttcttttaaaaaatggtatcaaactgtttcatgtgaaatatgaaaagtgcttagttgcatatatttgattctttgccaccctttcccctccttcagaactctcagctctttccttggtgtttcagagcctggctcattcccaccaactattttcttcattaagtcaaaaccaataacctaactgcatttgggaaataagggtgataattaagtatttgcttctcttg

SEQ ID NO: 25503 - DNA, 1869 bp, Homo sapiens
  misc_feature (1)...(1869): n = A,T,C or G
ttccacagttgattcaatggagcaaaagatagtggggaaatccaaaggtaaaggttaaactctgttttattatgtttacaggatttaaagggtaagtcaggaagtgcttacataacatgaagtgaaagtggtggattagtaaccagagcgagacttaaaagcagccttaatcctccgaatctccaggggtgaaaggtcaacctctaacaccaggttgtgtaaagaatggagaaggcacaagcttctgtttcatcgtggccctgctaatccactgaggaaatgagcagccggggcttggggagaggtaaacgcctcctccaaggaaagccacctgtgaatttagccaaggaggacgtaattaaagtcagaagggcccagtgcaggggggcaggcaggcagacggacacagcccccagctgcagcgtttgacagtgggcagggggcttctaccacctctgaggagtcaactgtgctgggcccccagccaaacctgcacacggaccattgcttttttcccaacaggctcttgccattctgaaaaatgggctggcagaccaatgacaatcacacatatatggacacacacacacatacacacacacacacacacacacacacacacacaacctcatcagtaattctggaagaggatggttgacatactaaaagagtcagttgccaagtacaggggcccaaagaaatattaataaatcaggcctgcctcgcttgctttcttgctggcttgccctctcttgctcatcaaaaatggagaaaaagaaaaccttttcttactcatgaatataggatttaaatagatcctctaaaattatattcaggcttgtcccctaggattttaaatacttttggaagtaattgcctgtaatatattgaagcgtgtttatctagctatstgagctgccgactgtccatctccatatccatctcactgtctacctacttactgattggatgtgtatttaaagcatcttaagacacaaaaataaacctgagggcaagggtgacatcatatggatataagcacttaaaaaaagagaagcctaattgtaaggacagcaaaatccatgatgcagacacctttttctcctctgtctcccttggcagccatttttggccaagaaaagtagtcaacttttggatcctcagcccctnggctttgcccaagaaagcatctttccctgaattccccataaaaccacagtgcgttacatggaacatttaaagtccacgacttagtaaatgtcgaaacaaatcggaactttgaatacaatcaatttacaaaagaaagtttgaacacgtttcagcacaaagctaaaaaagctttcagagtagccgttccatatttagtctgagctggcctttattaaatcactggtgaaaaacacggagattcgtctcagctgtagtttcatcatcttaaaacagcagaggcatttatcttatgaaattgcagaagtcgagccctgtgcagactgatggctccaaggtgcttttggcattagtatctgattgtctcgcctaaggtgtttatgacgcgtgcggctgttaatagcttatgctgttcattttttacagaatttgtggtttaagcaatatgcttagaatatctaaaatatttctttccttcttttaaaaaatggtatcaaactgtttcatgtgaaatatgaaaagtgcttagttgcatatatttgattctttgccaccctttcccctccttcagaactctcagctctttccttggtgtttcagagcctggctcattcccaccaactattttcttcattaagtcaaaaccaataacctaactgcatttgggaaataagggtgataattaagtatttgcttctcttg

SEQ ID NO: 25504 - DNA, 1705 bp, Homo sapiens
agggtcagattttgccccttgatacagtcatttggtgtagtcaaattttatgccaaaatggttcccctacattttgccctcatatgcccctcagccctactacagcattacttcaatgggggaaagaaggagggacagcagtctttaaaaactaaagttgaaatcaaagcaatttaaactggaaattccactcacaaggaaactggttaggaaaggaactggttatgataaatgggtacagggtcaacagtcaaggcacagtgattaatttaaaaagaaactatttctaagttctgacccccaatcttagagagaatgagggacctcaaaaggaagttgtgtctagtatgtttacgggatagaagtcgtgggagatgtcaggacaccggcagcacaccagcctggatacccaatcggcctatggcaggacagcagggcacagggcatgtgaaggaaagactaagtcctaactcgaaaccttttaaacctctttcctcacctctgcatttgaaatctggtgttgagacgagggcaagccctacggaagagaatttgcatattttcattttgcctaaatgcaatgaaatagatttaaagagaaaatagctttgtctcattaaatcctccatttgaggcaaacttcagcaaagcataagcagaaaacaacatcttagaccaaagggctcaatattcacattttgaggctgtcacgaatcccaacaacatgctagacagaatttataacaatccaagaaagcaggatccagtagaataacttatctcacagatgaaccgtgcattttgttccaagtcatacaggtcgatgccaatgggcccaggccctagagcagccccttttccagggctgaagctcacatataacatctctctctcatgaaggaggaaaacaggagatatttgcaaacagctctgtggtcctgaatcacataggagtgtgggggagggggcctcaggctgaagttctagctctgccccgggcttcaccttgtgagtccctgagaaataggggtgataacggcctctctgcagggttgctacaggggatttaaagggataatgtgtgcaaagcacttaacacagcgtctagcacaaagtaaaccctccataatgacagctgttattatcaattagcctggctcatttcctttgtaagaatcagctttactgacccagcagaaatctctaagcaagagtcctctgttcaggggtgagtcgtgccacctatgcacagaggccaaccacatatcacagacctaagtcaccctttcagtctcccctcaaatgtccctctaaggtgatggagtcgtgcttggtacctctacttagagtagtacctacagcctctcgcccctttcagtctttgccttgtgacttggagtctaggcrtggagtagggggataaagagtaggaaagggtggggctaactcagagactttagcatggggaggggaagagctgacaactttccagaaatttagcaagcagtccaggtgttagcataatgtgcaaattttaggaaaagagtttagaacaggaaatgcaaatacggctctcattttcacaaagcagatttctcttacaataacaaattctctggaatctcctaaatatccaggaaataaaggcgtaccctatatccttttaaataaggacataagctgcaaaaagttccggctttacacc

SEQ ID NO: 25505 - DNA, 464 bp, Homo sapiens
tgatcccctgtgttctggctgaatactgaggactctatggccctagcagagaactgagcatgtggaagggtcaaaggtctctgaatcccatgtggaaggcctgcccaccagtctgtatcacctattttgaactttatgtgagaaagttatttagcatattgtgtttgacacagtatatatttttgggcttgttcattatagtagagttaccataaactgatgcacgctctaatttgtgtaaatcattgggatattttctgatacctagcataaacattccagttccctgaatgatctggratataggacagataagtaaaagcaaaaaggcgagcaagataccctcatgcaactatgaatagagggttttagtttgagaaatggagcatttgacatatggaggaacttctggctgttcttaatatcaaaacttcattgatttgtcaataattgttgtgaaactg

SEQ ID NO: 25506 - DNA, 776 bp, Homo sapiens
caggtgtctttttaatataatgacttcttttcttttgggtagatacctagtagtgggattgctggattgaatggtagttctacttttatttccttaaggaatctccatatcattttccatagtggttgtattaatttacattcctaccagcagtgtaaaagtgttcccttttcaccacatcaatcccaacagctatggtttttttgacatcttaattatggccattcttgcaggaataaggtggtatctcattgcggttttaatttgcctttccctgatgattagtgatgttgaacgttttttcatgtttgttggatgttcatatcttcttttgaaaaatgtctatttgtgtcstttgcccactttttgatgggattattattattattttttctagcttatttgagttccttgtagatttcggatactagtcttttgccaagacatgattttgttagtcacaaagttcctttgccttatttcctccagtcaaggatcatcttaatgatgaactcactaatgcccaagctcaaaagtgacagagaggattctggggaggtacacagagaggcttctgattgtgatcaaaagaggtggcccacatgttgaaaatagcagaaagtttactcatacaataatcccataaattgtaataactcccatcaaaaactgtaaaggttgaactgctcgttatactttcatgcccagccttcagactgccattttctgattgttttacctccacggctgtccttaacatacactgtaaccaattt

SEQ ID NO: 25507 - DNA, 776 bp, Homo sapiens
caggtgtctttttaatataatgacttcttttcttttgggtagatacctagtagtgggattgctggattgaatggtagttctacttttatttccttaaggaatctccatatcattttccatagtggttgtattaatttacattcctaccagcagtgtaaaagtgttcccttttcaccacatcaatcccaacagctatggtttttttgacatcttaattatggccattcttgcaggaataaggtggtatctcattgcggttttaatttgcctttccctgatgattagtgatgttgaacgttttttcatgtttgttggatgttcatatcttcttttgaaaaatgtctatttgtgtcgtttgcccactttttgatgggattattattattattttttctagcttatttgagttccttgtagatttyggatactagtcttttgccaagacatgattttgttagtcacaaagttcctttgccttatttcctccagtcaaggatcatcttaatgatgaactcactaatgcccaagctcaaaagtgacagagaggattctggggaggtacacagagaggcttctgattgtgatcaaaagaggtggcccacatgttgaaaatagcagaaagtttactcatacaataatcccataaattgtaataactcccatcaaaaactgtaaaggttgaactgctcgttatactttcatgcccagccttcagactgccattttctgattgttttacctccacggctgtccttaacatacactgtaaccaattt

SEQ ID NO: 25508 - DNA, 565 bp, Homo sapiens
gactaatttcagaagtttaataaaggcactgaaagggtatctaatttgcaccttgctttgattatatatctcaggtaatcaattaaagtgctatatataagsctcaatgatcaaccttaactgtttaacaaattggaagaacaataacttgcatcactaaaatttctatacgtaatgaacacagtgaaaatataacatattcttaaaaaaagtgtatgaaaaatactaaattttctatgttgtttactaacactgaatttgttgatcacaaatgtaaacaaaagggtgtttcaaaacacatgaagataaggattaggaaacaaagagcagataagaagcatttgcacttggcaaacttgattactgccattaaggaccatagataagttcagttggagattttataaaaggaagatgaataaatcccttgcttagtatcataaataattacagcgtgatgctttatatcctttttaatgtggcaacactataattaatttgaagacatcataattagaaaataaagaaccctgtattgaaattcagactagtatattaaaatact

SEQ ID NO: 25509 - DNA, 1143 bp, Homo sapiens
caaacttatgagaacaaataattagtgaatttgatagagcaatagaaattatccaatctgaggtacacagagaataaaaggtttaagaaaaatgaatgaagcctcagacagagacctttgggacaatgcaaagcatcccaacattcatataatggaaggcccagaaaaagagagaaaggggcagaaaaaaaaatacggaaaaatcagggtccgaaacttcccaaatctgaagaaaaacatttactctcagacccaagaagctcaatgaatcctaagtcagataaacacacaaaagaagcccacatagatacatcagggtcaaactgtttaaagatagagacaaagaagaaatattaaaagcagaaagagaaaaacaatttattatgtactggaagcaatgatactactaggggctgacttttcatcagaccaacagaggcaagagggcaaccgaatgacattcatggtgtagaaagaaaaaatactgccaaccaagactcccacatccagcaaaactgcccttcaaaactgaaggtgaaacaaagacattctcagaaaaacaaaaactgagagaatttgttgctggcagacctttcctacagtagttttatatatgtttcacaacggtaaatatttaagtatatattaatataaatataaatgactgaatacacacatgcatacacatattctctttcttctctttattaacaacagatctgacatgaataatcataacactctatyttgacatataatatatactcgtataataccataccacaacgggaaagatatagagtgatactggaatgaaacgcctatatcttaccagaattaagtcagaatcaagtcaatgttaaactcaagtagactgagatatgttaaaaatatgtattataattcctagagcaacaattaagaaaaaaaactttttaaaaggctaaaaatttacattggtaagcaaaaggcatttgttttaacacaaaagaatggagtcaaagagaaacagaggcatcatctctgcagcaatctccctaaaagtccatcatctcagtctaaagtgaaggaacataagacaaatccgaaatgagggacattcaacaatgagggatatatcgccatatgtagaaagctgaaact

SEQ ID NO: 25510 - DNA, 1143 bp, Homo sapiens
caaacttatgagaacaaataattagtgaatttgatagagcaatagaaattatccaatctgaggtacacagagaataaaaggtttaagaaaaatgaatgaagcctcagacagagacctttgggacaatgcaaagcatcccaacattcatataatggaaggcccagaaaaagagagaaaggggcagaaaaaaaaatacggaaaaatcagggtccgaaacttcccaaatctgaagaaaaacatttactctcagacccaagaagctcaatgaatcctaagtcagataaacacacaaaagaagcccacatagatacatcagggtcaaactgtttaaagatagagacaaagaagaaatattaaaagcagaaagagaaaaacaatttattatgtactggaagcaatgatactactaggggctgacttttcatcagaccaacagaggcaagagggcaaccgaatgacattcatggtgtagaaagaaaaaatactgccaaccaagactcccacatccagcaaaactgcccttcaaaactgaaggtgaaacaaagacattctcagaaaaacaaaaactgagagaatttgttgctggcagacctttcctacagtagttttatatatgtttcacaacggtaaatatttaagtatatattaatataaatataaatgactgaatacacacatgcatacacatattctctttcttctctttattaacaacagatctgacatgaataatcataacactctatcytgacatataatatatactcgtataataccataccacaacgggaaagatatagagtgatactggaatgaaacgcctatatcttaccagaattaagtcagaatcaagtcaatgttaaactcaagtagactgagatatgttaaaaatatgtattataattcctagagcaacaattaagaaaaaaaactttttaaaaggctaaaaatttacattggtaagcaaaaggcatttgttttaacacaaaagaatggagtcaaagagaaacagaggcatcatctctgcagcaatctccctaaaagtccatcatctcagtctaaagtgaaggaacataagacaaatccgaaatgagggacattcaacaatgagggatatatcgccatatgtagaaagctgaaact

SEQ ID NO: 25511 - DNA, 592 bp, Homo sapiens
aagctggtgtcttgtttgagtttgtttctcctgatacattaaggaagtacttagctattcctgttttaggtatgactaaacacttttatcaaataccattttggcttcaatggagatcatcatgggttttttacccctctaatgaccccttaatatgggaaattatttcccaggttttggggtttttttgagacagggtctcactctgtcacccacgctggagtgcrgtggcgtgatctcagctcactgaagccttgacctctgcggctcaagcaatcctcccacctcagactcctgagtagctgggactacaggtatgcgccaccacacccagctaatttttgtattttttgtagagacagaattttgccatgttgcccaggccagtcttgaactcctgggctcaaatgatccactcacctacgcctcccaaagtgctgggtttacaggagtgagtcactacgcctggcccccagtctttttttaatactaattatttcctaatagtaaaacacctttgcatttttgaaatgagcctctcctgattgcattgcgttgtttctcaattttatttatagatttgattagctaa

SEQ ID NO: 25512 - DNA, 592 bp, Homo sapiens
aagctggtgtcttgtttgagtttgtttctcctgatacattaaggaagtacttagctattcctgttttaggtatgactaaacacttttatcaaataccattttggcttcaatggagatcatcatgggttttttacccctctaatgaccccttaatatgggaaattatttcccaggttttggggtttttttgagacagggtctcactctgtcacccacgctggagtgcggtggcrtgatctcagctcactgaagccttgacctctgcggctcaagcaatcctcccacctcagactcctgagtagctgggactacaggtatgcgccaccacacccagctaatttttgtattttttgtagagacagaattttgccatgttgcccaggccagtcttgaactcctgggctcaaatgatccactcacctacgcctcccaaagtgctgggtttacaggagtgagtcactacgcctggcccccagtctttttttaatactaattatttcctaatagtaaaacacctttgcatttttgaaatgagcctctcctgattgcattgcgttgtttctcaattttatttatagatttgattagctaa

SEQ ID NO: 25513 - DNA, 592 bp, Homo sapiens
aagctggtgtcttgtttgagtttgtttctcctgatacattaaggaagtacttagctattcctgttttaggtatgactaaacacttttatcaaataccattttggcttcaatggagatcatcatgggttttttacccctctaatgaccccttaatatgggaaattatttcccaggttttggggtttttttgagacagggtctcactctgtcacccacgctggagtgcggtggcgtgatctcagctcactgaagccttgacctctgcggctcaagcaatcctcccacctcagactcytgagtagctgggactacaggtatgcgccaccacacccagctaatttttgtattttttgtagagacagaattttgccatgttgcccaggccagtcttgaactcctgggctcaaatgatccactcacctacgcctcccaaagtgctgggtttacaggagtgagtcactacgcctggcccccagtctttttttaatactaattatttcctaatagtaaaacacctttgcatttttgaaatgagcctctcctgattgcattgcgttgtttctcaattttatttatagatttgattagctaa

SEQ ID NO: 25514 - DNA, 974 bp, Homo sapiens
cggcccactgcacaccccgaacaatcagctcacggaatttggggtgagggagcttccccaggccctatgcatagtcctgtgtgtcatcaaaggaggggtttttacttccacgaagatgtaaaacctaccagggctttctaaactaccatgctcggcccaggtgactctgcgcgagccggctggccagttgttgcagatgatgaagtggccagcctggggtctcacccggccaccactcagctggcctgtagcctagccctgtcacagcccagggtagatcagggtagatcagggaggctggcttcccgggaagatcatcctgagcaggggcccctgggtggcctcagtggygagcactttggcattgggtggagtcatagagcccagctctgcccttggctgcctgagactctttgggtaaggagcttattagttctgagttttgcctttctgtaaaatgggaacaatggcgtctcctccagaaggtcttcacagggattaaacgaaagatcgcatgcgaagccctgggcacgtgagtggagcatgcaccacatgacaagatggtagtcatgtgtgcaatcagaaatgtctgcatctgctcagaacatgggagggaacagcccatgttccctcccccaggcagagccaaattttcagaaccagggctcagagctttgggggcagttgggagccatttgttgagtggcatctggttggtgcaaccatttttactctgagtgcagacctgtcaggggcacggcccccaccacctgaccacacattgtccccccacaccgtgcctggacaggcactccaaggacacccagactctgctctggaccagagccctcctctgtggaccaccccccgccttcattggcaacactgacattcttcatggtgggctctggccaggggtgggagccacgtggtggctgcatctgcagggcaggtaggcctcagttcttccacca

SEQ ID NO: 25515 - DNA, 974 bp, Homo sapiens
cggcccactgcacaccccgaacaatcagctcacggaatttggggtgagggagcttccccaggccctatgcatagtcctgtgtgtcatcaaaggaggggtttttacttccacgaagatgtaaaacctaccagggctttctaaactaccatgctcggcccaggtgactctgcgcgagccggctggccagttgttgcagatgatgaagtggccagcctggggtctcacccggccaccactcagctggcctgtagcctagccctgtcacagcccagggtagatcagggtagatcagggaggctggcttcccgggaagatcatcctgagcaggggcccctgggtggcctcagtggcgagcactttggcattgggtggagtcatagagcccagctctgcccttggctgcctgagactctttgggtaaggagcttattagttctgagttttgcctttctgtaaaatgggaacaatggcgtctcctccagaaggtcttcacagggattaaacgaaagatcgcatgcgaagccctgggcacgtgagtggagcatgcaccacatgacaagatggtagtcatgtgtgcaatcagaaatgtctgcatctgctcagaacatgggagggaacagcccatgttccctcccccaggcagagccaaattttcagaaccagggctcagagctttgggggcagttgggagccatttgttgagtggcatctggttggtgcraccatttttactctgagtgcagacctgtcaggggcacggcccccaccacctgaccacacattgtccccccacaccgtgcctggacaggcactccaaggacacccagactctgctctggaccagagccctcctctgtggaccaccccccgccttcattggcaacactgacattcttcatggtgggctctggccaggggtgggagccacgtggtggctgcatctgcagggcaggtaggcctcagttcttccacca

SEQ ID NO: 25516 - DNA, 974 bp, Homo sapiens
cggcccactgcacaccccgaacaatcagctcacggaatttggggtgagggagcttccccaggccctatgcatagtcctgtgtgtcatcaaaggaggggtttttacttccacgaagatgtaaaacctaccagggctttctaaactaccatgctcggcccaggtgactctgcgcgagccggctggccagttgttgcagatgatgaagtggccagcctggggtctcacccggccaccactcagctggcctgtagcctagccctgtcacagcccagggtagatcagggtagatcagggaggctggcttcccgggaagatcatcctgagcaggggcccctgggtggcctcagtggcgagcactttggcattgggtggagtcatagagcccagctctgcccttggctgcctgagactctttgggtaaggagcttattagttctgagttttgcctttctgtaaaatgggaacaatggcgtctcctccagaaggtcttcacagggattaaacgaaagatcgcatgcgaagccctgggcacgtgagtggagcatgcaccacatgacaagatggtagtcatgtgtgcaatcagaaatgtctgcatctgctcagaacatgggagggaacagcccatgttccctcccccaggcagagccaaattttcagaaccagggctcagagctttgggggcagttgggagccatttgttgagtggcatctggttggtgcaaycatttttactctgagtgcagacctgtcaggggcacggcccccaccacctgaccacacattgtccccccacaccgtgcctggacaggcactccaaggacacccagactctgctctggaccagagccctcctctgtggaccaccccccgccttcattggcaacactgacattcttcatggtgggctctggccaggggtgggagccacgtggtggctgcatctgcagggcaggtaggcctcagttcttccacca

SEQ ID NO: 25517 - DNA, 974 bp, Homo sapiens
cggcccactgcacaccccgaacaatcagctcacggaatttggggtgagggagcttccccaggccctatgcatagtcctgtgtgtcatcaaaggaggggtttttacttccacgaagatgtaaaacctaccagggctttctaaactaccatgctcggcccaggtgactctgcgcgagccggctggccagttgttgcagatgatgaagtggccagcctggggtctcacccggccaccactcagctggcctgtagcctagccctgtcacagcccagggtagatcagggtagatcagggaggctggcttcccgggaagatcatcctgagcaggggcccctgggtggcctcagtggcgagcactttggcattgggtggagtcatagagcccagctctgcccttggctgcctgagactctttgggtaaggagcttattagttctgagttttgcctttctgtaaaatgggaacaatggcgtctcctccagaaggtcttcacagggattaaacgaaagatcgcatgcgaagccctgggcacgtgagtggagcatgcaccacatgacaagatggtagtcatgtgtgcaatcagaaatgtctgcatctgctcagaacatgggagggaacagcccatgttccctcccccaggcagagccaaattttcagaaccagggctcagagctttgggggcagttgggagccatttgttgagtggcatctggttggtgcaaccatttttactctgagtgcagacctgtcaggggcacggcccccaccacctgaccacacattgtccccccacaccgtgcctggacaggcactccaaggacacccagactctgctctggaccagagccctcctctgtggaccaccccccgccttcattggyaacactgacattcttcatggtgggctctggccaggggtgggagccacgtggtggctgcatctgcagggcaggtaggcctcagttcttccacca

SEQ ID NO: 25518 - DNA, 1071 bp, Homo sapiens
tcctgacggcggatgaccttgagcgtttttccccgggcttgttggccatctgcaaatcttctgccctggatgtgtgccaccgtgtgttcctcaaagcaggcctgtgcttcctgtgtkgtacgcatggaggcatttatgttgatctggcagaactttctttctcctgggaattgtattttcctccctttccctccatcttctccctaatatttgtggcaaatgggttccccttcttctacttcaccccctccacagctgtggtgattggtctaggggtggttgtctagaaggttggccagacgtgagccaggaaaaaaagaagtagaaagatggctgccagggctgcagggccatggggggacctgagcctctgtacctagccaggagagacaggaggagagcagagctccggcccacacccaactttgaacctctggggcaccacgaggacccatggtgcaccagccctgggtttccaataactccctctttggcttatgtaagtttggctgagttttccacccacccacccctatggccaaaaagtccatgtgactcaaacccttgccagttcctcttgggagcaggccggtgggatcacacttgcagatgagcccacccgggagggaggaagtgggggcccaaggccacggctttttacagtgtgtgcctcatctacattggcaccctcacctgctggggagccactcagaaggcgtataaacagcccgaggcctcagttctcatatggtggagtcaaggggtcagacaggcctgacagaggcttgtcccactgaccgatgtagccatctccatggaggacagaagcctcagcagaggatttgcaattttgcagagaacaggctataagcacaaacggtgcttcccacaggctggtgagcaattctccagggaaaattaaacataagccaccagagcagagggaagagctggaagagctggggtttctataaccaagtgctaagcactctatgtacactgcagatgaggaaaccaaggcctgatgggtgaaatcattcaccagggagaaccaaggagtcagtgcagcca

SEQ ID NO: 25519 - DNA, 1071 bp, Homo sapiens
tcctgacggcggatgaccttgagcgtttttccccgggcttgttggccatctgcaaatcttctgccctggatgtgtgccaccgtgtgttcctcaaagcaggcctgtgcttcctgtgtggtacgcatggaggcatttatgttgatctggcagaactttctttctcctgggaattgtattttcctccctttccctccatcttctccctaatatttgtggcaaatgggttccccttcttctacttcaccccctccacagctgtggtgattggtctaggggtggttgtctagaaggttggccagacgtgagccwggaaaaaaagaagtagaaagatggctgccagggctgcagggccatggggggacctgagcctctgtacctagccaggagagacaggaggagagcagagctccggcccacacccaactttgaacctctggggcaccacgaggacccatggtgcaccagccctgggtttccaataactccctctttggcttatgtaagtttggctgagttttccacccacccacccctatggccaaaaagtccatgtgactcaaacccttgccagttcctcttgggagcaggccggtgggatcacacttgcagatgagcccacccgggagggaggaagtgggggcccaaggccacggctttttacagtgtgtgcctcatctacattggcaccctcacctgctggggagccactcagaaggcgtataaacagcccgaggcctcagttctcatatggtggagtcaaggggtcagacaggcctgacagaggcttgtcccactgaccgatgtagccatctccatggaggacagaagcctcagcagaggatttgcaattttgcagagaacaggctataagcacaaacggtgcttcccacaggctggtgagcaattctccagggaaaattaaacataagccaccagagcagagggaagagctggaagagctggggtttctataaccaagtgctaagcactctatgtacactgcagatgaggaaaccaaggcctgatgggtgaaatcattcaccagggagaaccaaggagtcagtgcagcca

SEQ ID NO: 25520 - DNA, 1071 bp, Homo sapiens
tcctgacggcggatgaccttgagcgtttttccccgggcttgttggccatctgcaaatcttctgccctggatgtgtgccaccgtgtgttcctcaaagcaggcctgtgcttcctgtgtggtacgcatggaggcatttatgttgatctggcagaactttctttctcctgggaattgtattttcctccctttccctccatcttctccctaatatttgtggcaaatgggttccccttcttctacttcaccccctccacagctgtggtgattggtctaggggtggttgtctagaaggttggccagacgtgagccaggaaaamaagaagtagaaagatggctgccagggctgcagggccatggggggacctgagcctctgtacctagccaggagagacaggaggagagcagagctccggcccacacccaactttgaacctctggggcaccacgaggacccatggtgcaccagccctgggtttccaataactccctctttggcttatgtaagtttggctgagttttccacccacccacccctatggccaaaaagtccatgtgactcaaacccttgccagttcctcttgggagcaggccggtgggatcacacttgcagatgagcccacccgggagggaggaagtgggggcccaaggccacggctttttacagtgtgtgcctcatctacattggcaccctcacctgctggggagccactcagaaggcgtataaacagcccgaggcctcagttctcatatggtggagtcaaggggtcagacaggcctgacagaggcttgtcccactgaccgatgtagccatctccatggaggacagaagcctcagcagaggatttgcaattttgcagagaacaggctataagcacaaacggtgcttcccacaggctggtgagcaattctccagggaaaattaaacataagccaccagagcagagggaagagctggaagagctggggtttctataaccaagtgctaagcactctatgtacactgcagatgaggaaaccaaggcctgatgggtgaaatcattcaccagggagaaccaaggagtcagtgcagcca

SEQ ID NO: 25521 - DNA, 1071 bp, Homo sapiens
tcctgacggcggatgaccttgagcgtttttccccgggcttgttggccatctgcaaatcttctgccctggatgtgtgccaccgtgtgttcctcaaagcaggcctgtgcttcctgtgtggtacgcatggaggcatttatgttgatctggcagaactttctttctcctgggaattgtattttcctccctttccctccatcttctccctaatatttgtggcaaatgggttccccttcttctacttcaccccctccacagctgtggtgattggtctaggggtggttgtctagaaggttggccagacgtgagccaggaaaaaaagragtagaaagatggctgccagggctgcagggccatggggggacctgagcctctgtacctagccaggagagacaggaggagagcagagctccggcccacacccaactttgaacctctggggcaccacgaggacccatggtgcaccagccctgggtttccaataactccctctttggcttatgtaagtttggctgagttttccacccacccacccctatggccaaaaagtccatgtgactcaaacccttgccagttcctcttgggagcaggccggtgggatcacacttgcagatgagcccacccgggagggaggaagtgggggcccaaggccacggctttttacagtgtgtgcctcatctacattggcaccctcacctgctggggagccactcagaaggcgtataaacagcccgaggcctcagttctcatatggtggagtcaaggggtcagacaggcctgacagaggcttgtcccactgaccgatgtagccatctccatggaggacagaagcctcagcagaggatttgcaattttgcagagaacaggctataagcacaaacggtgcttcccacaggctggtgagcaattctccagggaaaattaaacataagccaccagagcagagggaagagctggaagagctggggtttctataaccaagtgctaagcactctatgtacactgcagatgaggaaaccaaggcctgatgggtgaaatcattcaccagggagaaccaaggagtcagtgcagcca

SEQ ID NO: 25522 - DNA, 1071 bp, Homo sapiens
tcctgacggcggatgaccttgagcgtttttccccgggcttgttggccatctgcaaatcttctgccctggatgtgtgccaccgtgtgttcctcaaagcaggcctgtgcttcctgtgtggtacgcatggaggcatttatgttgatctggcagaactttctttctcctgggaattgtattttcctccctttccctccatcttctccctaatatttgtggcaaatgggttccccttcttctacttcaccccctccacagctgtggtgattggtctaggggtggttgtctagaaggttggccagacgtgagccaggaaaaaaagaagtagaaagatggctgccagggctgcagggccatggggggacctgagcctctgtacctagccaggagagacaggaggagagcagagctccggcccacacccaactttgaacctctggggcaccacgaggacccatggtgcaccagccctgggtttccaataacyccctctttggcttatgtaagtttggctgagttttccacccacccacccctatggccaaaaagtccatgtgactcaaacccttgccagttcctcttgggagcaggccggtgggatcacacttgcagatgagcccacccgggagggaggaagtgggggcccaaggccacggctttttacagtgtgtgcctcatctacattggcaccctcacctgctggggagccactcagaaggcgtataaacagcccgaggcctcagttctcatatggtggagtcaaggggtcagacaggcctgacagaggcttgtcccactgaccgatgtagccatctccatggaggacagaagcctcagcagaggatttgcaattttgcagagaacaggctataagcacaaacggtgcttcccacaggctggtgagcaattctccagggaaaattaaacataagccaccagagcagagggaagagctggaagagctggggtttctataaccaagtgctaagcactctatgtacactgcagatgaggaaaccaaggcctgatgggtgaaatcattcaccagggagaaccaaggagtcagtgcagcca

SEQ ID NO: 25523 - DNA, 1067 bp, Homo sapiens
atgcccaggcttggtacaagttttctcctctgcctaatctctgcatccctcttaagacactgactcggggagatttaaatagtttggaaagattaccttcgggagcattttgcaagcttctagactgcagtttctcaacactgacatctgagattggaggagtgtctgttggggaccgaggcccccacgatgccacctcatcagatatgcggcaccatcccgggtccacccactaagagtcaacagcatgcccctttatgtccatcaaaagcatctctggacactgccatatgtccgtcagttgagagccactgctgtagagaaaaaggactctgtggccccatctgccatcctaaggggagagagggtcacaagccaccttgagaaaggaaggctcagcaccactcaggcttggtgagttgcctcccaggcgctctgcaacctggctcctgcctactttcctgcttcatcttttacccaccccaccgtctgcaccggagtctccctttcagtgagcccacccagtacctgctcgtctcccagcctcccctctcgctcctacttccacctgtggtgagctttcctctcctttgaaaccctgctcctccatggagactcagctgagtgccaccttctcacaggggcctcctctgacacctctggtcaatcaaaattaacttcctgatgtatgtccaacaaaaaccaacatctttcacactcgayctgcccctcactgccttattacagggagccctaagtgtctcctcccacaagaccacaagcttcttgaagggagagactgctcagcacccccgacggcacctaggacagctcctggtgcaaccagagtctaggggctccctctgagtttggactgaggtttggcttggaaaaacaaaacacacccttgtgcaatccacacagccaggagcagagcattcctgggttagcagtgacctcaggggtcatctagcctaatctcattttacagaagaggaaaacaaagctcagagtggggaaggtactcggtcccagggcccagggtgagctaatggctgccgcttctg

SEQ ID NO: 25524 - DNA, 1196 bp, Homo sapiens
agcaagcaggccaaaggagaaacagggctgcgacgcctaggggtcacagggacgcagatgctgctggtggcccaggtgaggggtcctgcgtcctctgtcgcaaggctgccagcagctgcaggatctgctctcacatgttggacaggcaaggaccttgtggcacttctcaccctggctgtgtgccggaattgtggtggagcattttaaacacctctgggccctcttcacagcacaggggtcattctgatgagcagccaggattgyggccacaggccaagccaggagccagctaagggggttgggggagtgaggacaaggcaggctagaggccttgggcagacaggaggaactctgacccaggctccctgatgcccagtatgtctgcctggagagagactggtcccagtgagcctgacctcaggagctacaggtgttggcagccctagaagatgggctgggcaccaagttcaggaacaggagccaactgttctataacaggaacttttccctgaagttcccctgggagtactgtcttgcaaacacccagagatcttttgctaagtgcctcatagactttgacttactgactttgaaattactgaccttgaaattcatgattgcttttctgctcaatcacactgtcctccctttattccacaaacctgtatgagcaccccctgccaccaccacccatgggttggaccctattccagccctgggacacagtggggacaaatggacaaaggtctcactcttgaggagcttacctttgagtggggagatggagtgtagacacagatgaaatgtgtccattggtaaaaagcactatgaaaaggaataaaccaggacagaaaattaaagtggaatgctggtcagggaagctttttccagctaggtgacatttgggcagagaccttagggacatgagagtgggaggtcagaggacatggggaagaacattctggacagggggtttggggcaaaatgagccatcgagggaggtctcaccattctcatggttttaaaggaggaagctgccaaaatcatgtgtcattgaacatttggtttattcctactgatttgccttttcagtggcagtgcagctacatactagggaattggccatatcacgtttccctctcttccttaaaataggtatgaaaatatcaggtaagacagctcctagtgacagaaga

SEQ ID NO: 25525 - DNA, 1196 bp, Homo sapiens
agcaagcaggccaaaggagaaacagggctgcgacgcctaggggtcacagggacgcagatgctgctggtggcccaggtgaggggtcctgcgtcctctgtcgcaaggctgccagcagctgcaggatctgctctcacatgttggacaggcaaggaccttgtggcacttctcaccctggctgtgtgccggaattgtggtggagcattttaaacacctctgggccctcttcacagcacaggggtcattctgatgagcagccaggattgtggccacaggccaagccaggagccagctaagggggttgggggagtgaggacaaggcaggctagaggccttgggcagacaggaggaactctgacccaggctccctgatgcccagtatgtctgcctggagagagactggtcccagtgagcctgacctcaggagctacaggtgttggcagccctagaagatgggctgggcaccaagttcaggaacaggagccaactgttctataacaggaacttttccctgaagttcccctgggagtactgtcttgcaaacacccagagatcttttgctaagtgcctcatagactttgacttactgactttgaaattactgaccttgaaattcatgattgcttttctgctcaatcacactgtcctccctttattccacaaacctgtatgagcaccccctgccaccaccacccatgggttggaccctattccagccctgggacacagtggggacaaatggacaaaggtctcactcttgaggagcttaccttygagtggggagatggagtgtagacacagatgaaatgtgtccattggtaaaaagcactatgaaaaggaataaaccaggacagaaaattaaagtggaatgctggtcagggaagctttttccagctaggtgacatttgggcagagaccttagggacatgagagtgggaggtcagaggacatggggaagaacattctggacagggggtttggggcaaaatgagccatcgagggaggtctcaccattctcatggttttaaaggaggaagctgccaaaatcatgtgtcattgaacatttggtttattcctactgatttgccttttcagtggcagtgcagctacatactagggaattggccatatcacgtttccctctcttccttaaaataggtatgaaaatatcaggtaagacagctcctagtgacagaaga

SEQ ID NO: 25526 - DNA, 1196 bp, Homo sapiens
agcaagcaggccaaaggagaaacagggctgcgacgcctaggggtcacagggacgcagatgctgctggtggcccaggtgaggggtcctgcgtcctctgtcgcaaggctgccagcagctgcaggatctgctctcacatgttggacaggcaaggaccttgtggcacttctcaccctggctgtgtgccggaattgtggtggagcattttaaacacctctgggccctcttcacagcacaggggtcattctgatgagcagccaggattgtggccacaggccaagccaggagccagctaagggggttgggggagtgaggacaaggcaggctagaggccttgggcagacaggaggaactctgacccaggctccctgatgcccagtatgtctgcctggagagagactggtcccagtgagcctgacctcaggagctacaggtgttggcagccctagaagatgggctgggcaccaagttcaggaacaggagccaactgttctataacaggaacttttccctgaagttcccctgggagtactgtcttgcaaacacccagagatcttttgctaagtgcctcatagactttgacttactgactttgaaattactgaccttgaaattcatgattgcttttctgctcaatcacactgtcctccctttattccacaaacctgtatgagcaccccctgccaccaccacccatgggttggaccctattccagccctgggacacagtggggacaaatggacaaaggtctcactcttgaggagcttacctttgagtggggagatggagtgtagacacagatgaaatgtgtccattggtaaaaagcactatgaaaaggaataaaccaggacagaaaattaaagtggaatgctggtcagggaagctytttccagctaggtgacatttgggcagagaccttagggacatgagagtgggaggtcagaggacatggggaagaacattctggacagggggtttggggcaaaatgagccatcgagggaggtctcaccattctcatggttttaaaggaggaagctgccaaaatcatgtgtcattgaacatttggtttattcctactgatttgccttttcagtggcagtgcagctacatactagggaattggccatatcacgtttccctctcttccttaaaataggtatgaaaatatcaggtaagacagctcctagtgacagaaga

SEQ ID NO: 25527 - DNA, 943 bp, Homo sapiens
tggycttccaccttcctccagatcccctaggcagctgcctaccagactgggcactccctctccagctccaacatcgggtatcatggcccttgagaatatggtgatttccagcctaagccttggaaccagatgacctggtgtcaattctggctctgatacttcctacaagtgtaatcctgaatgcatttcttcaccttatgaaccctagtttcttcatctgtaggtaagaaaaataactctaaagcaaaagtgggtaagagaattagatgagatcattcatatataacacttggcataaggtccagcacatataactatttccggatattgttatgcttcataactggttaactggggtaggagctgtccctggccttgctctggttcctttttgttatgactttagccttttccccaccaatctggtatgctgagagtctaacatatcaccaggtctaatgtgctccggggaaattctgtgattgcatttgtgtgaaaggacattcacatgtacacatttttaaggaagggttggtgatcaacccccaaatcaattcactgtgattcttcctctttttattatttccactctgaatggagaaaaaatagacccctgtcacttctgggaacacagtgaaattgacacctctcttttcagaaaaccttgttaaaggctcagtacataggactggtgggagaaggttgttgaatcatactacttggttcatagcaggattgagaataggtttacgaactgcaagcatatgagaagatatttataggaagggttgtgacatgttattctccaccattgccaataatagcacaagaataaattaaataagttataagaggaaagagccaggttagatacaaagaagagagtatagaaataggccaaagagacccagaccagaaggtacaaaaattgggattgtcctag

SEQ ID NO: 25528 - DNA, 943 bp, Homo sapiens
tggtcttccaccttcctccagatcccctaggcagctgcctaccagactgggcactccctctccagctccaacatcgggtatcatggcccttgagaatatggtgmtttccagcctaagccttggaaccagatgacctggtgtcaattctggctctgatacttcctacaagtgtaatcctgaatgcatttcttcaccttatgaaccctagtttcttcatctgtaggtaagaaaaataactctaaagcaaaagtgggtaagagaattagatgagatcattcatatataacacttggcataaggtccagcacatataactatttccggatattgttatgcttcataactggttaactggggtaggagctgtccctggccttgctctggttcctttttgttatgactttagccttttccccaccaatctggtatgctgagagtctaacatatcaccaggtctaatgtgctccggggaaattctgtgattgcatttgtgtgaaaggacattcacatgtacacatttttaaggaagggttggtgatcaacccccaaatcaattcactgtgattcttcctctttttattatttccactctgaatggagaaaaaatagacccctgtcacttctgggaacacagtgaaattgacacctctcttttcagaaaaccttgttaaaggctcagtacataggactggtgggagaaggttgttgaatcatactacttggttcatagcaggattgagaataggtttacgaactgcaagcatatgagaagatatttataggaagggttgtgacatgttattctccaccattgccaataatagcacaagaataaattaaataagttataagaggaaagagccaggttagatacaaagaagagagtatagaaataggccaaagagacccagaccagaaggtacaaaaattgggattgtcctag

SEQ ID NO: 25529 - DNA, 943 bp, Homo sapiens
tggtcttccaccttcctccagatcccctaggcagctgcctaccagactgggcactccctctccagctccaacatcgggtatcatggcccttgagaatatggtgatttccagcctaagccttggaaccagatgacctggtgtcaattctggctctgatacttcctrcaagtgtaatcctgaatgcatttcttcaccttatgaaccctagtttcttcatctgtaggtaagaaaaataactctaaagcaaaagtgggtaagagaattagatgagatcattcatatataacacttggcataaggtccagcacatataactatttccggatattgttatgcttcataactggttaactggggtaggagctgtccctggccttgctctggttcctttttgttatgactttagccttttccccaccaatctggtatgctgagagtctaacatatcaccaggtctaatgtgctccggggaaattctgtgattgcatttgtgtgaaaggacattcacatgtacacatttttaaggaagggttggtgatcaacccccaaatcaattcactgtgattcttcctctttttattatttccactctgaatggagaaaaaatagacccctgtcacttctgggaacacagtgaaattgacacctctcttttcagaaaaccttgttaaaggctcagtacataggactggtgggagaaggttgttgaatcatactacttggttcatagcaggattgagaataggtttacgaactgcaagcatatgagaagatatttataggaagggttgtgacatgttattctccaccattgccaataatagcacaagaataaattaaataagttataagaggaaagagccaggttagatacaaagaagagagtatagaaataggccaaagagacccagaccagaaggtacaaaaattgggattgtcctag

SEQ ID NO: 25530 - DNA, 551 bp, Homo sapiens
cagcctggagaggtgatggcagtggcggccatggcagggtgtgaggcagcagggagcagcgggagcgaggcacgctggaaagtgggtgcccagcccataaggggtggcgtctgtgcagaacatttgccrtgggggtgagggtccagtagtactagaacgtccactctttttcatttttcctgagaataaccctaatctagacttgtgacattttttgacttttagttgctaaaaatatttttagaatactctgtattgcacatcaaacacttgctggattagtcccacgggtcaacctctgattttgtgtctaccaatgaatggtaaggccctaaactgaccctgtgggcaccaggagtctacagtccctgctttccgtgagcttccagtctacttgcgaggaaagaaaacatacttggaaaacaactaaaatgagacaggcaaataggaaatgctataggaattcaaagaagagaataaagaacctcatctttaacaatcaggaaaaacatcacacacaccgtggaaggagttgggtagaagtgtcactg

SEQ ID NO: 25531 - DNA, 551 bp, Homo sapiens
cagcctggagaggtgatggcagtggcggccatggcagggtgtgaggcagcagggagcagcgggagcgaggcacgctggaaagtgggtgcccagcccataaggggtggcgtctgtgcagaacatttgccatgggggtgagggtccagtagtactagaacgtccactctttttcatttttcctgagaataaccctaatctagacttgtgacattttttgacttttagttgctaaaaatatttttagaatactctgtattgcacatcaaacacttgctggattagtcccacgggtcaacctctgattttgtgtctaccaatgaatgktaaggccctaaactgaccctgtgggcaccaggagtctacagtccctgctttccgtgagcttccagtctacttgcgaggaaagaaaacatacttggaaaacaactaaaatgagacaggcaaataggaaatgctataggaattcaaagaagagaataaagaacctcatctttaacaatcaggaaaaacatcacacacaccgtggaaggagttgggtagaagtgtcactg

SEQ ID NO: 25532 - DNA, 551 bp, Homo sapiens
cagcctggagaggtgatggcagtggcggccatggcagggtgtgaggcagcagggagcagcgggagcgaggcacgctggaaagtgggtgcccagcccataaggggtggcgtctgtgcagaacatttgccatgggggtgagggtccagtagtactagaacgtccactctttttcatttttcctgagaataaccctaatctagacttgtgacattttttgacttttagttgctaaaaatatttttagaatactctgtattgcacatcaaacacttgctggattagtcccacgggtcaacctctgattttgtgtctaccaatgaatggtaaggccctaaactgaccctgtgggcaccaggagtctacagtccctgctttccgtgagcttccagtctacttgcgaggaaagaaaacatacttggaaaacaactaaaatgagacaggcaaataggaaatgctayaggaattcaaagaagagaataaagaacctcatctttaacaatcaggaaaaacatcacacacaccgtggaaggagttgggtagaagtgtcactg

SEQ ID NO: 25533 - DNA, 673 bp, Homo sapiens
ttttcactgtaatagtcaaatatataacaacagcaaaagattctacataagggaaaaatagcttacatttaggtacattaccaagtattagtctgaaaacatctacctttcaaacataatttagataatgaaacacaaagaagagcagctcagcgtgaccataatcttggtttcttactttgtggctgagggcaagaatatctttatattggcatatccaccaccccagggctgttgcttctgttctagagcaccctggaatcactaattacagcatcacccagtatacaagcccctgcatcacaatgtctgtcccttagccgtagacctgtcacatgytaatcatgtgttctaagaccttattataatcctaatgctacagatgacctcagggtagcccctctccctcctagcaaagtcattattatcctcttttaaagatgaagcaaaccagtgcagtggctctcgcctgtataatcccagcactttgggaggctgaggtgggccaattgcttgagcccaggagttcgagaccagcctgggcaacacagtgagaccaagtctctacaaaaaatacaaaaattagccgggcatggtggtgcacacctgtggtctcagctatgtaggaagttgaggtaggaggatcacctgagcctggggaggttgaggctgc

SEQ ID NO: 25534 - DNA, 673 bp, Homo sapiens
ttttcactgtaatagtcaaatatataacaacagcaaaagattctacataagggaaaaatagcttacatttaggtacattaccaagtattagtctgaaaacatctacctttcaaacataatttagataatgaaacacaaagaagagcagctcagcgtgaccataatcttggtttcttactttgtggctgagggcaagaatatctttatattggcatatccaccaccccagggctgttgcttctgttctagagcaccctggaatcactaattacagcatcacccagtatacaagcccctgcatcacaatgtctgtcccttagccgtagacctgtcacatgctaatcatgtgttctaagaccttattataatcctaatgctacagatgacctcarggtagcccctctccctcctagcaaagtcattattatcctcttttaaagatgaagcaaaccagtgcagtggctctcgcctgtataatcccagcactttgggaggctgaggtgggccaattgcttgagcccaggagttcgagaccagcctgggcaacacagtgagaccaagtctctacaaaaaatacaaaaattagccgggcatggtggtgcacacctgtggtctcagctatgtaggaagttgaggtaggaggatcacctgagcctggggaggttgaggctgc

SEQ ID NO: 25535 - DNA, 2030 bp, Homo sapiens
gggcttcctttgctgaatcctaacgaggcagttatgccaggtaggaaagggaagtgctgccccagctagctagatgccgcaacagaggaggcaaggaattcctccaaagagagaggcacacttgggtgtgatggcctttggtttgaagctggagttccttcttactccccaagttcatgggccaccagcctgagaaagcagtgaaaatgctttcctttgtctgttttcttgtttttgtttttatcaaagatttgaacaggtacacttgcaatttctgatgaaagcattttaaccaacatagatacacctctatctgtttttgcaagggtaggtaaatagaggtgaatggcaggacagataagtgagaacccccagctgtcaaaaggagaggaccattatgagaaaaggtgttcttgtgagacagtgattataaaagaggactaaaatgtctaaaagctcatcttccaaaattgattaaataaagtgcctcatcgccataaaatggcagccattagaatgatatgattagaaacatttattgcatgaaaggattttcacaatatattgcaaagcttaaaaaaaagagagcaagaaaacaaatgaaataatagcagaatgaatgcattgtgtgtatggatgggaggaaggcgggagtgagggttggcaataataggaagatcaatactaaaaaattatacaccaaaatagttaataaggcaaaaagttaatataagtctggaatttgatttcaatgattttataatctttttgatgatgtatttttaattttttcacacaaaatgaacataaagggatatgtttttcttaaagtaaatattgtttctcagaaagcttacttcccagaaagacactagactgaaactatattatggatgcgttcttaacacttaacaaagagaggggtaatttcaattctatttaaaatattcttcaatgcaggaagaaatggaaagtataccaattcattttatgaaactatcatatctctggatatcaaagcctaacaaagggagttggaaaaaaatcaagcaggagccaatttcggttgtgaatatgatgcaaatttttgaaaatgataatagaattgtttttagtattttggtaagtaataatgctatggccaagtagcgtttcatctcaaagtgcgaacatattttaatactagcaagcttattaacaaaattgttaagcacatcagaaagataagctaaggctctagagatgcttatatttgtgacacacaaagcaagagaaaatggctttcatttcaatctggcactttgctgcgatggtacattcaacagagaaagagggccctgtcacaggtgacccccaacaaggatagccttgccagttacaggtggcaggctgggaggttgccacaacctagcgaggagaagactgatggctcagaatgtcgtactcactctctattgaagaagtttggtcctctaaaacgactaaacaaacaaagcaacaacaacaactacaaccacctaagttttaccccactctccccttcggaccctgaaagacttgtgcagggatttaaaccatctctgacaaaatcccctatcaaacagacaatgaagaaaactttaaaaaataggtcaatcattttattcttcagtaattatataaataggtaattcattttattcttcagtaataaaatgaattacctatttatataattcaataataaattacctattcaaagaaacagaagcaaacttaaaaaataagtagttcattatatcactgaaaattgtgaggrcatttgatttagatcaagatgtgaggtcaggaaacgcttcctaggggtgaaaacaagttatttaaaaaatgtgatggaagcagtaaattgcagatgtaagaggcagaaataaaatcggcaaattggaagacaacttggaattctcccagcattaagagaaaaataaaagaatcaatatgatgagaagaaacaacagacatgaatgagcgatcctgatagttcagtttatgca

SEQ ID NO: 25536 - DNA, 498 bp, Homo sapiens
agacggggtttcaccatgttggccaggatagtctcgatttcctgaccttgtgatccacctgccttkgcctcccaaagtgttgggattacaggtgtgagcctgtgtggtatgtcttttttctaaaataaaatgtgaaagacaaaaatctaaacctttctttttatgacttaatctgaaagcctgtggtattaatatatttccaccagaaattattaaaccatgttttcatagcagatgatttgctgccaaaattttaaaagcaaagctgtttgtgcctactcatagagaattatgtgtatatttgtagttctactcagcacaaagaaatgcttctagtgataagagtggaactgaaaacagaatacaatgcatttgtatgattaaaaaccaaaacataaatatagccctgcatcatggaaaacacataatgctatttttgataagtgcaatatttaatctcatttttgctaacattaggtgaaaattgattttccccct

SEQ ID NO: 25537 - DNA, 633 bp, Homo sapiens
tcaaaaatagggataccttctcctgccgcaactactgtgatgcggtacccaataatggtggaagagtttagcggggtccacctcaggccgatgcttgaatcggttatatcaacaaagcttaggtcagtgagttggggcacctctattgagttacaaagcaaaggggggggaggcaaaaggaaaatagagggaaaaaaagaggaaaaaataaagcagtgtatatcaggttactagtagtaaaattggtggaatgttaaagcaatgatggtaatatgcaatctgttttaaattctctgaaaagacttcctaagcatcatgaacagtttgcttccctagaagaataaacaggaatattcttttagggaatatatatatatatatattttttacattttgaaaacatccttaaagggtacaatttgaactgttcagattcctaaaaatcatatggctgtttaggatgtcraaaccattcttagagcctagacataatatctgaagtaagtatcagcaatgcttttaataattccaaaactgttttagtagaaaataagcttgcatgaagaaggttaaaaaataataaatgggtgataaattgattttttttctcccatacaaaactcatgacaacat

SEQ ID NO: 25538 - DNA, 633 bp, Homo sapiens
tttctccacatcctcaccaacacttgttattttttgtttttgtttttacttaacaatagttatcctaaatatgaggtgagatgtcattgtagttttcatttgcattttcctaaagattagtgagtttgaacatttttcacaggcctattggccatttgtataacttatttggagaagtgtcttttcaagtcctttgccacttttgaatcagggtgtttattgtrattgttgtagaattttagaattccctatatattctggatattaatcctttatcacatatataataaaatttccccatctcatgctagttaacagtgacaataaaaacattaaatcataaaaaaagagtgagagtgatttcaccagtcaagtgactcctaaaaatttctagttttaccttaaagtcaaatagaatgccaatacaaatgtctcttaaggcctgacattagttaagatatatttgcttattggaaggtaagggaaagggcgatgtgaatggggaaaggtgagtggccacaggagggcatatttatgtaaaaatattttttgaaaaacctacacgccacagttaaaaaatctagtaagtgctcaggctgatggttttaatgttcataatagatccaagagatg

SEQ ID NO: 25539 - DNA, 633 bp, Homo sapiens
tttctccacatcctcaccaacacttgttattttttgtttttgtttttacttaacaatagttatcctaaatatgaggtgagatgtcattgtagttttcatttgcattttcctaaagattagtgagtttgaacatttttcacaggcctattggccatttgtataacttatttggagaagtgtcttttcaagtcctttgccacttttgaatcagggtgtttattgtgattgttgtagaattttagaattccctatatattctggatattaatcctttatcasatatataataaaatttccccatctcatgctagttaacagtgacaataaaaacattaaatcataaaaaaagagtgagagtgatttcaccagtcaagtgactcctaaaaatttctagttttaccttaaagtcaaatagaatgccaatacaaatgtctcttaaggcctgacattagttaagatatatttgcttattggaaggtaagggaaagggcgatgtgaatggggaaaggtgagtggccacaggagggcatatttatgtaaaaatattttttgaaaaacctacacgccacagttaaaaaatctagtaagtgctcaggctgatggttttaatgttcataatagatccaagagatg

SEQ ID NO: 25540 - DNA, 1594 bp, Homo sapiens
aaaaaaaaaaaaaagaaaaaagaaagaaagtgatgtacagaaaataaaagtgaggtacataagcagctggattaattatagtctggcatttgccttatttgaaccaagtatgaaaagtaggctgtctttgattggccaaaactcagtgactggtacaagagtaggctacagcctttttacacatccactttagttacagtttactacgtatggtgaaacctttaggcccaactaaaatatttaagggggcagctttaagctaagcttaatttaacgtaacaaaagtgccttcccaagcccccctgaccagccaactgattttcaagcctcctgggagccaaccatcctctaaagtaggaaggctttgttcctcagtgggtattctctagaaacgtaagaacccagtcagggaatgagccaccttcgtgtttaagggaaggaagaattgaaagccaggcatggtggctcatacctgtaatcccagtgctttggaacttgaggccaggagttcaaggccagcccaggcaacatagtgagaccccatctctacaaagcatttaagaattaactgagcatggtggcatgcacctgtagtcctagctactcgggaggctgaagcaagaggatcctttaagcccagagttcaaagttatagtgagctatgattgtgccactgcattccagcctagacaacagagcaagaccctatctctaaaataaaaaataaaagaggtagagggaacaagcaaagaagtatttctactattatctaagagtcttcccaaattctgaaagaagttttgcctgaatcataaagatgaataatgataatggaaaaagtatcaaagtcatgggaaacagaaatatgtcacatggacagagarccaagtactgttttaagggctgtatatgtacaaactattttgaccctcacaaaacccctatatggtaggtactttcaccattctcaattgctaatgagaaattggagcacagagaagttaagtgacctgcccctggtcaaacagctaagaagtggcagagctgagatttgaacctagactgtccggctggagtggggcctctgagcttctaggcaccgctgcctcatgcagtttgatcctatcaataataacagcaaagacataaagagcatgttcccattaacaaagtgctctcattcacttactcaaaacaacatttttggtgtagcacccccaccaggcgcaggcccagagatagagtggtgagcaagtaatacacaggtcctgccctcatggtgctttctcttgagcagtggagacagatcaatcagctgctcttaaaagtaagtgtataagggcagtggtaagtgctctaaaggaataggcatcacagccactgctctctgaaacaaatattattttcatcatttcacagatgaggacattgggatttcagagtgaagtgcaacataacaaaaaattcacagaacttaagattttttagttgtatttctttttgagatatacagatttaatatatctacatgatttggcattcaaaagatattagaaggcagtcagaaaatgtctcctttcctcccctggcccca

SEQ ID NO: 25541 - DNA, 1225 bp, Homo sapiens
ggtctgagtcagcctgcctctgtccccatccatctgtctgtctgtctctttcttcccctccctccctgcctcctcactgtttcacatggtcattgtaaaaaaaaaacctaaaaaattaggaaatatagataaattgaaaggaaaaattttaaaccatgaggttgttcctttcttatttaaatatggtggttcccttgtttcatgagccataggctttgggcctgggcaggatctgtagcccacagcctttgagttcttgacctatcctctgagatttttagggttcaaagtagaaagacttggtcccctgcttccagtcctatctggtacccactccctcatcttttctggctaaccattgtgcttcccagtaattatgtttaacattttctcacatagggattaacaacataggctctggactcagagtgcctaggtttaaatcttgactccaccacctccttagtagttattcagtctctttgtgcctcagtttcttcatttgtaactaacacctatctcagaagccgtgggaaggattaagggatgtgataggaagcactcactgactcttggatatcattatttatggttgttacttggtgtctctggctgcattttgtttgtcgctgctggttccgtgactgtccatcagtgtgccttgcgcctgttctgtagattttatttcacagtctcttggttttggtgggtggcacactgccctgagaggatggggacgtgagaaagattctgagccctttagttgtctctagtgctacatcatgattgtcatcattgctgtaagccaaaaagtatatgagacaagtcttactcaatttagaacatgtattttgccaaagttaatgacgcacccatgacacagcctcaggaggtcctgacaacatgcgccccggggtggtcggggtacagcttgcttttatacatttcagggagacatgagacatcaatcaatatatgtaagatgtacattggttcagtccagtaaggtggaacaattcgaagtagggggtttccaggccagaagtagataagagacaaaaagttgcattcttttgagtccttgatcagccttccgatgaatacacaattgtgtctggctcagtgaacctacatttttacgtgaacaatagggcagaggaagcaatcagttatgcatttgtctcargtgagcctcaaagggatgactttgagtttgtgtctgtcc

SEQ ID NO: 25542 - DNA, 1819 bp, Homo sapiens
acattaaccaagaggactgtgaagcctggcagtgcctgcctgtggacctggacctcttgtgtccttggctcacctccgcaggcttctctggtggggtttttcgtttttttttttttttttttttttttttttgagatggagtctcgctctgtcgccaggctggagtgcagtggcgtgaccttggcttactgcagccttcgcctctcgcgttccaatgattctcctgcctcagcctctggggtagttgggattacaggcatgtgctaccacacctggctaatttttgtatttttagtagagatggggtttcaccatgttggccaggctggtcttgaattgacctcaggtgatccgcatgcctcaagcctcccaaagtgttggaattacaggcatgagccactgagcccggcctctgctgggtcttgtgtggcatttatgctcttttggatcgtgcttgcgaaatcttttttttgagacagggtcttgctctgtcgcccaggctggagtgcagtggcgcaacctcagctcactgtaacctctgtctcctgggttcaagcgattctcctccctcagcctcccaagtagctgggactataggtgtgtgccactacagccaactaatatttgcagttttagtagagacagggtttcaccatgttgcccaggctggtctcaaactcctaagctcaggcaatctgcctgcctaggtctcccaaagtgctaggataacaggtgtgagccaccatgcccggctcttgcttcccagatcggatccttgactaacgcacttttgtttctaattctcatttacacatggtcaattatttgactcaactggtggctgactgttacaatctgaattttgattttatagtctgtccatttagtgatttcagtggcagaagacaagacttgggaatctagaatctggcttattttttattttttttgagacgttgtctcgctctgtcgctagtctggagtgcagtggcgtgatctcagctcactgcagcctccacctccctggttcaagcaattctcctacctcagccaccacgtccagctaatttttttgtattttttagtagagatggggtttcaccatgtggccagactggtctcgaactcctgacctcaggcaatcctcaagccacggcctcccaaagtatgtttttctatgtttatttatctgagtctgctacttcttggcacacatgcatacagggttgaggtatcattagggtcttttcttttccatagaaagaagatcctgtgcttgtttagtatttgggtaggctcctctagaaatcagagatatttatcctcttagtctctatctggccttcttcatttttactcattctggttccaactgctgtcaatagctgtaaaaactgaattgctatgccagggcataataaacaatggctccctttgggaaattctgattttaatcaagtattattcctaaggggagtcttggaacaaaaatgaatgccatgcatacaagagtctactttccttatgtagggtagacgcttctaaacatctgaataattacaaattattgtccctctaggactcctgtgtgttcagatcttttaataaaccgatacaagttattacaagtgatatgaacactgaaaaaactagccaaattaacaaactccaaaaattactcagtatctttataatgatgcatcctgaagaacctaatagagcgtaggtacatgtgtttttaaaagtgatcaacattcttaaacatttcagcacctctggttctaccttaaatcctgtcacatttttatamgtaagttta

SEQ ID NO: 25543 - DNA, 509 bp, Homo sapiens
tggcatacaactgtaggcccagctactcgagaggctgaggcaagagaattgcttgaacccaggaggcggaggttgcagtgagccgagatcgcaccactgcattccagcctgggtgacagagtaagactccatctcaaaaaaaaaaaaattaaaaataaataaataaatatattcttaaaagttttctcacagttgatgtaaaaggatatttgtctccaatgcactctatagactgtcaatttattcacatctaacaaaagacgagaaatgccagtgcaacaaaggcatttagagtactataaaaacgcacaaatcgtcccggtgtggtggctcacacctgtaatcccagcactttgggaggctgaggcaggcggatcacgaggtcaggagatcragaccatcctggctaacacagtgaaaccccatctctactaaaaaattagccaggcatggtggcaggcacctgtagtcccagctacttgggagtttgaggcaggagaatggcgtga

SEQ ID NO: 25544 - DNA, 509 bp, Homo sapiens
tggcatacaactgtaggcccagctactcgagaggctgaggcaagagaattgcttgaacccaggaggcggaggttgcagtgagccgagatcgcaccactgcattccagcctgggtgacagagtaagactccatctcaaaaaaaaaaaaattaaaaataaataaataaatatattcttaaaagttttctcacagttgatgtaaaaggatatttgtctccaatgcactctatagactgtcaatttattcacatctaacaaaagacgagaaatgccagtgcaacaaaggcatttagagtactataaaaacgcacaaatcgtcccggtgtggtggctcacacctgtaatcccagcactttgggaggctgaggcaggcggatcacgaggtcaggagatcgagaccatcctggctaacacagtgaaaccccatctctactaaaaaattagccaggcatggtggcaggcacctgtagtcccagctacttgggagtttgaggcaggagaatggygtga

SEQ ID NO: 25545 - DNA, 747 bp, Homo sapiens
ttaaaacattagacacatgctttttaaattcaagaataagagaaaatgctgtcactattattgcaatatgagagcatgaggaaataggagtataaatactagaatgaaaaggagtgaattgcacatgacattcttgtttaaaatattcaagagaatccattggcagattggactaataagaaactgtagccaagtggaaacaggatatgagatckccattctcacacaggtttgcagcaggcataacccaagcctaaaaaactatacttccaggagcacattttttttttccaaaatttttttttccaaatctcctttggaagatgtggaaaaaaatcagcattatagtaagtattacatttttttccccaaatctcctttggatttttggaaatctccaaaggagaattgtatatttcaaaatgcatttaactgtgtgattgaggcattttcaccaatcttttagttggaaataatctaataacatgctaaaaaggcagataccgtgaggagaatctaatagaattctataatgtcttcccagcaattaaaatgctcaatttaaaatcatatgaattgatgccagcactttcacagttactatgtgcattttcaaagatgaaatacataaaatctcatgttagatcataattaacagatgaatattttcagttgttttgatgataggaaacactaacttggaaacttaagaaaaatgttattccccaaacaagaattccattcttc

SEQ ID NO: 25546 - DNA, 1078 bp, Homo sapiens
taaaataaagctcataaggctgggtatggtggctcatgcctgtaatcccagcactttgggaggccgaggcagacggatcacatgagatccagagttcaaaaccagcctggccaacatgccaaaccctgtctctaataaaaatacacaaattaactaggcatggtggcgtgcgcctgtaatcccagctactcaggaggctaaggcacaagaatyactggaacccatgaggcagaggttgcagtgagccaagatcctaccactacactctagcctagatgacagagcaagactctgcttcaaaaataataaataaaaataaataaataaagctcataatatgtttcaagggagtgtcatgggaatcagccaggatggctggaatacacctacctgcctggcacctgagtcagcttacggtatattcttcactcttcattcctcagcccaaggtgatattgggcttagcagggctgggaccgggctgcatctgggaataaggggaatcccgggcgaaagaaggttagaggacaaagtgccgtctttgctggaatcaaacattgtcttccagagaggagtcattttggggtctggataaaattctggtgcatgggcccaagacttggaacccatcccagccctggtaccagccaaaaagatgtaaggcaaaaatgagaatcctctctcctagttaattttaaaagacatgaaatttcctcagttttctccatgtatttatatgttttatgcaattttgcttaatacgtagatctttcttttgcctagcccagcaaggtcgagagattctcctctcaattatattttacagctaacctgctcctatacaaggaagtcagggtatcgggatatgtatagcaagatccagcagaaaatcagagaagaaaagaaaaaaaaatcagggatataaggtggataggaaatttatgattttcagtgttgagtgagtggaaaggagaagaaactggaagaaaagaggtgaagaaaatgattgagaggagttttgatgacgaaagaggccttttaaatagcagattctataaacctgcaggctaagccaaat

SEQ ID NO: 25547 - DNA, 1210 bp, Homo sapiens
agtttgaagatttcgtgcgctacctcggcgatccgaaccacagatggctagaccttcagtttggggaccacatcattcactgggtgacgtatgtagagctctgtgctccctgtgagataatgtacagtgtgattggacaccacgagaccctggaggacgatgccccatacatcttaaaagaggctggcattgaccacctggtgtcatacccgactatccctccgggcattaccgtgtataacagaaccaaggtggagcactatttcctgggcatcagcaaacgagacatccgacgcctgtatgcccgtttcgaaggggactttaagctctttgggtaccagaaaccagactttttgctaaactaatgcataagacctatgaattcaaatatctttattagacctggggctaaccaggtgaagatctgagcccagaaatgacccttcctccaccacacccctcctttgaggaygcccggggtctcccacaggcctgtgagttgcctcggcatatgacgcagaaccccaactgttacaacttagtttggatgtaagatgctctgaggaccctgcccacacccctgcgtgcattaggatgtcgctggcctttgctcacctcagaggggagaaaaggctaaagatttgcagtttgacagcccagcagggaggaagcatcacacagcgttaggagccgtttccttcaggtgttaaggaaggggatgcccctgaggttctcctggctagtcagggtggcttcacccatcactggtgggttgcaggaacagcacccaggactctgaggagggacagagaagcaagggggctgctgaaatcgcagagacttttgcagcatcagatctgaggagtaaaacggcacctctggccttcatcttggtgctgcgacaattgtggaggcaaagcattctttctgtgactattttgttcctgtagacagtcagcgatggccagagggtggtgtggtgtccaggggtccatctttccagaatccatgcctgtgtaatgctggtccatgcttctgaacctgtgtctgccaagcgcctatttcattcagcacaagacatacgattttagaaggtgaggggaggggaggctttttctacctgagaaggggagtgtctttgagggccttaaaaggaccatggcccaggaatgggggcgctggttgggcttggagctcaggctgctgtgga

SEQ ID NO: 25548 - DNA, 1210 bp, Homo sapiens
agtttgaagatttcgtgcgctacctcggcgatccgaaccacagatggctagaccttcagtttggggaccacatcattcactgggtgacgtatgtagagctctgtgctccctgtgagataatgtacagtgtgattggacaccacgagaccctggaggacgatgccccatacatcttaaaagaggctggcattgaccacctggtgtcatacccgactatccctccgggcattaccgtgtataacagaaccaaggtggagcactatttcctgggcatcagcaaacgagacatccgacgcctgtatgcccgtttcgaaggggactttaagctctttgggtaccagaaaccagactttttgctaaactaatgcataagacctatgaattcaaatatctttattagacctggggctaaccaggtgaagatctgagcccagaaatgacccttcctccaccacacccctcctttgaggacgcccggggtctcccacaggcctgtgagttgcctcggcatatgacgcagaaccccaactgttacaacttagtttggatgtaagatgctctgaggaccctgcccacacccctgcgtgcattaggatgtcgctggcctttgctcacctcagaggggagaaaaggctaaagatttgcagtttgacagcccagcagggaggaagcatcacacagcgttaggagccgtttccttcaggtgttaaggaaggggatgcccctgaggttctcctggctagtcrgggtggcttcacccatcactggtgggttgcaggaacagcacccaggactctgaggagggacagagaagcaagggggctgctgaaatcgcagagacttttgcagcatcagatctgaggagtaaaacggcacctctggccttcatcttggtgctgcgacaattgtggaggcaaagcattctttctgtgactattttgttcctgtagacagtcagcgatggccagagggtggtgtggtgtccaggggtccatctttccagaatccatgcctgtgtaatgctggtccatgcttctgaacctgtgtctgccaagcgcctatttcattcagcacaagacatacgattttagaaggtgaggggaggggaggctttttctacctgagaaggggagtgtctttgagggccttaaaaggaccatggcccaggaatgggggcgctggttgggcttggagctcaggctgctgtgga

SEQ ID NO: 25549 - DNA, 1111 bp, Homo sapiens
aaacatgagaaaattatacataaacctagaatacaattcaaaagccagatgtaaaatgaacacatggacttaatgggagatatttcctcaggctgcagcatcagccagagctgcttgtctaaggtctcataagcttctaccagaagacccacggaagagcatggttctccatggttttaccaatttaattcagccacaaaggagttgtttgtcatttttattattcctttagagccagaattgtagctgcacagaaaaagaataatttctttacttatgtgtatgakcatgggttggaaatatttaattatatcagtccaatagaaaaatctgacaaattgcaataggacctttccgtggtaaatgacgtccttccactccagctcaaattctcaaaaggaatctttaatatttccatctccccaactcgaagttactcatctaagctatttgatatgtactcacatttatacaacattttaaaatatttaatattttaagagtacgtcaaatatcccaatcactatgctacttagggtatatatagatgaactcaaacttatatttcttatcaaagaacttaacatatgatggacttatcattttcttcctattccatagatggctctgaaatactgcatatcttatatggatgattgtgaacataccaaacagcttactgtgcccagcaatatttctccattatggcccatctactaataggctaaatatttgtaatatagtattgtttatgtcaccttctataaagaaaatgactgcactttagttaggagtaggctgtggcgtccttctagagaagcatgactcagtgggtttcgagtgcaggcacataaccctgtacattatgtaaccacgccatgtgagccgcattaggtgatcacccacatgagcttgtgattggctctgagccactattgtctgtaaaaggtataataaaagctgtacatatggctcactcatgcccagagagagagtaaatccatgtgaaaactgtctacaattcctcaagtgttttccaaattacctgccacttgcccaccaactcccctcgcacctcagttagaaccgacaactggcattacgaagagga

SEQ ID NO: 25550 - DNA, 614 bp, Homo sapiens
gtataaccttatcttaatttaactgactacatctacaaagactctatttccaaataaggtcatattctgaagttccaggagtagaatctcaacatatcttcttggaagacacaatttaacctcataaagcctactaaataattatattatgataagtgataggtcaacaagatcaacaacttattaaataccacagtttctagttacaaaatagtaaatgttacaaatataaattgcacactaggtttagatgatttacattgtttcccatgtgtacttcagctaaaaaggagaagtagcattttctttttttttttctttcttttttttttttttgaggcagagtctcactcagtcgcccaggctggagtgcagtggctcaatctccgctcactgcaagctccacctcccgggttcataccattctcctgcctcagcctcccgagtagctgggactacaggtgyccgccaccacgcccagctaatttttttgtacttttttagtagaaatagggtttcaccgtgttagccaggatggtcacaatctcctgacctcgtgatccgcccgcctcggcagaagtagcattttcaacaattctttttttcccaacttt

SEQ ID NO: 25551 - DNA, 611 bp, Homo sapiens
tgatttgtgtaaaggacttaaaactttacctatgtgagaggtgctgtaagttcaaattcgagctcctccactttctagctgtgcagtttgggayaaattatcttaatttcatttagctttaatttcccatttgcaaaaagtgcattataattattcttgttataatttaaggtttaaatgagttagttcatgtaaaagtgagaaaaatagctctggcacatagtaaatgttaaataaatattaggcattaatgtcattattatcttcaccaacattaaatcattgaaagtaaaatgagggaaaaggaaaataagtttgactaaatagatggaaatttaaaagctttcaaagactggttaagagctgtaaaccaaaaaaggatctgagataggtctcaatcaatttagaagtttattttgcgaaggttaaggacatgtccaggagaaaaacacacagaatcacagatcaatctgtggtctgtgcctttctccaaatatgaatttaagggattcaatatttaaagaggaaaagtggtctggatgggaaaagagggaggggtatggcgattgatatgttgcaagagaaaaggagcagataggggaatggtcaat

SEQ ID NO: 25552 - DNA, 546 bp, Homo sapiens
agcttcaggtattgagtatctaacagggccaaatgtttagtgcaccttatctcaatttctcactacaaagctggaaactaaggctcagcaatgtgaaattactcacccaagatcacacagctaataagtgacagtcagcattaagccaggtcggtgtgggtccaaacctgggctctttccactccaccacttccctttctatttcacttcacagtcagtgactgtaatgttgtagaataaactgggttcttgtcacacgaccagaaaagattaggcaagcagacactttgaagggtgagaggttatggaatttattgggcaaaaaggaaaaagactcagcaaagcaagagagrttcctgttaacaggcccccatctcacagactgaatcccaggttcccacacaggaacagaaggggccaggctcctccctactgcaaacagcgcaaacttccggaggcctcacccatcctcccaatgcgcaggcgggttggagattctccggggagctcgttttacttggctatctcagtaatatgaaaaaggca

SEQ ID NO: 25553 - DNA, 569 bp, Homo sapiens
aatttgggaaatactaagtttaatgaaataaagcatgttactttactttttgcagccaaatatgcactgtgattctctaaggtttgtaggtgaagaaggagttagcatttcccagacttatttgtttgagatttgtgtagattaagaatgtaggctgggtgcgaaggctcatgcctataatcccagcactttgggaggctgaggcgggaggatcgcttgaacccaggagtttcagaccagcctggaaaacatgatgagacacctgtctctacaaaacaatacaaaaattagttgagcatagtggtgtatgcctgtggtcrcagctacttgggatgctgaggtgagagaatcgcttgagctcaggaggtcaaggcttcagtgagctatgatcacactactgcactctagcctgtgcaatagagtgagacctgtctcaaaaacaaaaccacaacaaacatgtgtctggcagcataaaacatataacatacatatgctatttatgtgtgagtgtgtatatgtctgtaaatatgccttataaaatgccaccaatgtgcatttatttgtctcac

SEQ ID NO: 25554 - DNA, 569 bp, Homo sapiens
aatttgggaaatactaagtttaatgaaataaagcatgttactttactttttgcagccaaatatgcactgtgattctctaaggtttgtaggtgaagaaggagttagcatttcccagacttatttgtttgagatttgtgtagattaagaatgtaggctgggtgcgaaggctcatgcctataatcccagcactttgggaggctgaggcgggaggatcgcttgaacccaggagtttcagaccagcctggaaaacatgatgagacacctgtctctacaaaacaatacaaaaattagttgagcatagtggtgtatgcctgtggtcgcagctacttgggatgctgaggtgagagaatcgcttgagctcaggaggtcaaggcttcagtgagctatgatcacactactgcactctagcctgtgcaatagagtgagacctgtctcaaaaacaaaaccacaacaaacatgtgtctggcagcataaaacatataacatacatatgctatttatgtgtgagtgtgtatatgtctgtaaatatgccttataaaatgccaccaatrtgcatttatttgtctcac

SEQ ID NO: 25555 - DNA, 1242 bp, Homo sapiens
tccatgttaaaatcatcaagaaatatgataagaatgtttccaagaaagaatattcctatggtagagtttaaagatataaaattaaaaactgtgggttttagagagtagaaagtgaaaaggtctagaaatggtgatcaggagccagcatgacaactccccatttccaggaacgagggaaccagggctgtgaggatgaagaagcaacacttgagggggctcaggtgaagcagtcttcaggagagaaatagacttcagacagagcgggcagctgaagggagtttccaaagatgctgaggctacaggggctctgcrgaggatggactgcaaattcctcagacagctttgagtctccacatgcttctcatgttggagggtggttgtgtggatgtgagtcctggggatgaggttcccctgagtatcttgagtgtcttgtgtttggcacaaactgggatacaggaataaagataactagctgctgtatattgtaagaacaagtttgccccagctctttgggaggccaaggtgggcggatcacgaggtcaggagattgagaccatcctggctaacacggtgaaaccctgtctctactaaaaatacaaaaaaaaaaaaaaaaattagccaggcgtggtgatgggtgcctgtagtcccagctactggggaggctgaggcaggaggcaggagaatggcgtgaacccaggaggtggagcttgcagtgagccgagatcgtgccactgcactccagcctgggtgacagagtgagactctgtgtcaaaaacaaaaaaaaaaagtttgcaaattctaagttttgtgataaaaggaaacaaaacttggtcagttgccttagatagggcatttggtattatacaaatgagaaagccagtagtgacagaaatatttaggtctgattgtgtcatgcagtttcatctctccttaactcagcatttttctgatgaattttttcaaagtatatttgaaagaaatgcatctggaatttaaaccagtttcttaagttgtagaccaagcactgttgaaccaaatattagtgtctcagaaaaggtctgttaccaaatccagaaacccgggatgctgtatatgtgtgtgtgtgtgtgtgtgtgtgtgtctgtgtacgcgcacataagtgtgccacacaaactttgtaccttcattgtcttttttgtgtgccttattggagaactgaagtgacaatcatttttcaccctatgttaatgcctaatttaagtc

SEQ ID NO: 25556 - DNA, 1242 bp, Homo sapiens
tccatgttaaaatcatcaagaaatatgataagaatgtttccaagaaagaatattcctatggtagagtttaaagatataaaattaaaaactgtgggttttagagagtagaaagtgaaaaggtctagaaatggtgatcaggagccagcatgacaactccccatttccaggaacgagggaaccagggctgtgaggatgaagaagcaacacttgagggggctcaggtgaagcagtcttcaggagagaaatagacttcagacagagcgggcagctgaagggagtttccaaagatgctgaggctacaggggctctgcggaggatggactgcaaattcctcagacagctttgagtctccacatgcttctcatgttggagggtggttgtgtggatgtgagtcctggggatgaggttcccctgagtatcttgagtgtcttgtgtttggcacaaactgggatacaggaataaagataactagctgctgtatattgtaagaacaagtttgccccagctctttgggaggccaaggtgggcggatcacgaggtcaggagattgagaccatcctggctaacacggtgaaaccctgtctctactaaaaatacaaaaaaaaaaaaaaaaattagccaggcrtggtgatgggtgcctgtagtcccagctactggggaggctgaggcaggaggcaggagaatggcgtgaacccaggaggtggagcttgcagtgagccgagatcgtgccactgcactccagcctgggtgacagagtgagactctgtgtcaaaaacaaaaaaaaaaagtttgcaaattctaagttttgtgataaaaggaaacaaaacttggtcagttgccttagatagggcatttggtattatacaaatgagaaagccagtagtgacagaaatatttaggtctgattgtgtcatgcagtttcatctctccttaactcagcatttttctgatgaattttttcaaagtatatttgaaagaaatgcatctggaatttaaaccagtttcttaagttgtagaccaagcactgttgaaccaaatattagtgtctcagaaaaggtctgttaccaaatccagaaacccgggatgctgtatatgtgtgtgtgtgtgtgtgtgtgtgtgtctgtgtacgcgcacataagtgtgccacacaaactttgtaccttcattgtcttttttgtgtgccttattggagaactgaagtgacaatcatttttcaccctatgttaatgcctaatttaagtc

SEQ ID NO: 25557 - DNA, 1242 bp, Homo sapiens
tccatgttaaaatcatcaagaaatatgataagaatgtttccaagaaagaatattcctatggtagagtttaaagatataaaattaaaaactgtgggttttagagagtagaaagtgaaaaggtctagaaatggtgatcaggagccagcatgacaactccccatttccaggaacgagggaaccagggctgtgaggatgaagaagcaacacttgagggggctcaggtgaagcagtcttcaggagagaaatagacttcagacagagcgggcagctgaagggagtttccaaagatgctgaggctacaggggctctgcggaggatggactgcaaattcctcagacagctttgagtctccacatgcttctcatgttggagggtggttgtgtggatgtgagtcctggggatgaggttcccctgagtatcttgagtgtcttgtgtttggcacaaactgggatacaggaataaagataactagctgctgtatattgtaagaacaagtttgccccagctctttgggaggccaaggtgggcggatcacgaggtcaggagattgagaccatcctggctaacacggtgaaaccctgtctctactaaaaatacaaaaaaaaaaaaaaaaattagccaggcgtggtgatgggtgcctgtagtcccagctactggggaggctgaggcaggaggcaggagaatggcgtgaacccaggaggtggagcttgcagtgagccgagatcgtgccactgcactccagcctgggtgacagagtgagactctgtgtcaaaaacaaaaaaaaaaagtttgcaaattctaagttttgtgataaaaggaaacaaaacttggtcagttgccttagatagggcatttggtattatacaaatgagaaagccagtagtgacagaaatatttaggtctgattgtgtcatgcagtttcatctctccttaactcagcatttttctgatgaattttttcaaagtatatttgaaagaaatgcatctggaatttaaaccagtttcttaagttgtagaccaagcactgttgaaccaaatattagtgtctcagaaaaggtctgttaccaaatccagaaacccgggatgctgtatatgtgtgtgtgtgtgtgtgtgtgtgtgtstgtgtacgcgcacataagtgtgccacacaaactttgtaccttcattgtcttttttgtgtgccttattggagaactgaagtgacaatcatttttcaccctatgttaatgcctaatttaagtc

SEQ ID NO: 25558 - DNA, 965 bp, Homo sapiens
agctcccctctgtttttggattattacaatcttagaatgggttctgggcctaatactgcatttttacaaacttgtaaacaaactcagatatattaaaaaaaaaacaactagaaagcaaggattccaacactatgttagattaaaaatgatcaaaagagttggcagtatttaccactgaggaaaacaataaataaggcctcagggataatatgatagctgtccaccaatatctgaggaactgacacagtcaggggggattacatttwtttagtacaacccgaagtagtaaaactggcaagagtgagtagaagcagctataaacagaggattcaagtcttaacaagcaagatctttctaatggttggagctttacaaatatgaaatgaagtgctttgagagagaataaattctctgatactggatgaccatgcagaagagatattgcaacagagatacaaaaattagatggatggttagactggatctttgagtttcaatcctgtgatttttgttttaattctaggctcttccttttgaacaagaaagaacgggcacgggcaggtggctatgctgtctgatctaaacaagcagcagcctgctcagggtctttggagaaagcccaccctgagttaggagattttggccgttactgaagtagcaagacctgtagactttctcactcacatgtgactttttcttacatcttccttattgtgcaaaaatcatcttttgtttcacctttgccatatatatcataaatttctgatctcactttgaaacaggccattcctaattgatttgtccagaagttacactcaaaatggctttgcgattatttaactgaagcaggtgcagacatagcctctcagctttctataaattcaaagactagtccttacattaagctccctacctctaaaggaaaattaaactggctcagaggcacctatttatccaaaacaaaa

SEQ ID NO: 25559 - DNA, 1217 bp, Homo sapiens
catcttaatgcacagacctagaatattgagtgggtgtgagcagtgcagagtgcaggggtgtgtgwgtgtgtgtgtgcatggtggtggtggtatggttgatcaatgctgcaagtgtaagttttggttaaaatcgtgctgttataatagtaggcccccacatatatcctgggttaaacacaatggaagtgtattttttgctcaggtacctatactggaaaaagacagaaagatggggtgacttttcttcacacagtctgggaccacgttctgggatccattctgacagaagatctgccatcttctgcacacgtccaacactgccgcattggtggtcgtctccattgcagccaataggaaaggggaaagagcaagggggagaatgtagagggtgttcttatgggcaggcctgggagtggtgtacattacttctgttcacatcacactgcctggaattgtacattctttggccacagtaactgcaagggagtctgggaaaggtagtctagaagtgtacccaggtaggtgaggagaagtggactttgggacagaatagcagatgcaaaggcattggggtaggaaacacatggcttgatggagattgaagaaggacagatgtacaattgcctaagagaagcccacagtgagaagaaaaatgagattgaaactgagctctgaagagcttcaaaattttgcttcttgaggtttagataagataggatagactggagtatgctgccgtaagaagcaactccaaatcttagcgttctaacttaatagtaattgatttttcatgcaaagtctgtaggtctacgtaactctccaggaactttgcgctgcatgctgtgacacaattatgtagaatgtttccacgtgcggttctgccatctcagcacaaggtttcctcagtctcctgtgttggtcgcagaagaagataactggggccactactgcccacagcccacaggtcagagctagttacatggccttgcctaaccacaatgtttggtaagcattgtcactgccgtagtcctctctctggtgccaacacaactttgctctcctgtttccaaaagtaggactcactttgcaagggagacgatttacagccacatcaaatcatggctttgagcttcaatttcaggatctctgagtgatctcacaatagtctctatgtcaggtctgtacatggccagtcctgtttcagggacaagtaaact

SEQ ID NO: 25560 - DNA, 1217 bp, Homo sapiens
catcttaatgcacagacctagaatattgagtgggtgtgagcagtgcagagtgcaggggtgtgtgtgtgtgtgtgtgcatggtggtggtggtatggttgatcaatgctgcaagtgtaagttttggttaaaatcgtgctgttataatagtaggcccccacatatatcctgggttaaacacaatggaagtgtattttttgctcaggtacctatactggaaaaagacagaaagatggggtgacttttcttcacacagtctgggaccacgttctgggatccattctgacagaagatctgccatcttctgcacacgtccaacactgccgcattggtggtcrtctccattgcagccaataggaaaggggaaagagcaagggggagaatgtagagggtgttcttatgggcaggcctgggagtggtgtacattacttctgttcacatcacactgcctggaattgtacattctttggccacagtaactgcaagggagtctgggaaaggtagtctagaagtgtacccaggtaggtgaggagaagtggactttgggacagaatagcagatgcaaaggcattggggtaggaaacacatggcttgatggagattgaagaaggacagatgtacaattgcctaagagaagcccacagtgagaagaaaaatgagattgaaactgagctctgaagagcttcaaaattttgcttcttgaggtttagataagataggatagactggagtatgctgccgtaagaagcaactccaaatcttagcgttctaacttaatagtaattgatttttcatgcaaagtctgtaggtctacgtaactctccaggaactttgcgctgcatgctgtgacacaattatgtagaatgtttccacgtgcggttctgccatctcagcacaaggtttcctcagtctcctgtgttggtcgcagaagaagataactggggccactactgcccacagcccacaggtcagagctagttacatggccttgcctaaccacaatgtttggtaagcattgtcactgccgtagtcctctctctggtgccaacacaactttgctctcctgtttccaaaagtaggactcactttgcaagggagacgatttacagccacatcaaatcatggctttgagcttcaatttcaggatctctgagtgatctcacaatagtctctatgtcaggtctgtacatggccagtcctgtttcagggacaagtaaact

SEQ ID NO: 25561 - DNA, 1515 bp, Homo sapiens
  misc_feature (1)...(1515): n = A,T,C or G
tgtaagtttgctgtcaaaattctaagatcagatcctagaaaacatttaatattaactactcttatctaccaggattcagcatgtaggattggacattttgaaacttagtttcatactgttatctgaagacagggaaaaatttaaaatgtgataactgattttcagctaaatccaataaccaaagccaagatatcctaggcacagttaaagctaatgtaagtatttgtgagtctcctgctgcttacttaatgagaaccctttgttactctattttgtagattgatcccagagttttttgcgttgttacttcaagagattatatgaaagctaatgtttaactttttgttgtttcaaatttggaaataaaattttaaagtgatattacagttagaatgtgatatgctttagaaaatgaaaacaatgatttctttgcttaagtatctggaatatatagttcatcaaggtttgcaaatccttcttttagattgcaagctgtatgaagtggggaccctgattccagcacccagctcatgtttggcacacagcgggcttgaatatacattatgaaataatctacattatggaaaaatactgaatatgcagtgtggaaaaaatgaatccatcaatagctgcataacacagtgtattaaaataaaatgttttattcttcatacattcaaaatacgttgattgaattcctcttacagagacaaactcggaagtgttgtacaatatgtactttacaattcctttttaaatgaaggagactctaagtctatggtattactaatagaatacaaaatgtctgtgtcccttatatttttaaaagtagaaataaactattataaaccaacactaacaaaagtacaaggtgatatccccctccatcaccttttatgagcgtcaaggaggttagagatcttcaggaaactagtaaatatnnnnnnnnnnnnnnnnnnnnnnnnnnnnnnnnnnnnnnnnnnnnnnnnnnnnnnnnnnnnnnnnnnnnnnnnnnnnnnnnnnnnnnnnnnnnnnnnnnnngaaacaattggtcatctatccttctttatttgaggcacaatttccccctccaytggtgtattttatcaacatgtattcattgagaatctcctatatgattgtcactgtgctgagattctaactatgaacaaagcgatcataacccttgctcctgggtcctacagtttagtgggaaagacaaatggataatttgaatgggtcatttcaaacacgatgagtgttacaaagtcactaaaattaacatggttttaaaaagatgaaacagatctaatgcagtggaagagttcatcgtgacttccaggctagtgggtagtaaggattgtaaaggctaatgccagcttctttgactggggcaatactttatatggactgattttggatttcttggcactcatggactgtagagtttgtagtagagtttcaagagtgcttgcgcaaaggatgtgcacggatggcaaaaatcagaggtagaga

SEQ ID NO: 25562 - DNA, 1515 bp, Homo sapiens
  misc_feature (1)...(1515): n = A,T,C or G
tgtaagtttgctgtcaaaattctaagatcagatcctagaaaacatttaatattaactactcttatctaccaggattcagcatgtaggattggacattttgaaacttagtttcatactgttatctgaagacagggaaaaatttaaaatgtgataactgattttcagctaaatccaataaccaaagccaagatatcctaggcacagttaaagctaatgtaagtatttgtgagtctcctgctgcttacttaatgagaaccctttgttactctattttgtagattgatcccagagttttttgcgttgttacttcaagagattatatgaaagctaatgtttaactttttgttgtttcaaatttggaaataaaattttaaagtgatattacagttagaatgtgatatgctttagaaaatgaaaacaatgatttctttgcttaagtatctggaatatatagttcatcaaggtttgcaaatccttcttttagattgcaagctgtatgaagtggggaccctgattccagcacccagctcatgtttggcacacagcgggcttgaatatacattatgaaataatctacattatggaaaaatactgaatatgcagtgtggaaaaaatgaatccatcaatagctgcataacacagtgtattaaaataaaatgttttattcttcatacattcaaaatacgttgattgaattcctcttacagagacaaactcggaagtgttgtacaatatgtactttacaattcctttttaaatgaaggagactctaagtctatggtattactaatagaatacaaaatgtctgtgtcccttatatttttaaaagtagaaataaactattataaaccaacactaacaaaagtacaaggtgatatccccctccatcaccttttatgagcgtcaaggaggttagagatcttcaggaaactagtaaatatnnnnnnnnnnnnnnnnnnnnnnnnnnnnnnnnnnnnnnnnnnnnnnnnnnnnnnnnnnnnnnnnnnnnnnnnnnnnnnnnnnnnnnnnnnnnnnnnnnnngaaacaattggtcatctatccttctttatttgaggcacaatttccccctccattggtgtattttatcaacatgtattcattgagaatctyctatatgattgtcactgtgctgagattctaactatgaacaaagcgatcataacccttgctcctgggtcctacagtttagtgggaaagacaaatggataatttgaatgggtcatttcaaacacgatgagtgttacaaagtcactaaaattaacatggttttaaaaagatgaaacagatctaatgcagtggaagagttcatcgtgacttccaggctagtgggtagtaaggattgtaaaggctaatgccagcttctttgactggggcaatactttatatggactgattttggatttcttggcactcatggactgtagagtttgtagtagagtttcaagagtgcttgcgcaaaggatgtgcacggatggcaaaaatcagaggtagaga

SEQ ID NO: 25563 - DNA, 537 bp, Homo sapiens
tatttgcttccctgggcttccctccttacctgtactttcagtgttgtctgttacacaaggtctcccagatcygtgcctctaactccagaccttccacagagatttatgtctctgttttactagctaacttgggttcctttaactggtggaacttgatatctcaagctcaggttgtccagaaacaaatattttcccttagaaccactattctttcatttatcccaatcatcaaagcttttgatttttccatctctgtcaccgctcaccagttaccacctctcagcgatttgatctctctgacacctcttccatttcccttcttctgcaaactcattcccctgcctcagctgagatccccacggtctcctgctgtaactggcacagtggcctcctacttgtgtttcatgtccagcctctcccaactctattctatcttctcaaattctcaatcttccagagtgacctcacacacaaattattgctcttttgcttaaaaaaccttagcagctctccactgcccagaagataaagtgaaaa

SEQ ID NO: 25564 - DNA, 647 bp, Homo sapiens
gtaacttgttacttggattaacactgtatcttagacatctttctatgtagagcgtatagatcttccctgttcttttaaatggctgtataattgtctatggaaggacttaatttatttaacccataccttgttgatgrcttatttgtgttttgcttttattttttcctctttgtttttgctgctacaagcaatgcttccttccatcttagcggatctgtctttgtacccttgaatgagaaagttgctggatcaaaggatgtattcattttgaattaggtgttgctaatttttcctccaatgatacactgatgtatcccccctgcccacagtgtgtggtcatgcctgttctctcaccctcttaccagtactggacattaataagcttttaaagatttgctactcaggctaaaagtgtctctttgttttagggtgcatttcctcatttaatgaagtgaagattcttccttgtttagtgaccatttgcctttatttttctgtgaactgcttgtgaatggcatttgtcgttcttctgttgtctttttagtcttttttctaaagcacactttgtagccctttgttgtaaaatgttggaaatatttttcccagtttgtcatttaatctttgactttgtctttctattccccagt

SEQ ID NO: 25565 - DNA, 1177 bp, Homo sapiens
aaccaagtttgtgcgggcatgagcctgcagggctgttcactgccaaaggattcaactggaactccagcatctaatgcttcttttcacatcttcctggcagctcagtgtatttgttggccctcccaaggcttgacaaagagcacatgtggctgtctgaagcttgaggtgcacacagaaagctggcactttcttactttaattacacacatacttggctttgaaatacctctgtgtatttaatgcagaaggagttgtattttaggttttaagcaaagaatgctgcaccacccaccgctttaatcttccctaaccagaccccaaatcccacagcagtggttcatgtagtgagataagccgtggcaacacatttatgaagccctggttagactcaatgctatttttctcatcatcttgctcttcaaatttaaggtttaaaataaacacaggggaagctgcagcgaagtttctggagcaaagggtaactataggtgaatgaccatggccggctgcttttagatagctccacgacaaggcagagaacagaagtcagcctggtagtgtcaggactgatttttcaggaatttctagaataaatattagtgtaaatgtgggtaagaagaaagagcagttttagccagagggttcactggaaaattgtaagtcatgtagtcaggactatgcaaacgctgcattgtgatgacagtcaaactcatgaaacttgacaaactcaaccactgattcagctattcaaaaaaaaaaaaaaggcattggatcattttccagtttacatactttgtacatgtattgagttttggtttatgataatcaactagtgatttctcaatcattcattgcatatcctattccttagtcagttagttcctaagttcatgaaaagtatttcagccacatcagtttcaagacaaagtgctaggcattgtttaattctgaaaaattatataaaaaagaaacatgaggaaaaaaccacatttctcctagttttgtagcaattgcaacacagatatgttaagtgwgtataaaggaaaacgttatggctatttcatcagcaagtgttttttgcccagtaagtgtccgattgcatgctgctgattttatttactggtgaaagttgggccattttcaagtatgtgccactcaccttccactgtgcctcccc

SEQ ID NO: 25566 - DNA, 530 bp, Homo sapiens
atttttttctcttcagttttatatgaaacatttagcaatgaagtagcaaataaaaatactacatatcatctagaattcatataaaattgtacttcgctttaacgcatctaaaggttgataaaaagaaacacatagatgcttcttaaaggcttatttatattttattacacattacacacattgcactccattgagaaaatttagaagttgatgtggttctctctgtcacgagcctgcatggcaaagattaccacatctacagaatatttctcctttggaacacaatgcactcatcttgcaattaccccagyggacggaaatggtgcaagtaatccatcagcactcacattggtctttggaaggaggcgtttctctgtgatttttttttcccttaaagagtgtactcttggcattatctggccacccatcctttaccctgctcgacgtctcttgtctgcactccagactgaggactgagatgaacaccgtcacctctgagacacacatgaaagtcagcgggaaggtggcgg

SEQ ID NO: 25567 - DNA, 516 bp, Homo sapiens
accttggcctcccaaagtgctaggattacaggtgtgagccacggtgcccagctgcatggctctgcattaggcctcaccatgtcatgagataagatactgcccagcattggggaaatgaggagacactgacctcagtgttggactcagaggctacaaactcacccaagaatgggtcacagcagagagarccaagtcactggaaagatggaaaagctgtggtgcttcagtcccagactaatggctttaatgtggctaaagagcatctcaaccagcctcaaggcttcaatccagaaaggaagaggccaagctggggacaggccacccaaaccctgcctggggcaggggccgctctactcctccacctccaccctagcccccttgggtatctgatcacatctgcaggtggccgtcggagctggggaagggtgtggcagctatcacagctcagggacgtcaacctgttaaggccatctgtccacttcctgtccctagtgctgagtcaccaaaaaagcaaaa

SEQ ID NO: 25568 - DNA, 613 bp, Homo sapiens
gctggtcttgaactcctggcctcaagcaatcctcccaccttggcctcccaaagtgctgggattataggcatgaaccaccacgcccggtcagccaacccttattcttgatctgaatacctgttgatcaaacacctcgtccccttctggttccttcccaactttcctccagccttgatttcctacttctggggccaaatacagtggaatcagccttggactcgaagtaggtccattctcctcttctctgggactcagaacctgccagccttggcttttgtttctgcatcggcaaagatggggagcccctgtggctgagaacagcactcacacttgtgkggaggggcagggcatgctggacaggccagggtgaggcagggaagcccctagaacagcactgggtagaggaaggcctgagaatgccccggggctggggtgagggcagcctcctcagtactgtgctgcgtggggtgcctgttggtgcctcagtgggcacttctgggtgggcgctatctaaagctgactctgggcattcactcctttgaatagcagaaatgacaacaatactgtttgaagtaataccaatgatgtgtttgagataaacacatacctcccg

SEQ ID NO: 25569 - DNA, 907 bp, Homo sapiens
ctggaactaaaaatcttgatctgcaatcctaagggctcagtgtgttctaggaggaaatcacaaagaatgactmacattatgccatattttaacaaaaattgctgaaccttgtgaagaagaaagataccaacatgtgtctacaaaaaatagttcacctataaaactgaaaaaataatgaatggactcagaatttactataacagcattaggtaatagaaaataataaaacagtggctgggggactttggaataaaatgatttgtgaccctagaattctatattcagtcatattctcaggtatataaggataaaagaaaaattttaacacttcattctttttgaaaaatctattttaagttgtatctcacctaatggtgtaatcttatttttcaagaaaagaaacatggtgattcacatgtaaataacacatccagtgaaagaagtggctgtgaacattgaatccattaaggctgaattatgtctaacatttctgaggctcttgattcatactttctaaagacagatttattaactcattaaagaaataataataaacccactgtgaaataacatatttttataaagaataactatatttttcattttttttttattttattttattttagagacggagtctcgctctgtcgcccaggctggagtgcagtggcgcgatctcggctcactgcaagctccgcctcccgggttcacgccattctcctgcctcagcctcccgagtagctgggactacacgtcccgccactacgcccggctaattttttgtatttttagtagagacggggtttcaccgtgttagccaggatggtctcgatctcctgacctcgtgatccgcccgcctcggcctcccaaagtgctgggattacaggcgtgagccaccgcgcccggc

SEQ ID NO: 25570 - DNA, 532 bp, Homo sapiens
ggagtttcctttaaagagaaaacgtccatggtttactcagtaattggataaaattatttgtttaatctcttctgtctttaagcaggtagcttattcggtgtactgtgtaaatcagtatgaaaattcaagaaattacctagtagaaagaagccaacattttgggtcagggaggttgtctgctagataaattggtacaatgtgaacattaacacaaggttcaagtagtttccaaatcaattttatttagaaaagaatgcagattgcatgtggccttccaagttcaaatgtctatattaccacatttccctttgagggaagaaaaacaggatgtggtttaggatgctgctacaaatcaactcaagggccctttaataattatagtaatacctgtgtggagcccacatttggtytaagtgactttctccaattctaggaattttctagctttaggttgatgttaaaattcagcgccaagtccagagtgagacagaaaccacctactgagaattgtttttttaatgcttccttaaca

SEQ ID NO: 25571 - DNA, 585 bp, Homo sapiens
tgggaagaatggactgagaggtggattcttaccatgtctatcaggacttttggtggcatgcagcagaaactgactgatatggtttggctctgtgtccccacccaaatctcatcttgtagctcccataattcccatgtgttgtgggagggacccrgtgggagatgattgaatcatggggccaggtctttcccgtgctgttctcatgatagcgaatgagtctcatgaggtctgatagttttagaaaggggaattttcctgcacaagccctctctgcctgctgccatccacataagatgtgacttgatcctccatgccttctaccatgattgtgaggctgccccagccatgtggaactgaaagtccaattaaacctctttcttttgtaaattgaccagtttggggtatgtctttatcagcagcgtgaaaacagactaatacactgactctgccttgggagggtcttgaggctgctgatggtctgggaggctgtgtggacagggaggactgtctggaagcaaagaagcacagagcctcagagctaactgcatggacaaggggtgctgcggaaacatccaggacattgtt

SEQ ID NO: 25572 - DNA, 1134 bp, Homo sapiens
tttaactcaaacgtcaccttcatagctgggcagaccctgaccactctatccaaaactgtactccccacctgttttctcagttccccttattcggttctatttttttctcttataaactttaaactttatgtctgtctcttcccactaagatgtaagttccacagggcagggattttgttcatgtacatgttttgtttccaggactagaagactgtgtggcacacagcaggtgcttattaagatcttttgttaaataaatgaatgaatattaaatacttcaaaccctcaactcacttaaaattagggttgtttatataaagatgatggattactcatttttactatattgtggaaggataattttatttccagatgaktatttccagtttttaacgtgaaatctggagaactgtttactagcaatggttagacaactcaacgtcttatctttctaatgcttgtaagtaaaaagctttgtctggtttaggcagcatgaactttacatcaggtttatggtctttggttctatgaagggcaaaaaattggactgcatttttatattttatgaacatgttcataaacccttttattggtgctctcaacagctgatttcatggataatatgaaaagttgaaatgcattcagagaacagcacaaagaatgattttcttggtctaatttatacaaacagagtgagggttcacctctggccatgaactacggaaggtttttaaggctactagtgactggctaacctgctacttgtccttcctactaaaactgaatagaagagagaaccttcctctttttctgtgtagaaaacagaaattaattattagttgcctgaagtagatgggcctagttaaatcccaaagagattttaacaaccagggatgtgaacttcatcgtggctcagatatcaagttatcagacacatgcagaaggtgtggattgctaatgcattttacagctttgttgaatatctaaatttaggaagtataggctatagtttagaaagggtcacaaaataagatctcctactgatttatatgaaggtttgtacaatcagatataaccaggggcacctgtgagttggttcccatggtacctgttgctatgcatgctgatttttgg

SEQ ID NO: 25573 - DNA, 528 bp, Homo sapiens
caaattatttcactgtttttcacctctacctcccccaggatctctgcaagaggaaaagtttttccacctacaactacctcttataggaggtagggaacctgggtaaaggatacatttctttcttccaaagcatatgccaggccaaggatattttttattttgttaattttgtggggctttttgtttttgtgttttyagagacaaggtctgactctgtcgcccaggctggagtgcagcagtgcaatcatagatcactgcagcctaaaattcttgggctcaagcgatccacctcagcttcctgactgcctgggactacaggcatgtgccactacactggctaatttattttactttttgtagagtcggggtctcgctatcttgtccaggctggttgaaactcctggcttcaagcaatcttcctgccttggcctcccaaagttctgggatttcaggcatgagtcaccatggccagcctaattttgtgatttttaagagacacttatgtttcattttgggcaatatgaagga

SEQ ID NO: 25574 - DNA, 528 bp, Homo sapiens
caaattatttcactgtttttcacctctacctcccccaggatctctgcaagaggaaaagtttttccacctacaactacctcttataggaggtagggaacctgggtaaaggatacatttctttcttccaaagcatatgccaggccaaggatattttttattttgttaattttgtggggctttttgtttttgtgttttcagagacaaggtctgactctgtcgcccaggctggagtgcagcagtgcaatcrtagatcactgcagcctaaaattcttgggctcaagcgatccacctcagcttcctgactgcctgggactacaggcatgtgccactacactggctaatttattttactttttgtagagtcggggtctcgctatcttgtccaggctggttgaaactcctggcttcaagcaatcttcctgccttggcctcccaaagttctgggatttcaggcatgagtcaccatggccagcctaattttgtgatttttaagagacacttatgtttcattttgggcaatatgaagga

SEQ ID NO: 25575 - DNA, 528 bp, Homo sapiens
caaattatttcactgtttttcacctctacctcccccaggatctctgcaagaggaaaagtttttccacctacaactacctcttataggaggtagggaacctgggtaaaggatacatttctttcttccaaagcatatgccaggccaaggatattttttattttgttaattttgtggggctttttgtttttgtgttttcagagacaaggtctgactctgtcgcccaggctggagtgcagcagtgcaatcatagatcactgcagcctaaaattcttgggctcaagcgatccacctcagcttcctgactgcctgggactacaggcatgtgccactacactggctaatttattttactttttgtagagtcggggtctcgctatcttgtccaggctggttgaaactcctggcttcaagcaatcttcctgccttggcctcccaaagttctgggatttcaggcatgagtcaccatggccagcytaattttgtgatttttaagagacacttatgtttcattttgggcaatatgaagga

SEQ ID NO: 25576 - DNA, 731 bp, Homo sapiens
tccaatagacaggaagacagatagcaaagcccaaaagaaaccttcaatgaacatgtatcacaagacatttttaaaaagctttttttgtgtttttatgccaaagatattctttattaccgaatgattactttatctttacataaatattgtgattataaactgaaatatagtatttctatgtaaaactatagartttgtctatataatgacatagaaaaatctagactacatttaggagtgaagaagctgggtagacgatagtattacagattagtgtatataattgagacagtaatggagagcattgttgttatttggtatgggggagaaatgttttctgaaaagcaacgtggtaaatccataaatcatttgccttgtagtaacacagcttgaattagagcaggtatttagcaatattatttaccctgttaaatgtaatttcaaaatttctcatagactatcctgggagattgaataaatgctcaacaatattgccccataaaacacagaatgtcatcaaatatacacaattatgaaaatgtagcaaagtatacagtgagtattcagtatttttgagcctaaataagaaaggatataaattattaataatgagcagtatttcctttttacatgatgtctaaacctttacatgatgtctaacattataggttcaggctttgttttggtatttttctaaataacaatttctaaagtttctatttttaaaaata

SEQ ID NO: 25577 - DNA, 731 bp, Homo sapiens
tccaatagacaggaagacagatagcaaagcccaaaagaaaccttcaatgaacatgtatcacaagacatttttaaaaagctttttttgtgtttttatgccaaagatattctttattaccgaatgattactttatctttacataaatattgtgattataaactgaaatatagtatttctatgtaaaactatagaatttgtctatataatgacatagaaaaatctagactacatttaggagtgaagaagctgggtagacgatagtattacagattagtgtatataattgagacagtaatggagagmattgttgttatttggtatgggggagaaatgttttctgaaaagcaacgtggtaaatccataaatcatttgccttgtagtaacacagcttgaattagagcaggtatttagcaatattatttaccctgttaaatgtaatttcaaaatttctcatagactatcctgggagattgaataaatgctcaacaatattgccccataaaacacagaatgtcatcaaatatacacaattatgaaaatgtagcaaagtatacagtgagtattcagtatttttgagcctaaataagaaaggatataaattattaataatgagcagtatttcctttttacatgatgtctaaacctttacatgatgtctaacattataggttcaggctttgttttggtatttttctaaataacaatttctaaagtttctatttttaaaaata

SEQ ID NO: 25578 - DNA, 536 bp, Homo sapiens
aggtgcagaaataaagttgagaaaggcagctgaccaagcaagcaaaggataagaatggaagagcagcaaaaagagaagaggagatgaaagactggatgaggcagtgacacggatagaaaggttgcctgggagagctctgaargagactcttattaacccatcttccaacaattgttggagaaacagcaggaaaggtgaaaagaaagggcctatgtaattaaaatcactgtgtcacccagaggcagtacagaatgctttttataattaaaaaaaaagtcacattgtattagtctgttctcacgctgcaaataaagacatatcaaagactgggtaatttatatctagaaaaccccattgtctcagcccaaaatctccttaagctgataagcaacttcagcaaagtctcaggatacaaaattaatgtacaaaaatcacaagcattcttatataccaataacagacaaacagagagccaaatcatgagtgaactcccattcacaattgcttcaaagagaataaaatacctaggaatccac

SEQ ID NO: 25579 - DNA, 1298 bp, Homo sapiens
tgcatcttttaaagctttgatatattacttgagttttaggtcgtagagaaagttttccaataggaattttgttcatattgatctctccttttgccaagttgtcccacagttcaactcaaattcttcttttcagtgctaggacaggaataccatctctgggaagccatgattccctcagaatcaccaaaataatgtagaaataaagacattagagtgaactgcatctgctttatttattggatttaccacccagtataaacaagaaatcctttgttccctgtttcattgacttcttaacatctcagagctatcctatgtttcagacatcacccgacccacccttgctgaggccccagactatcctaagtccaaccctgcaatcataacatcaacctcacatcgtgatgctaagtgtgtggggagcgaggtggtggctgtttgcaagagtggccacagtaccactgtgtaatgagtggggtcattcccctccacatccctgtggtgagtagaaaattctttcccgcattttctttcatttctgtgtcagtttcctcaacagcccacaaatccttttttttttttttggacaaatttccttgagcacaacctttccttcttcatgggacaactcctcaagttctcaacaaccacctaagtagaaacatgacaaacgtttgcatttcatcggaagaaaaacrtatttagttgtattaacatgttgaatccctgtcatagtgaaaatacttaatgaatgaaaagcagggggaattaggtcaggtggaatagtttttctagattatggaggactctggtggtgggaaacatagggggcataatctaaaaaggagaaatgggagttcccagtggaagtagtcgttctcgttttatttgtaataattatcaacttttaatttcaactttcttccaggtgttgttgaatacaattaactgtttacttttctacaaattcaagggaaaacagaaaccttgaaaaatgcttttctgagagtcacacatttttaaacaactaatgcccccaaaattacttaattcacctgcctgtctgtatggaaataattctactgaaattctgatttcataagggaggacacctgaagatgtgaagtgactgtatcttggattagagttgggcctatattatataggctttctaacatagttggtagacctcagtttaagaaataatagctattgttatatttatattattatttattataatccaataatagcaatagctaccactatatgcctgacactatgctttttcttttttt

SEQ ID NO: 25580 - DNA, 1111 bp, Homo sapiens
caggccagaattctagtccatctatgtctggaattctagccatatagtcctcattctatggcgcatttttttattgcaaattatttccaaagcattctattttgccaggccttaattcctgaggttaaaccattgcacaaaaaacgtgagaattccaagccctcgtggaaattcaagccattaaataagtaaattcccattggcaggtggggataagtacaagggccaaaattcaagcagaataccagattaagagagggaagcaagagggtttccattttatacagggtagttaggaagaccaggctaatacaaggcaaaggtgggggaaagtatgaaaatatgtggaaacagaaagattctggctgaagaacagcaagtgcaaaggccctggggcaggaacatgctggagggtggcatgttaagaagcaacaagtcagggaacctagaagagacaaaacagggggcagaggcagaggatgtcttcagaggtgggctggggaaggggaaatccagtgggcaaccataggaactcaggcttttactcagagagaaagaaaggctttcaggttttaaaagaagtggtagctgatttatagttttaaaggttcagtctggctactcagctaaagccagaatcctaagtcctatgcaagagtctaagagggcttaggatgcccaccttcctcactggtttgatttttttttttttttttttgaggcagggtctcactctgtcgcctaggctagagtgcaatggcatgatctcagctcactgcagtttccacctcccaggttcaagcaattctcctgcctcagcctccccagtagctgggatacagggcgtgtgctaccacgcccagataatttttgtatttttagtagagacagggtttcacaacgctgcccaggttgatctcaaactcctgagcttaagtaatccacccacctcggcctcccaaagtgctaggactacaggtgtgagccaccrtgcccagcccactggttcagtttcttgaagcctttgaatatttctcttcctcctaataatacatgaaaacctacagcacattcttttaaatattcccaacggtggcaaactttcaaaggt

SEQ ID NO: 25581 - DNA, 559 bp, Homo sapiens
attgctgcatctacaggtggcaggtgctattattatgtgaagttggagcctaagataaataggaaactttactcatgaagttacaaggacagacatcagcctggtcacctttcttaatttgagtcacagtgtttaattactcttgtgtttacatttccatgaacaaaatggacatgaacatgcagmggatttaggagtcacttaaggagtggcccataatgttgatcaagaaacacttggtgaatacttacttggcttttaatcacagggcatttaatgttcagcagaacaaataggttagaaatagattttcttaaactttatagtaagaaatgagtgaagtataaactccaaagggggctttatttatttatttatttagagacggagcctcgctctgttgcccaggctggagtgcagtggtgcagtcttggctcactgcaacctccacctcccgagttcaagtgattcccctgccttggcctccagagtacctgggactacaggcatgtgccatcatgccccactaagtttttatatttttagtagagatggggtt

SEQ ID NO: 25582 - DNA, 559 bp, Homo sapiens
attgctgcatctacaggtggcaggtgctattattatgtgaagttggagcctaagataaataggaaactttactcatgaagttacaaggacagacatcagcctggtcacctttcttaatttgagtcacagtgtttaattactcttgtgtttacatttccatgaacaaaatggacatgaacatgcagcggatttaggagtcacttaaggagtggcccataatgttgatcaagaaacacttggtgaatacttacttggcttttaatcacagggcatttaatgttcagcagaacaaataggttagaaatagattttcttaaactttatagtaagaaatgagtgaagtataaactccaaagggggctttatttatttatttatttagagayggagcctcgctctgttgcccaggctggagtgcagtggtgcagtcttggctcactgcaacctccacctcccgagttcaagtgattcccctgccttggcctccagagtacctgggactacaggcatgtgccatcatgccccactaagtttttatatttttagtagagatggggtt

SEQ ID NO: 25583 - DNA, 590 bp, Homo sapiens
ttaaattagttatttatttctcacataggaaatttgtccatgaattgttgctcaattggtgtatttggagaaggagagttcagggttcctactccaccatgttgctgatgtcactccttaataactccaatacagtttcatttttaaactatgaatgtggacttctgtaataaaataaagttaataatagacatggatagaccaatattttgtatttagtttccaaaaattcttttgaagtaatctttgaagcttaaaattattgcctatccattcaaaagttattgcaagagcaatggaaccatattttaaaaygtctgttttagcccattttgtgctactataacagaatatctgagactgggtaatttatagtgaacaaaaatatattggttcttagttctggaggctgggaagcccatgatcagggggatggcatcttgtgagggctttcttgctgtgtcactccatggcacaaaggcaaggagagggcaagagggagcaagagaataaacgcactcttgagacctttcataattgacattaatttattcatgaagggggttctctcatgacctagacatctccca

SEQ ID NO: 25584 - DNA, 1070 bp, Homo sapiens
caggacatagaccccagttcttaatggaaacggcttcattcctgcaatgcagtttayacatttatctaggcccagaggtctctgtcaagagaagagggtgggcaaagcccacagaggaagtactttcttgtgtggcaatgaccatcggggaaacaagataacacggagtatagtgatccagtgtaaacttggccatttgtgccaagccctttgccaaagttatccgtcttcggccacctgacggaacagagggcactcatgggaaaacagctggaaaaaggacactgccccaaattagtacgaatatttatcacttactgggggccacgataaaggccctatggggctggaatcctttccaatctcaggtgttcctggactcagggataatgaggggtgactgcaaaatgcagaatgccggggaacacagaggacagcctgagggcaggcccttcctagaagctccatcttcttctagaatcagatacattgattagtgtctcttccccgatcaaacctgcggctaaccatgacttgatgtatacagtgacaccctatagctgtgatgagaactgggaaggcattcattcattcaaacactcagtgagcaccttgtaataccaagcattgtgcgagacgcagggattacagaagttgaaatatacccactcctggtggggaaaagttcttggttgtcaaaagttgggggcggagatggggggcagacgaaaatcctgaaatccgatcttatctgtcttcctgcctttgagcgctgccacaacaaaaccagcagaggcaggcacttttaaaaatagggcccgttgtgcactttctcggctacgcacccctttccttcctccaggcttcctgtctcccttctgtacagtcaccaccaactacccttgaacgtcaacacctctggaaaaggtgaaataattctgccaccttcaatacggcaaatagcctctctaatcaatccaagtaagtgtttatggcaatccagcaacgagtttggcacaaagaaagaggtccagggtggtcactcacggtaatgtcaaagccgaaacggt

SEQ ID NO: 25585 - DNA, 1070 bp, Homo sapiens
caggacatagaccccagttcttaatggaaacggcttcattcctgcaatgcagtttatacatttatctaggcccagaggtctctgtcaagagaagagggtgggcaaagcccacagaggaagtactttcttgtgtggcaatgaccatcggggaaacaagataacacggagtatagtgatccagtgtaaacttggccatttgtgccaagccctttgccaaagttatccgtcttcggccacctgacggaacagagggcactcatgggaaaacagctggaaaaaggacactgccccaaattagtacgaatatttatcacttactgggggccacgataaaggccctatggggctggaatcctttccaatctcaggtgttcctggactcagggataatgaggggtgactgcaaaatgcagaatgccggggaacacagaggacagcctgagggcaggcccttcctagaagctccatcttcttctagaatcagatacattgattagtgtctcttccccratcaaacctgcggctaaccatgacttgatgtatacagtgacaccctatagctgtgatgagaactgggaaggcattcattcattcaaacactcagtgagcaccttgtaataccaagcattgtgcgagacgcagggattacagaagttgaaatatacccactcctggtggggaaaagttcttggttgtcaaaagttgggggcggagatggggggcagacgaaaatcctgaaatccgatcttatctgtcttcctgcctttgagcgctgccacaacaaaaccagcagaggcaggcacttttaaaaatagggcccgttgtgcactttctcggctacgcacccctttccttcctccaggcttcctgtctcccttctgtacagtcaccaccaactacccttgaacgtcaacacctctggaaaaggtgaaataattctgccaccttcaatacggcaaatagcctctctaatcaatccaagtaagtgtttatggcaatccagcaacgagtttggcacaaagaaagaggtccagggtggtcactcacggtaatgtcaaagccgaaacggt

SEQ ID NO: 25586 - DNA, 619 bp, Homo sapiens
aatacatttgattttaatatatattaaaatcaatttatatgtttatcacaatatattgatatatttatcacaatatatcacagtatatcacaatatattaatattgtaattaatacatttattaatacattaatatattaatacatgcagcaaaaatctaccatgttagccattttaatgtgtataatttggtggcattgagttcattcacaatattgtacaaccaccgcaactattttgttccagaacatccctcaaggaaaccctgtatccatgaagcagtcactccccattcccctctcctccatccctggcaactactaatctgctttctgtctctgtgaatttgyctatggggatactgcatgggaatggaatcatgtgatatgtggcttttgatgtctgaattcttcaactcagcacaatgttttcaagattcacccatgttgtggcacatacttcattccttttttttttttttttttttagatggagtttcgctcttgttgcccaggctggagtgcaagggtgcgatctcggctcactgcaacctctgcctcctgggttcaagcaattctcctgcctcagcctcccaagtagctgggattacaggcatgtg

SEQ ID NO: 25587 - DNA, 619 bp, Homo sapiens
aatacatttgattttaatatatattaaaatcaatttatatgtttatcacaatatattgatatatttatcacaatatatcacagtatatcacaatatattaatattgtaattaatacatttattaatacattaatatattaatacatgcagcaaaaatctaccatgttagccattttaatgtgtataatttggtggcattgagttcattcacaatattgtacaaccaccgcaactattttgttccagaacatccctcaaggaaaccctgtatccatgaagcagtcactccccattcccctctcctccatccctggcaactactaatctgctttctgtctctgtgaatttgcctatggggatactgcatgggaatgsaatcatgtgatatgtggcttttgatgtctgaattcttcaactcagcacaatgttttcaagattcacccatgttgtggcacatacttcattccttttttttttttttttttttagatggagtttcgctcttgttgcccaggctggagtgcaagggtgcgatctcggctcactgcaacctctgcctcctgggttcaagcaattctcctgcctcagcctcccaagtagctgggattacaggcatgtg

SEQ ID NO: 25588 - DNA, 971 bp, Homo sapiens
aagcaaatgaaaaatgaacttttaaaaaaaaattaacatattaaaaacattcctgtatgaaaacgaatgcttgtctgcacttagatttagtgctatagagaggaactgaggcacaatgaaactaagtgcacaaaaggaacatgtctgaaataaaacaattttcaatgtgactgaaacccttcgccattagatatgacttacgatagggttggaggactactttttcatattaaagaacattacaaacaccagggactggccaaactatgttttataaataatatgtagagtgatattaaaattatattgcgactaaarctctggtttttaaaatcacttataattttgatttttcataaaattaccggctcttttgctaaattaaaattaacttcaaatcaaaaacatcttattaaatttctggaggactgttagtttaacaatgataatgtacgtttctcagtttcccaaacaagctctatcagatacacatattttcttcatttatctcagtattagatgttctttccatagaacttaaagcattttggtaaaaggttgaatatgattcttcaaagaacagctcttccaatggcgacttggtagaaacagtaatgttgtaattagaaatatgctgcattggatggtaactgtttgcttattgtattcatcgtgactctagcaacgcctgccatctacgtacttgccgtccttttgactctttcatttcagtccagtgattgagttcttctccagagctgttgagacctaaataaatccagcctatcatctttcttctcatgctgcttttgttatacacagacagcatgagtgtcacatgagaaagctgaaatagggtcactttgaaaacaaaagtttccttgtatactggatttggccgccctctgcggatggatatcttgcatttggacatctcttgatccgtggatttccgtagagttaacttaaca

SEQ ID NO: 25589 - DNA, 497 bp, Homo sapiens
ttttttttcaggatatccttgacagaaacataagtatctctctttttttttttcaggttctaattcctactcgtttattgtaaaaatcctggagaaagctcattgatgtaacaataaaatatgaatttttccctttaatgcagccctgtaaaacacatyctcaaacctcatgtcatccaatataccttttgtattttttcttataattcatgtgtatgaatgcatagagctgctttttttaaatgaaaaaatacagaatttcacggtctttttggatttcttttaaggcctttcagtatatccaagctgaagtaacatctatgcattgttttgttattatggtaataacaagttctagtttataataatatatagtacttttttgggactaggagcaatgatatactgctttttagtaactggtaaatagtatgtttttgtctatttgaactagaaatgagaaggagaaaaaagaaactatttttaatatatataaa

SEQ ID NO: 25590 - DNA, 636 bp, Homo sapiens
tgctagtgcttcctgcgagatgaggactcacagacgcaggctaatctgtcactcacaygccgagcgggagcctttgagaggtttgcagatgttcaagtgaggtggagggatcgtgggctattttccttttcttatttatgcttctccacttctttcctcggggttctaagtcagcgctaatcatttcaatagcatcagaccctccacagggaacggtggccggtatatcctacttggggaatctcattccacgaacgcagggaatcctgaggagacacacatgggttgtgaaccgagtcctggctgtcactcatcgcttgcctagatgtgagtggagccagtcttgagccacagcagggatgggacagtgaaatggtggacagcagtgcctgcccggggcctgccctaaagcaccctcttagcctctcttcctcctagcccgggagcccagcgccctgttagttgacttcttagggagtgagaagttctgcctgctatgagctcactcagccttctggtcataaacactgactaaactttcagctgcccgcagagcatttgacacatggggtctccttagctgggtggtctcccaagccacattcctctttctcacggctccatgtgacataggac

SEQ ID NO: 25591 - DNA, 636 bp, Homo sapiens
tgctagtgcttcctgcgagatgaggactcacagacgcaggctaatctgtcactcacacgccgagcgggagcctttgagaggtttgcagatgttcaagtgaggtggagggatcgtgggctattttccttttcttatttatgcttctccacttctttcctcggggttctaagtcagcgctaatcatttcaatagcatcagaccctccacagggaayggtggccggtatatcctacttggggaatctcattccacgaacgcagggaatcctgaggagacacacatgggttgtgaaccgagtcctggctgtcactcatcgcttgcctagatgtgagtggagccagtcttgagccacagcagggatgggacagtgaaatggtggacagcagtgcctgcccggggcctgccctaaagcaccctcttagcctctcttcctcctagcccgggagcccagcgccctgttagttgacttcttagggagtgagaagttctgcctgctatgagctcactcagccttctggtcataaacactgactaaactttcagctgcccgcagagcatttgacacatggggtctccttagctgggtggtctcccaagccacattcctctttctcacggctccatgtgacataggac

SEQ ID NO: 25592 - DNA, 636 bp, Homo sapiens
tgctagtgcttcctgcgagatgaggactcacagacgcaggctaatctgtcactcacacgccgagcgggagcctttgagaggtttgcagatgttcaagtgaggtggagggatcgtgggctattttccttttcttatttatgcttctccacttctttcctcggggttctaagtcagcgctaatcatttcaatagcatcagaccctccacagggaacggtggccggtatatcctacttggggaatctcattccacgaackcagggaatcctgaggagacacacatgggttgtgaaccgagtcctggctgtcactcatcgcttgcctagatgtgagtggagccagtcttgagccacagcagggatgggacagtgaaatggtggacagcagtgcctgcccggggcctgccctaaagcaccctcttagcctctcttcctcctagcccgggagcccagcgccctgttagttgacttcttagggagtgagaagttctgcctgctatgagctcactcagccttctggtcataaacactgactaaactttcagctgcccgcagagcatttgacacatggggtctccttagctgggtggtctcccaagccacattcctctttctcacggctccatgtgacataggac

SEQ ID NO: 25593 - DNA, 1652 bp, Homo sapiens
tattgttcaatttgaagcctacttttaaaaacttaacattaggccgggcatggtggctcccgcctgtaatcccagcactttaggaggctgaggcgggcagatcacctgaggctgggaattcgagaccagcctgaccaacatggagaaaccccttctctactaaaaatacaaaattagccaggcgtggtggcgggtgcctgtaatccaagatacttgggaggctgagacaggagaattgcttgaacccrcgaggcggaggttgcagtgagctgagatcgcgccattgcactccagcctggacaagaacagtgaaaccccatctcaaaaaaaaaaaaaaaaaaccttaacattaaaacaaaacaacagcattttcttttgtcactgtaagtgatgttctaagtatgattttattcatgactgaaggccatccattttttaatgtagatgtaccataattcacgtaaacacttaccacattgcattggaggttttatttttccttttggcattatgaataatgtcgcgcactaccacggttcatacacacatgctccttctctaacctcgctggagctagaatcactgaatgaagtcatattggcttatttaaaggatctaaaagttatgctgcaggtgtggcccattgcatcccacttcccacacagcacgagaaagaattcactaactatggcattgttgtgaatgctgagtaaagagccaatgtgttctgatatctgtgctaatttaaggagaacattccacttggtggtttaaatttacattccttgaatgacttatgagtaagccacatattgcacaaggatcatttataattattctgtcttccatttatgtctatttttattataatattagaataaactgtcatatataacaatgcttgtaaaattcattacattgacctatgtgtagattactatgtcagtaccacatatttaaaaaactgatgtaaactttagaataattttaatcccatatatttcatatatatctgtctgggatcctatatagccaagatatatatagatagatacctttaataatctcatgtgtatattccataaacagcatttcttttttttttttttttttttttttttttttttttgagacggagtctcgctgtgtctcccaggttggagtgcaggggcgtgatctcggctcactgcaagctccgcctcccaggttcatgccattctcctgcctcagcctcccaagtagctgggactacaggcgcccgccaacacacccggctaattttttgtatttttagtagaaacggggtttcaccgtgttagccaaggtggtctcgatctcctgacctcgtgatccgcccgtctcggcctcccaaagtgctaggattacaggcgtgagccaccgcgcccggcctccataaacagcatttctaaatgcaccactttcccatccaagaccatagtaactgtaaaaaaaaaaaattacttctcagaatgttgtcgttttctctgtttagatttcacacataagtaaaggttatgatccatctacctgtgttgatagttgttcataggtattttgtgcagttttctatgctatgtgaatagagtattttcttcaattacagcatctaaataactactaatatgtagaaa

SEQ ID NO: 25594 - DNA, 1652 bp, Homo sapiens
tattgttcaatttgaagcctacttttaaaaacttaacattaggccgggcatggtggctcccgcctgtaatcccagcactttaggaggctgaggcgggcagatcacctgaggctgggaattcgagaccagcctgaccaacatggagaaaccccttctctactaaaaatacaaaattagccaggcgtggtggcgggtgcctgtaatccaagatacttgggaggctgagacaggagaattgcttgaacccgcgaggcggaggttgcagtgagctgagatcgcgccattgcactccagcctggacaagaacagtgaaaccccatctcaaaaaaaaaaaaaaaaaaccttaacattaaaacaaaacaacagcattttcttttgtcactgtaagtgatgttctaagtatgattttattcatgactgaaggccatmcattttttaatgtagatgtaccataattcacgtaaacacttaccacattgcattggaggttttatttttccttttggcattatgaataatgtcgcgcactaccacggttcatacacacatgctccttctctaacctcgctggagctagaatcactgaatgaagtcatattggcttatttaaaggatctaaaagttatgctgcaggtgtggcccattgcatcccacttcccacacagcacgagaaagaattcactaactatggcattgttgtgaatgctgagtaaagagccaatgtgttctgatatctgtgctaatttaaggagaacattccacttggtggtttaaatttacattccttgaatgacttatgagtaagccacatattgcacaaggatcatttataattattctgtcttccatttatgtctatttttattataatattagaataaactgtcatatataacaatgcttgtaaaattcattacattgacctatgtgtagattactatgtcagtaccacatatttaaaaaactgatgtaaactttagaataattttaatcccatatatttcatatatatctgtctgggatcctatatagccaagatatatatagatagatacctttaataatctcatgtgtatattccataaacagcatttcttttttttttttttttttttttttttttttttttgagacggagtctcgctgtgtctcccaggttggagtgcaggggcgtgatctcggctcactgcaagctccgcctcccaggttcatgccattctcctgcctcagcctcccaagtagctgggactacaggcgcccgccaacacacccggctaattttttgtatttttagtagaaacggggtttcaccgtgttagccaaggtggtctcgatctcctgacctcgtgatccgcccgtctcggcctcccaaagtgctaggattacaggcgtgagccaccgcgcccggcctccataaacagcatttctaaatgcaccactttcccatccaagaccatagtaactgtaaaaaaaaaaaattacttctcagaatgttgtcgttttctctgtttagatttcacacataagtaaaggttatgatccatctacctgtgttgatagttgttcataggtattttgtgcagttttctatgctatgtgaatagagtattttcttcaattacagcatctaaataactactaatatgtagaaa

SEQ ID NO: 25595 - DNA, 1652 bp, Homo sapiens
tattgttcaatttgaagcctacttttaaaaacttaacattaggccgggcatggtggctcccgcctgtaatcccagcactttaggaggctgaggcgggcagatcacctgaggctgggaattcgagaccagcctgaccaacatggagaaaccccttctctactaaaaatacaaaattagccaggcgtggtggcgggtgcctgtaatccaagatacttgggaggctgagacaggagaattgcttgaacccgcgaggcggaggttgcagtgagctgagatcgcgccattgcactccagcctggacaagaacagtgaaaccccatctcaaaaaaaaaaaaaaaaaaccttaacattaaaacaaaacaacagcattttcttttgtcactgtaagtgatgttctaagtatgattttattcatgactgaaggccatccattttttaatgtagatgtaccataattcacgtaaacacttaccacattgcattggaggttttatttttccttttggcattatgaataatgtcgcgcactaccacggttcatacacacatgctccttctctaacctcgctggagctagaatcactgaatgaagtcatattggcttatttaaaggatctaaaagttatgctgcaggygtggcccattgcatcccacttcccacacagcacgagaaagaattcactaactatggcattgttgtgaatgctgagtaaagagccaatgtgttctgatatctgtgctaatttaaggagaacattccacttggtggtttaaatttacattccttgaatgacttatgagtaagccacatattgcacaaggatcatttataattattctgtcttccatttatgtctatttttattataatattagaataaactgtcatatataacaatgcttgtaaaattcattacattgacctatgtgtagattactatgtcagtaccacatatttaaaaaactgatgtaaactttagaataattttaatcccatatatttcatatatatctgtctgggatcctatatagccaagatatatatagatagatacctttaataatctcatgtgtatattccataaacagcatttcttttttttttttttttttttttttttttttttttgagacggagtctcgctgtgtctcccaggttggagtgcaggggcgtgatctcggctcactgcaagctccgcctcccaggttcatgccattctcctgcctcagcctcccaagtagctgggactacaggcgcccgccaacacacccggctaattttttgtatttttagtagaaacggggtttcaccgtgttagccaaggtggtctcgatctcctgacctcgtgatccgcccgtctcggcctcccaaagtgctaggattacaggcgtgagccaccgcgcccggcctccataaacagcatttctaaatgcaccactttcccatccaagaccatagtaactgtaaaaaaaaaaaattacttctcagaatgttgtcgttttctctgtttagatttcacacataagtaaaggttatgatccatctacctgtgttgatagttgttcataggtattttgtgcagttttctatgctatgtgaatagagtattttcttcaattacagcatctaaataactactaatatgtagaaa

SEQ ID NO: 25596 - DNA, 1652 bp, Homo sapiens
tattgttcaatttgaagcctacttttaaaaacttaacattaggccgggcatggtggctcccgcctgtaatcccagcactttaggaggctgaggcgggcagatcacctgaggctgggaattcgagaccagcctgaccaacatggagaaaccccttctctactaaaaatacaaaattagccaggcgtggtggcgggtgcctgtaatccaagatacttgggaggctgagacaggagaattgcttgaacccgcgaggcggaggttgcagtgagctgagatcgcgccattgcactccagcctggacaagaacagtgaaaccccatctcaaaaaaaaaaaaaaaaaaccttaacattaaaacaaaacaacagcattttcttttgtcactgtaagtgatgttctaagtatgattttattcatgactgaaggccatccattttttaatgtagatgtaccataattcacgtaaacacttaccacattgcattggaggttttatttttccttttggcattatgaataatgtcgcgcactaccacggttcatacacacatgctccttctctaacctcgctggagctagaatcactgaatgaagtcatattggcttatttaaaggatctaaaagttatgctgcaggtgtggcccrttgcatcccacttcccacacagcacgagaaagaattcactaactatggcattgttgtgaatgctgagtaaagagccaatgtgttctgatatctgtgctaatttaaggagaacattccacttggtggtttaaatttacattccttgaatgacttatgagtaagccacatattgcacaaggatcatttataattattctgtcttccatttatgtctatttttattataatattagaataaactgtcatatataacaatgcttgtaaaattcattacattgacctatgtgtagattactatgtcagtaccacatatttaaaaaactgatgtaaactttagaataattttaatcccatatatttcatatatatctgtctgggatcctatatagccaagatatatatagatagatacctttaataatctcatgtgtatattccataaacagcatttcttttttttttttttttttttttttttttttttttgagacggagtctcgctgtgtctcccaggttggagtgcaggggcgtgatctcggctcactgcaagctccgcctcccaggttcatgccattctcctgcctcagcctcccaagtagctgggactacaggcgcccgccaacacacccggctaattttttgtatttttagtagaaacggggtttcaccgtgttagccaaggtggtctcgatctcctgacctcgtgatccgcccgtctcggcctcccaaagtgctaggattacaggcgtgagccaccgcgcccggcctccataaacagcatttctaaatgcaccactttcccatccaagaccatagtaactgtaaaaaaaaaaaattacttctcagaatgttgtcgttttctctgtttagatttcacacataagtaaaggttatgatccatctacctgtgttgatagttgttcataggtattttgtgcagttttctatgctatgtgaatagagtattttcttcaattacagcatctaaataactactaatatgtagaaa

SEQ ID NO: 25597 - DNA, 1652 bp, Homo sapiens
tattgttcaatttgaagcctacttttaaaaacttaacattaggccgggcatggtggctcccgcctgtaatcccagcactttaggaggctgaggcgggcagatcacctgaggctgggaattcgagaccagcctgaccaacatggagaaaccccttctctactaaaaatacaaaattagccaggcgtggtggcgggtgcctgtaatccaagatacttgggaggctgagacaggagaattgcttgaacccgcgaggcggaggttgcagtgagctgagatcgcgccattgcactccagcctggacaagaacagtgaaaccccatctcaaaaaaaaaaaaaaaaaaccttaacattaaaacaaaacaacagcattttcttttgtcactgtaagtgatgttctaagtatgattttattcatgactgaaggccatccattttttaatgtagatgtaccataattcacgtaaacacttaccacattgcattggaggttttatttttccttttggcattatgaataatgtcgcgcactaccacggttcatacacacatgctccttctctaacctcgctggagctagaatcactgaatgaagtcatattggcttatttaaaggatctaaaagttatgctgcaggtgtggcccattgcatcccacttcccacacagcacgagaaagaattcactaactatggcattgttgtgaatgctgagtaaagagscaatgtgttctgatatctgtgctaatttaaggagaacattccacttggtggtttaaatttacattccttgaatgacttatgagtaagccacatattgcacaaggatcatttataattattctgtcttccatttatgtctatttttattataatattagaataaactgtcatatataacaatgcttgtaaaattcattacattgacctatgtgtagattactatgtcagtaccacatatttaaaaaactgatgtaaactttagaataattttaatcccatatatttcatatatatctgtctgggatcctatatagccaagatatatatagatagatacctttaataatctcatgtgtatattccataaacagcatttcttttttttttttttttttttttttttttttttttgagacggagtctcgctgtgtctcccaggttggagtgcaggggcgtgatctcggctcactgcaagctccgcctcccaggttcatgccattctcctgcctcagcctcccaagtagctgggactacaggcgcccgccaacacacccggctaattttttgtatttttagtagaaacggggtttcaccgtgttagccaaggtggtctcgatctcctgacctcgtgatccgcccgtctcggcctcccaaagtgctaggattacaggcgtgagccaccgcgcccggcctccataaacagcatttctaaatgcaccactttcccatccaagaccatagtaactgtaaaaaaaaaaaattacttctcagaatgttgtcgttttctctgtttagatttcacacataagtaaaggttatgatccatctacctgtgttgatagttgttcataggtattttgtgcagttttctatgctatgtgaatagagtattttcttcaattacagcatctaaataactactaatatgtagaaa

SEQ ID NO: 25598 - DNA, 1652 bp, Homo sapiens
tattgttcaatttgaagcctacttttaaaaacttaacattaggccgggcatggtggctcccgcctgtaatcccagcactttaggaggctgaggcgggcagatcacctgaggctgggaattcgagaccagcctgaccaacatggagaaaccccttctctactaaaaatacaaaattagccaggcgtggtggcgggtgcctgtaatccaagatacttgggaggctgagacaggagaattgcttgaacccgcgaggcggaggttgcagtgagctgagatcgcgccattgcactccagcctggacaagaacagtgaaaccccatctcaaaaaaaaaaaaaaaaaaccttaacattaaaacaaaacaacagcattttcttttgtcactgtaagtgatgttctaagtatgattttattcatgactgaaggccatccattttttaatgtagatgtaccataattcacgtaaacacttaccacattgcattggaggttttatttttccttttggcattatgaataatgtcgcgcactaccacggttcatacacacatgctccttctctaacctcgctggagctagaatcactgaatgaagtcatattggcttatttaaaggatctaaaagttatgctgcaggtgtggcccattgcatcccacttcccacacagcacgagaaagaattcactaactatggcattgttgtgaatgctgagtaaagagccaatgtgttctgatatctgtgctaatttaaggagaacattccacttggtggtttaaatttacattccttgaatgacttatgagtaagccacatattgcacaaggatcatttataattattctgtcttccatttatgtctatttttattataatattagaataaactgtcatatataacaatgmttgtaaaattcattacattgacctatgtgtagattactatgtcagtaccacatatttaaaaaactgatgtaaactttagaataattttaatcccatatatttcatatatatctgtctgggatcctatatagccaagatatatatagatagatacctttaataatctcatgtgtatattccataaacagcatttcttttttttttttttttttttttttttttttttttgagacggagtctcgctgtgtctcccaggttggagtgcaggggcgtgatctcggctcactgcaagctccgcctcccaggttcatgccattctcctgcctcagcctcccaagtagctgggactacaggcgcccgccaacacacccggctaattttttgtatttttagtagaaacggggtttcaccgtgttagccaaggtggtctcgatctcctgacctcgtgatccgcccgtctcggcctcccaaagtgctaggattacaggcgtgagccaccgcgcccggcctccataaacagcatttctaaatgcaccactttcccatccaagaccatagtaactgtaaaaaaaaaaaattacttctcagaatgttgtcgttttctctgtttagatttcacacataagtaaaggttatgatccatctacctgtgttgatagttgttcataggtattttgtgcagttttctatgctatgtgaatagagtattttcttcaattacagcatctaaataactactaatatgtagaaa

SEQ ID NO: 25599 - DNA, 1519 bp, Homo sapiens
gttcccagcttctgcaggataccttcatcaccaagagcaggtttcagtccattcctacgaggttccagcctattagtgagcttttcttcctgtctgcactgagaacttcatgctccagcatcagatttgtagccctccaagacggcttaaccagcccccgtaattgtataaacaaatcctgctttaataaatcccttcatatatatacacatatctcctactgactctacttctcttgttaaacctgactgatgcagaatttggtaacaggagtgaggaagccaggaagagtgcattcaactgtttattcattcactcaatacaaatggaccatattacatatatacaggttaaatatcacttatcagaaatgcatgggacaagaagagtttcgaatctggcggtttttcagattttgaaatattttcacatgcataatgagatatcttggggatgggacccaaggttaaactccaaatttactaatgtcttatacataccttgtatacatagtctgaaggtaatttcatatggtagttttaccaactttgtgcatgaaacaaagtctgtattgtgtaactaggtgtggaattttccattttccacttggaatattatgtcgctgctcaaaaagtctctgagtttgaagcattttggatttcagatttttagattaggaatgctcaacctgtaattatataatctgcctttatcacctgaaaacatatcatgaacattttgttctatgtgaatacttaatctatttttaatgggtagatagtcctttgtaattatgaaccatagtttatttaataaagtacttaatatgagcattcagattgcttcgaatgacaagcccaccataaacatttctgtacgtaggtatttgcatacttttctgattatcctcttaggataaattccagaagagaaattgtttagtcaagtgatatgctcaattaagttttttatttgtttgatcagaataggtgttccgatttcctcccctaccagctgtgtatgaaatgactcgattcttcagaacttccttgatattttaaatcaaggcacccacaatgaattgcagtggtttgttctgtgaattaaactggacttactattgcttttagaggtctctaaatgctgtctattaagccaattggctgctttccccttcaggtgacatctccatagccagcttttaaactcttagggtcagtgactgaagccagagcctttccagttctagttccrctgcacacctccaagaacctccatcagggccatcctccaccatataagactatgcttaaagcaagcaaataggccaatgctagctgaggaagttttctgaaagcagcttgcttgtgggtagtgctgatgtgctttcattcaccactgtttgcaaagtactaaagtaattggagatctttagcaggaaattctgctgactgagagaggatgaagtgctgaaatccttttaactcccacagcacttactcagaaccatctgaatgca

SEQ ID NO: 25600 - DNA, 552 bp, Homo sapiens
tgtttgatgaatgcagtactctcttgtgagggtttgtatgaagaataaatattagaaatgattgtggggcactttgaaaataaaaattgttatgaaatgataattatattcaaaacaccctttgacatcaacttacagaggaaaaagtgtaatttttcccattgtagacctttttaaggaattccatatttggtttatccctagaattttctatacttgtgtataccatacttctcctaacccattaatggagttgttaaacatcatataatattgaaagatatttctattagatgagctttcaattattaatggtaatggaaraacattaatgcagctcttacaacatgacagactgtcagaaagatctcaggaatagtgaagggccagagatcctagagtccctgatctgtataaatttgctgcagtatctttataaagtggataataattgtgttagagatcatttgatcagggagaacccagctcaactgtgcaattcagaagagctgggagttaggaggaggttatcctcaatatattaaggcattc

SEQ ID NO: 25601 - DNA, 1315 bp, Homo sapiens
tgcatgtgataacaccatatagtttaggttatatgtgtatatttgtacagtatttcttctgatgttaaatttctgtatacattttcttgtaaataagaatagaaaatagtgtctccatcttctctctacacatttgcacatctttccaatcttacagacctgggtgattgtgctgtaggctagaatatgcgcagactctagtcaaacatacttgatatctacttcctcctctggtgcatagtagatggatgtgggataagtcacctagcccatttctgaacttcagttgtaatctgtaaaatgagatcattgatagctaactaataggttgcttggaagtacagatgtaacaatgtcaagaatctccatagttgacatagaacagacttaatactgaataagtaaagtgtccacagctgctgttattgcaatgtgtgtttgtccattagaggcctccttttaattacactttctttcaattaaataatgcaaaataaggtaattagaaaatagtatgtttaatgtttttgactaaagttttgcactcactaaatggaagaataaataattagttaggcctaatatggtcatgtgccatgatgttatttatcaaacattatttagttccatttagcaaatttaatgcctactatatgcaaaacatcatgttcaatgctggcaaagggggatgatgaatgttaataaattagatatagttctgctacttagtgacttaaaatccagtgattgacagaaacacagaggttaatttacggttgtcagtaaaagtatatgaagaaatgcataaatggtcgagtgcagtggctcatacctgtattcccagcactttgggaggctgaggctggcggatatcctgagcccaggagtttgccaccagtctgggcaaaaccgatggaatgatgaaattccatcttacaaaaaaaaaaaaaaatgcagaaattagccaggtgtggtgctgcgcacctatggtcctaggaactcaggaggctgaggtgggaggattgtatgagcccrgaagatggaggttcagtgagccaagatcatgccactgcacttcagcctgggtaacagagcaagaccctgcctcaaaaacaaacaaacaaaaataaagtactgtgagatagaataggaaactgtgagatagaataggaatacaggattgtctgaatggagtgaattggaacgcctccttatgcaagtgacctagaaaggaagaggaggctgctatgaagtttaaacgctctctagaaaacagcatgaacaaagaaagacttggatttgagaaagctcagag

SEQ ID NO: 25602 - DNA, 1062 bp, Homo sapiens
cccctccttctccacaccagaagggctgcccccacactcagctttctacaggactgctggcttccttcacctgggagggaggactctaattttctatgcaccgtaagatgaattgcaggacagctggtgtccccacactatttctttacatggttggccccataattctggactgatagcaccgagtagcctatgtgttccaccctcttcagagactgttttctcacttttggtctacaaatgggagaagaacagggcccacttggtccctactggcaatcagatccttactgcaggcccagaaatggctcctccctgtgaagtatagaagcaccagctttgtaagttttccatttcctcaataaacctattcgttgtgccatgtcaatcaatttaaaccaaaccatgatgcatcataggcagagatccacaagggtccacctcatatgacatgggcctggggaccctgcagaggtaggcagcaagggtatcctggtgtgtgcagggtatgaactatcctggtgtgtgcagggtgtgaactatcgtgtgtgcagggtgtgaactatcgtggtgtgtgcagggtgtgaactatcctggtgtgtgcagggtgtgaactggaggaagggggaatatattaggttggtgctgcagtttytgccattgaaaagaaatggcaaaaaccacaaggacttttgcaccaacctaatagtaaagaagaggggatagtgtgcgctaggagtcatgggacttgggacagcagggacggccggaacctcttttgggcaaggcctttgcagcagacatctgttgtttctgcttgcctgccttcttcccgttctattgctaatagtacatcaatgtttctctgaagaaacttcctttcccataccatgcagtctggcgggcctgttagtgctggccattctctggccaaggaaagagctaattcatgccatgagaacctctcagggatttaaatcctgagcacaatcaccaggaactgaaaaccatggcacagactcaccagatggagtccctagggagtgagtccattcttgccct

SEQ ID NO: 25603 - DNA, 1114 bp, Homo sapiens
aagaggcaaggccacaggctcctggaggagggtaacggctcccggagtggactccactgaaagtgggctttggaaggtcctgggctattactggtggaaggacattccatcaagacacacaagagaatcccatcaagacacacttayctcaacttttaaaaaatgcacattttattcctcttctgttgcattatgaggcacacataaaattcctcttttttatggacagaactgcccatctcagggcctgcaggatgacattcagaagccggtgctctgctggaacccactgttccttgctctctgtcaccatcagctcctcactccgagtctgattctcctcatgactccgggtttcaggaggccacggatcaacttctgccatcagccccttcccttctcagggccttgcctgacagcttccttgtcagcctgtgtgcactgggcatctactgtatggttcatttctggaaggtgcccctgaagcacagacatcactcgtagaacgactaggctctctgagagcttgtcatggacacagaactctcaaagaattttgagggggagatgagtaaggtatttcatcagaggcaatgtctgaacatggaggtgacaatgtgcagaatcccgtttaccttcctccttcttttctgcaacgtcttcagcctgctgcatcccacaggagtcatccacagagatgcgctactcagacccatgaagagaaggacttgtggcccagctagctgcaggaccatggccgcctggcagcctcctctgctgatcttctcaacttcccctctgtattcaagcacacgcttcctgagcagccactggcccaggactgagatagtcaggggcccatggcctgaccctccccaccctcagaggcagctgagatgggctagcagacgggctggcagtgaggtccgaagagctgcctggtggctctttttgcccagtttcacttcctcctctcctccaggcactgaggttcctccccagtatgccttctgtacacctagctctctgtctgtgtctactttcaggaggacaccacccacgatacttcagttccacttaacccctaaacccatcaaatattgcttcaaaatag

SEQ ID NO: 25604 - DNA, 1114 bp, Homo sapiens
aagaggcaaggccacaggctcctggaggagggtaacggctcccggagtggactccactgaaagtgggctttggaaggtcctgggctattactggtggaaggacattccatcaagacacacaagagaatcccatcaagacacacttacctcaacttttaaaaaatgcacattttattcctcttctgttgcattatgaggcacacataaaattcctcttttttatggacagaactgcccatctcagggcctgcaggatgacattcagaagccggtgctctgctggaacccactgttccttgctctctgtcaccatcagctcctcactccgagtctgattctcctcatgactccgggtttcaggmggccacggatcaacttctgccatcagccccttcccttctcagggccttgcctgacagcttccttgtcagcctgtgtgcactgggcatctactgtatggttcatttctggaaggtgcccctgaagcacagacatcactcgtagaacgactaggctctctgagagcttgtcatggacacagaactctcaaagaattttgagggggagatgagtaaggtatttcatcagaggcaatgtctgaacatggaggtgacaatgtgcagaatcccgtttaccttcctccttcttttctgcaacgtcttcagcctgctgcatcccacaggagtcatccacagagatgcgctactcagacccatgaagagaaggacttgtggcccagctagctgcaggaccatggccgcctggcagcctcctctgctgatcttctcaacttcccctctgtattcaagcacacgcttcctgagcagccactggcccaggactgagatagtcaggggcccatggcctgaccctccccaccctcagaggcagctgagatgggctagcagacgggctggcagtgaggtccgaagagctgcctggtggctctttttgcccagtttcacttcctcctctcctccaggcactgaggttcctccccagtatgccttctgtacacctagctctctgtctgtgtctactttcaggaggacaccacccacgatacttcagttccacttaacccctaaacccatcaaatattgcttcaaaatag

SEQ ID NO: 25605 - DNA, 1114 bp, Homo sapiens
aagaggcaaggccacaggctcctggaggagggtaacggctcccggagtggactccactgaaagtgggctttggaaggtcctgggctattactggtggaaggacattccatcaagacacacaagagaatcccatcaagacacacttacctcaacttttaaaaaatgcacattttattcctcttctgttgcattatgaggcacacataaaattcctcttttttatggacagaactgcccatctcagggcctgcaggatgacattcagaagccggtgctctgctggaacccactgttccttgctctctgtcaccatcagctcctcactccgagtctgattctcctcatgactccgggtttcaggaggccacggatcaacttctgccatcagccccttcccttctcagggccttgcctgacagcttccttgtcagcctgtgtgcactgggcatctactgtatggttcatttctggaaggtgcccctgaagcacagacatcactcgtagaacgactaggctctctgagagcttgtcatggacacagaactctcaaagaattttgagggggagatgagtaaggtatttcatcagaggcaatgtctgaacatggaggtgacaatgtgcagaatcccgtttaccttcctccttcttttctgcaacgtcttcagcctgctgcatcccacaggagtcatccacagagatgcgctactcagacccatgaagagaaggacttgtggcccagctagctgcaggaccrtggccgcctggcagcctcctctgctgatcttctcaacttcccctctgtattcaagcacacgcttcctgagcagccactggcccaggactgagatagtcaggggcccatggcctgaccctccccaccctcagaggcagctgagatgggctagcagacgggctggcagtgaggtccgaagagctgcctggtggctctttttgcccagtttcacttcctcctctcctccaggcactgaggttcctccccagtatgccttctgtacacctagctctctgtctgtgtctactttcaggaggacaccacccacgatacttcagttccacttaacccctaaacccatcaaatattgcttcaaaatag

SEQ ID NO: 25606 - DNA, 1114 bp, Homo sapiens
aagaggcaaggccacaggctcctggaggagggtaacggctcccggagtggactccactgaaagtgggctttggaaggtcctgggctattactggtggaaggacattccatcaagacacacaagagaatcccatcaagacacacttacctcaacttttaaaaaatgcacattttattcctcttctgttgcattatgaggcacacataaaattcctcttttttatggacagaactgcccatctcagggcctgcaggatgacattcagaagccggtgctctgctggaacccactgttccttgctctctgtcaccatcagctcctcactccgagtctgattctcctcatgactccgggtttcaggaggccacggatcaacttctgccatcagccccttcccttctcagggccttgcctgacagcttccttgtcagcctgtgtgcactgggcatctactgtatggttcatttctggaaggtgcccctgaagcacagacatcactcgtagaacgactaggctctctgagagcttgtcatggacacagaactctcaaagaattttgagggggagatgagtaaggtatttcatcagaggcaatgtctgaacatggaggtgacaatgtgcagaatcccgtttaccttcctccttcttttctgcaacgtcttcagcctgctgcatcccacaggagtcatccacagagatgcgctactcagacccatgaagagaaggacttgtggcccagctagctgcaggaccatggccgcctggcagcctcctctgctgatcttctcaacttcscctctgtattcaagcacacgcttcctgagcagccactggcccaggactgagatagtcaggggcccatggcctgaccctccccaccctcagaggcagctgagatgggctagcagacgggctggcagtgaggtccgaagagctgcctggtggctctttttgcccagtttcacttcctcctctcctccaggcactgaggttcctccccagtatgccttctgtacacctagctctctgtctgtgtctactttcaggaggacaccacccacgatacttcagttccacttaacccctaaacccatcaaatattgcttcaaaatag

SEQ ID NO: 25607 - DNA, 1114 bp, Homo sapiens
aagaggcaaggccacaggctcctggaggagggtaacggctcccggagtggactccactgaaagtgggctttggaaggtcctgggctattactggtggaaggacattccatcaagacacacaagagaatcccatcaagacacacttacctcaacttttaaaaaatgcacattttattcctcttctgttgcattatgaggcacacataaaattcctcttttttatggacagaactgcccatctcagggcctgcaggatgacattcagaagccggtgctctgctggaacccactgttccttgctctctgtcaccatcagctcctcactccgagtctgattctcctcatgactccgggtttcaggaggccacggatcaacttctgccatcagccccttcccttctcagggccttgcctgacagcttccttgtcagcctgtgtgcactgggcatctactgtatggttcatttctggaaggtgcccctgaagcacagacatcactcgtagaacgactaggctctctgagagcttgtcatggacacagaactctcaaagaattttgagggggagatgagtaaggtatttcatcagaggcaatgtctgaacatggaggtgacaatgtgcagaatcccgtttaccttcctccttcttttctgcaacgtcttcagcctgctgcatcccacaggagtcatccacagagatgcgctactcagacccatgaagagaaggacttgtggcccagctagctgcaggaccatggccgcctggcagcctcctctgctgatcttctcaacttcccctctgtattcaagcacacgcttcctgagcagccactggcccaggactgagatagtcaggggcccatggcctgaccctccccaccctcagaggcagctgagatgggctagcagacgggctggcagtgaggtccgaagagctgcctggtggctctttttgcccagtttcacttcctcctctcctccaggcactgaggttcctccycagtatgccttctgtacacctagctctctgtctgtgtctactttcaggaggacaccacccacgatacttcagttccacttaacccctaaacccatcaaatattgcttcaaaatag

SEQ ID NO: 25608 - DNA, 2866 bp, Homo sapiens
tagtgtgcctgaagtggtaatatatttatgagctgctttgagaatgaacgcaaattattaactgggcagcacgcaagagaattgattaacggaagagctgttttctatgtctccagtgccacccatcaccttgcaaacactgaacaaaatacttttgccttagaggtaatttaactaacaatgagactaaactagcagaagatactttgcatgttactaattagaaaatgcactcgttcctgtcctcgcccctccttctctcccaagctaacatgtctttattattcagatatctagttctcttctccttcaagaatcttcactgatcctcacagctgggttaaatgctgctgctgtctcagctatggggctctgggctggctgtccccaccccgattgctgcattgcatcccagctctctatttcttcatttgccgccctggttggtaattgtgagctccatgagtgtgggaactattcattttatcccagaatccacagcacctagctcgctgcctggtcgatgtggacattcaccaaactttgttaagcaaatgaataaatggacgagtcaatgaatgaatcaaagaatgagtggaagggcccctttaataaagcattgcagtgctaggtacacagtagtcatttatagaactggtggcattgaacagagagctaactaggaggcgatgctcgactacagagagcttagaaattctattgagattatgttgagtactatatgcctgtcatgtttgtattggcagctacaagaatgtacttcttgccttaaatttttttttttttttttttttttttgtgagaccgagtctcactctatcaccaggctggagtgccgtggtgcaatctcggctcactgcaaccttcacctcctgggttcaagcaattttcctgcctcagcctcccaagtagctgggactatgcaccaccatgcccagctaatttttatatttttagtagagatggggtttcaccatgttggcgaggatggtcttgatctcctgacctcgtgatccacctgcctcagcctcccaaagtgctgggattacaggcatgagccactgcgcccagtcaaaatattttgtattttaaagtaagactgcaataggattcaaccattacggtaataatggtaaaaataataccatattgtaatcatcctgtacatttgttccaataaagctttatatttatgcattattttaaaataggtcatcttgtgtaatttcccccattttctgagaagaaacagagctctgagagattacggaactttccctgggtaataggcctgtggcctcccagggtctgtaagaaaccagtgtctatactggcctaataccccttggaagctgtctatgctgtttgtgattattaccagactgattctgtggtaagatcgacatgtttttctgaaagctgatgataattaaagagtaaatttgtcaaaaataaattgaccaaaatgacaagtgttctcagtcaaaactttcttcacataatgttaatttttgaacacaatgatccagtattcaagctttgtatgaatctttttaagcattggcatctgtgcctcagaatttatttttacttttaaaacaattgtgcgtatcttttatgttgctataggatttgtttttcatactttttcttttctaattctaatttaccttcaacttcaattatgctagcttccacttttctaaaaatgttgtgacatatctaattttcatgtaaaagaaaaaaatttcaaaaataaaagctgagaatcacaacttccaatcatgatgatttcttggcaactctacattgatttttttaatctatgttagtttgtccattttctaagttcttttactaaaatgtgttttaattttacattcatttcagatagctattcctattttacttcttttgattttgttttcaccatgttagactctgaatttattttattttaaattactcttatgtaatgtaagcataatttttgccacctcatggcattatattgccatcatttgatagaaattctgaagtctgaattaaagccctcgtaaaagttatgttccatgcagatttaagacaaaccataggcttagaaaaataaaccaaaatgaatgttcccaatgaaagcatgtaaagattcacaaataattgaaaagaacatgagaaacataatgagagctcgaagataggcaaaagtatacacaattactcaatggtgtgccaagttaccaatgcataaaaatatttggttttgttcaatttgttctttaaagtcatagtgtagggtttattggttaaacatatgaattcatawcctaatgaatgcgtattcatgatgctgtgattttagtgacagattattaggtaactccttaattatgctgataggcttcatttatttgttcatttttgacaaggaggagttttcaccctaaaagacatgtcaattaccctggtcaagaaatgagactggccttaggatcaaaagatggaagaacttcctcattcactgccaagacaaaaagatgttgggaaagggctctgtgcaaaagggctggaagccctcctgactcagccacacttgcactgtgtgtggccaccagtgccatgtgatcatttgtgagcatgtaaaccggaagagctgtggagctatagaggtgagatggagatgtcagatgggagcaaccattactaaagcaagttcccgggacgcagagatactgtcttctccccctgcaccttctgctaaaccattgagggtggcagttgcccctgccattgaaacactcagtatttgggccaccagatttgtgtggaggtgtgtccaggcaatcaa

SEQ ID NO: 25609 - DNA, 1592 bp, Homo sapiens
gcaccactagctacatgtgtaaaattgagaaagttcatctgtatgccacgccaatcatcagctctattaaagctgtgtgtactacaccgcaccttaggaagcctagatctatcttcttatccatcactcatttccacagtcttggaagattgaacataataactccattttacagatgcagagaccaagagagtttaagtaaattgccaaaagtcttatgtcgtttttctcattccaaagcacctgatctttctactgtgaatccagatataggttaattagattcatcttatgcaatgtatttccgtagtagacacacatttttttgtgtctatgctgtttatgctccttatcttaaaagtcatggtaagtaaatgtgaaaatcttatgtgttttttttttttttttttttttgagatggagtcttgctctgtcgcccaggctggagtgcagtggggtgatctcggctcactgcaagctctgcctcctgggtccatgccattttcctgcctcagcctcccgagtagctgggactacaggttcccaccaccatgccctgataattttgtgtatttttagtagcgatggggtttcactgtgttagccaggatggtctcgatctcttgacctcgtgatccgcccaccttggcctcccaaagtgctgggattacaggcgtgagccaccatgcccggccgatcttatgtatttttatactagaatttaggtcattatgcacctcagaaaattctccttaaaaatgagagtgtttttcaatattcctatctttgaaacactgatgtttaatgttgtgtattgtcttgcctgctgttcatgcaaactccagagtactggcttagaaaaatcccaaggaaagaatcaaccaatgtgtatctacgggactgcaggatggactcaaagcaaaccattttcactaaaatgatgaaacttcccatttgttttggaagccctttcagcctgtgcacctaattcacagatcccctacattcagagagagggaaccacggaaacagtactacccgtggggacaccacgtgtcacactgcgtggctggcttttatgccgcagtgcgatgacatgccrcgttgagacattgtaacgagaatgtgtaagactttacatctgttaccttcagatctcattggggaagaaggaagaagttattgcaggcagtgttaaaaaagaggacagggagtgagagagacaaggagagagagagaaagagagagagcacaattctattactcaagtcatccattcctgaccatacagcgccttaatatttaatatttataactatactcagggagacaggactgggggcatttctctaagagtctgctgatgtgttcccacctggcaggaagaccagaagccctcatcaggggctttctgccccaacacaatgcttaagtaagtcttcccatcacttcatgttttaaaacatccatatttttagagtggtcatcttaacttaatttttaaaattatagttagagccaggatgcagacgcctcactggaagcctgacaagcagtcacacagtgcctgtagcaaacagccagtgtcgtgg

SEQ ID NO: 25610 - DNA, 512 bp, Homo sapiens
atttgcaaatggcagcgggtgtaaagttggcacaattctgccctgtttctacttcctaccattagtcattgcttgctcacttcactaagcttcatctgagtttctatagtccacttcctccccatcaaaacaaaacaacacagaacaaaagatttcccttcaaatctaagtatctatgaaattccctgaatctaagcagaaatgaggatgaacctgaaatacaaatttattyttatttttagtgcgacaagtgttatttcctcttgagtctgaatccaaggttttaatgcaggcctcaacgtgacagtttttactcagacaagagtgcattcagggcccaataaacctctcgggcaaaagccgaaagacacaggggaacagcccagagaatatgaaagccgtgaaacaggtataaattgaaaaaaattcaaaagcaaagagttgttcgactgaatttaaagttatagatggagaagaggagggtgaggaggaggaggaagaggaggaggagg

SEQ ID NO: 25611 - DNA, 1417 bp, Homo sapiens
agggcttcctgtggagcttctcaccctcacgcctggcctgaggaaggggaggtccagcccttaccttcctaccagggtcaactcactccactgtcctctgttctcagaggagttgccaatgttagatggcaggaaaaaccttccatttctgctcatccatccatccaaccatccatccgtctatccatccgttcgtccatccttccatctgtctgcttgaccattagctgtctgtccatctgtcaatccatcaatctctccatccatctgttcatccacctacccaataaaactaatgagctgcatcacaggccctgccccgggcactgggactatgaggagagcaagagagacactcagatcctttttcctgctgtttaacatctgctcactctgccacacagagccccccartaacctcaaccccatggtcaggatgtgcaggctgggtcaagtgatttctgcacaacttttggttcgggttttccctgggaatcagatccactcagttttgatcttggtgtgatgactatgatgaacagcaggaatcagatccactcagttttgatcttggtgtgatgactatgatgaacagcaggaatcagatccactcagttttgatcttggtgtgatgactatgatgaacagcaggaatcagatccactcagttttgatcttggtgtgatgactatgatgaacagcaggaatcagatccactcagttttgatcttggtgtgatgactatgatgaacagcaggaatcagatccactcagttttgatcttggtgtgatgactatgatgaacagcaattgcttagcaagtgccttccatgggctgtgtggtgttgctgtccccactttataggcaaggaagctggggctcagagaggccacaatcgccacggccatatgggtaggacttggcatagtttcagtatgtcttctctgtccaaagcctctgcctttcctttgcatccccttgtccttcaacaacttgcactatggcccttcctgcctcagtttcctcttctgtaaaataagggtgcaatctggacagaagctcagtgttgaagggttattttagccccaccctcaaggatccttgcttcttgggtcatgcacagttcccagggcttccctgctgctgccttgtgtctagcagaaatggacatcccagttgcaggtcaagtcgtgcttggctggaggccgaaggaaggagaaatgccctagaatcaggaaggcatgacctgaccggaattcaccttctatctgtgacatccactgcccacccttgggcttctgactgcggtgcctgccttccaaaatttgtaccttttatgtgttccatgtttagaaataatttccttaaaaaatatttgtggagtttctaatgaggctaaaacagtaaagtcactag

SEQ ID NO: 25612 - DNA, 1388 bp, Homo sapiens
ttgtcgcccaggctggagtgcagtggcgcgatctctgctcactgcaagctccgccttccaggttcacgccattctcctgcctcagcctctagagtagctgggactacaggcgcccgccactacgcccggctaattttttgtattttttagtagagacggggtttcactgtgttagccaggatggtctcgatctcctgacctcgtgatccgcccgcctcggcctcccagagtgctgtgattacaggcgtgaaccaccgtgcccaacccacagagttgtactcttattagaacacaaatctattcatctgatcagcttagagaattctattcatattttrtttcaagagtgatgcatgaacaaagctggtctgttttattatcttataattccatttacagatatctgatcatagcttatgtattacctgtaaatagaattgggggaagatataaaatctgggcaataaagtattatcaactttttctcactgagtttgtcttttgcctaacatctgttttggaattgattagcacccgaaaccacaaagcaatgcctttctctggcccaagtgcaaccatatcatatataagaagaaaagaaattacagaatgattcatcatcaagcaattctaagagtaaggctcctgtaatgatatcacacaagagggaataaccctgtaggaaaatcttaccagtcatttttgaggttgattattggcacataaaactatccctctgaagcatttttggaaggatccaatcagccctgtgagaccatctgtttcatggttgccataagggtaatagcttgcagttgtgggcaacacttgactcagttactgcacacagatctcactgccttaaacgctgaattaatgattcaaagcaccttcttaacacgcttattgaactaattggctccaagaaaagggttttcagctgtgagtctaacataactatcaacatactataataacatttatattgtatgactctcctcttttattaagacctagatggtcatcaaagaattcattctgtattctgtgttagagactaccatgtgcttgctaaaacctgtttattttcaacctgggcattttattccaatcgatttctcaggttcccttgtagttcggtgtggcatgtaaatgagtttacatcaattgaattggagcagaagctgttccctccttcacacctggcccattaaaatttacagtttgtgcctttcagagtctttttctctatatctaccaataaaatggagaggatctatcagaagaccatagggtgttagcaaatggcagaacaacaaaaataatcacatccattgagcagatgcctagccaaagaaactgttgatacctttcttaaacgctgttga

SEQ ID NO: 25613 - DNA, 1388 bp, Homo sapiens
ttgtcgcccaggctggagtgcagtggcgcgatctctgctcactgcaagctccgccttccaggttcacgccattctcctgcctcagcctctagagtagctgggactacaggcgcccgccactacgcccggctaattttttgtattttttagtagagacggggtttcactgtgttagccaggatggtctcgatctcctgacctcgtgatccgcccgcctcggcctcccagagtgctgtgattacaggcgtgaaccaccgtgcccaacccacagagttgtactcttattagaacacaaatctattcatctgatcagcttagagaattctattcatattttatttcaagagtgatgcatgaacaaagctggtctgttttattatcttataattccatttacagatatctgatcatagcttatgtattacctgtaaatagaattgggggaagatataaaatctgggcaataaagtattatcaactttttctcactgagtttgtcttttgcctaacatstgttttggaattgattagcacccgaaaccacaaagcaatgcctttctctggcccaagtgcaaccatatcatatataagaagaaaagaaattacagaatgattcatcatcaagcaattctaagagtaaggctcctgtaatgatatcacacaagagggaataaccctgtaggaaaatcttaccagtcatttttgaggttgattattggcacataaaactatccctctgaagcatttttggaaggatccaatcagccctgtgagaccatctgtttcatggttgccataagggtaatagcttgcagttgtgggcaacacttgactcagttactgcacacagatctcactgccttaaacgctgaattaatgattcaaagcaccttcttaacacgcttattgaactaattggctccaagaaaagggttttcagctgtgagtctaacataactatcaacatactataataacatttatattgtatgactctcctcttttattaagacctagatggtcatcaaagaattcattctgtattctgtgttagagactaccatgtgcttgctaaaacctgtttattttcaacctgggcattttattccaatcgatttctcaggttcccttgtagttcggtgtggcatgtaaatgagtttacatcaattgaattggagcagaagctgttccctccttcacacctggcccattaaaatttacagtttgtgcctttcagagtctttttctctatatctaccaataaaatggagaggatctatcagaagaccatagggtgttagcaaatggcagaacaacaaaaataatcacatccattgagcagatgcctagccaaagaaactgttgatacctttcttaaacgctgttga

SEQ ID NO: 25614 - DNA, 1388 bp, Homo sapiens
ttgtcgcccaggctggagtgcagtggcgcgatctctgctcactgcaagctccgccttccaggttcacgccattctcctgcctcagcctctagagtagctgggactacaggcgcccgccactacgcccggctaattttttgtattttttagtagagacggggtttcactgtgttagccaggatggtctcgatctcctgacctcgtgatccgcccgcctcggcctcccagagtgctgtgattacaggcgtgaaccaccgtgcccaacccacagagttgtactcttattagaacacaaatctattcatctgatcagcttagagaattctattcatattttatttcaagagtgatgcatgaacaaagctggtctgttttattatcttataattccatttacagatatctgatcatagcttatgtattacctgtaaatagaattgggggaagatataaaatctgggcaataaagtattatcaactttttctcactgagtttgtcttttgcctaacatctgttttggaattgattagcacccgaaaccacaaagcaatgcctttctctggcccaagtgcaaccatatcatatataagaagaaaagaaattacagaatgattcatcatcaagcaattctaagagtaaggctcctgtaatgatatcacacaagagggaataacyctgtaggaaaatcttaccagtcatttttgaggttgattattggcacataaaactatccctctgaagcatttttggaaggatccaatcagccctgtgagaccatctgtttcatggttgccataagggtaatagcttgcagttgtgggcaacacttgactcagttactgcacacagatctcactgccttaaacgctgaattaatgattcaaagcaccttcttaacacgcttattgaactaattggctccaagaaaagggttttcagctgtgagtctaacataactatcaacatactataataacatttatattgtatgactctcctcttttattaagacctagatggtcatcaaagaattcattctgtattctgtgttagagactaccatgtgcttgctaaaacctgtttattttcaacctgggcattttattccaatcgatttctcaggttcccttgtagttcggtgtggcatgtaaatgagtttacatcaattgaattggagcagaagctgttccctccttcacacctggcccattaaaatttacagtttgtgcctttcagagtctttttctctatatctaccaataaaatggagaggatctatcagaagaccatagggtgttagcaaatggcagaacaacaaaaataatcacatccattgagcagatgcctagccaaagaaactgttgatacctttcttaaacgctgttga

SEQ ID NO: 25615 - DNA, 662 bp, Homo sapiens
  misc_feature (1)...(662): n = A,T,C or G
tctttccattagagatccgcatggagaagtttatcaagggaggaatttgggatcacccctattgaagagaaagaatggaacagaattggccagagggaaaaattagataatgatacgtctcagtgaaggtctcatatgacccanaagaaaatacaatgttagaatagccttttagaattatcctatggaagtcattggatggtagcttccttgagatkagaccatcactttgggagcagcatctctcttcagccagataattacagagaatgtggacagttgagggctctctgctgacattctcaactttggtcctgaaaatggatgtggatggcacatcacagtgttgagtattgtccactctctgtgtatctcactaactccaccacaattttcgaaactcaaacttgtaagaggaagtttagcagaaggaatgaggaaaatgtctttagggcatgtgagaggtcatcacggttatctctaagctaaatggctaagcctaggagtcaattaatctggaaattaagattaccacctggacactttgggctcctgctacctttaagtcaacaggctaagaagagagttatagtgttggctggggtgattgacgtggactatcaagatgaaatcagtgtacaaatccacaatggtggtaagga

SEQ ID NO: 25616 - DNA, 790 bp, Homo sapiens
taaactagcttagtttaccaaagtaacaactttttttctgtggtatacttcaaaaattagtcaccctacaatgtagtgtgttcaaattaaacagatgtatagagttaaaataattagtgtagtctctataaacaatttctgttctgggatttatacgtagagctaacgtttacttcagaataaaacattgacaaacagggaaggaagagaatcagaactttcacagagctgtacttgaccatatcttatagacaaagcagaattacaatgcatgtaacaaaaacgttaaaagtttttttttaagttgatagttacaaatatggtatgcaacaattttctactttatttcagtacaattttcaacgtacagtctactatttctcaagatatttgaagacttaaaacaaaattcctatagactacttgcaaacagtaaaatttaagtaaaatgcttacattcttatttgaaaacgaaaatcaggtaaaaaaaaatggtgggtacaacttctgctctgctgtaatcttacttcatgtttattattccttttcttccttgcatctgtcattcttttcttcattattttccatggtctcttcttcwtctccaacaatcccatccccttggtatttgtcatgagtccatttaggactgctacctgattttttgaagttagagcaccctctgccacgttgaaaagtaccacgacctcttcctcttttggtctaataatccacaccatcatctctgtcatgatgcaagaaatacttcttgctctttgggatatattct

SEQ ID NO: 25617 - DNA, 621 bp, Homo sapiens
aaggccttcaactgcctggccctggtgcacttccccgatctttcctccctcttctcctctacatatactgtatactcagttcatacctgctttcctagcacagcctgtctgagtttgcctttgcagtgcttctcaaactttactgtatccataatcagctgaggatcttgttttaaatgcaggcctgattgagtagctcggggatgggtcccaagtttctacttttctaacaagctcccagggamcccactttgagtagcgtgatttcaaggctcagctcaaaatattcctgaattgtttttggataaacaagagctcccttcctctctctatcagtggttcccaaacctgtctgcgcactgaaatcccctggggagcttcaaaacctactggtgcctgtgtcccatcccagagatcgtggttgaatttttaaaatattttcaggagatttcaatatgcagacaagtttaggaatctaaatactcacagtgcctcccatgcctcattatgttttaattatggcaattgttagtttgttggcctattttgtctttgcttttgtctaatctgccctaccaggtcactgaccttctcatgctgttttacaaacctggtacttaa

SEQ ID NO: 25618 - DNA, 540 bp, Homo sapiens
agagtcatactttattcctttccatctataattagacttgtagtcaaggtaactctgagctcctatgtgacagagaaactatcatatgctaaaaatgtcaggagtcaaatcatccttagtatcagcatcacagtttgcttattttattttacaatcattcacctttcattcaaaaacaaaaaatctcattttaaaacaaattgctttctgtattcctaagggagtattttgacacatgtacccttaatttccacmgagatcaacatatgcaattcaactctgctaatctgagtgatttatgaacatgagaaagtaggaagggagattatgtccactgaatggccctttaaacattctccaatgccagtgtgattccttaaaatgatgactgctggcattacttacattccaaaattacagtagtgcatttatttcatcttcttgaataataaagtgcttatgtgataacttcctgttttatactggcatacttaatataaatagctttaggtctgacataatgtgtgagcctgaaaattg

SEQ ID NO: 25619 - DNA, 572 bp, Homo sapiens
cacccagccacggagctgcaggaggaagctcccgacactctggacagcacagctgctcgcctcatgacgtgacgggacactggcttggtagcagggactcaggatgaaaaagagaagatgcctcacctggatgaggacccagctcctccactttctggcgttttggggcatttgatggcgtgccgctggagctgtaggacagagagacacagtcagatttcgggcagttccctaacgtccaattccctgaatccccacaaattcactccacttccctgcctttcattcaaggccacagactcgtcatccacttcctgtgagacctgctcccaatctgtcctaactcccagctgttcttgttctcaccccatctacctgagcttccctgggtgaagaaaaggcagggaaggagggtcggtgcccacagggagcagttkaccctttcaggagctcatgcagatgagagttggaaaactctccttgggtgtgaggagctggagaaagatgttgagatcccggagaggtggcacctctgtctacacaggtaacaaaggaatggggtcttaggattc

SEQ ID NO: 25620 - DNA, 1052 bp, Homo sapiens
gccggcgaggcagcgcgggatcccagcctcaggcgtgcgcggacggtgtgcgggtgagtctccccaaaagtggagcccttgtgatgacgagcacaggtccgcctgcgtgcccgtgggctgctctctcaccggtggctctcagtcgcggagagcagaacccggcagcttcaggggctgcctgcgggagggtgttccctgctgtacgtgtgtgttcgtcatgggtgtgtgtgtgtgtgtgttggggrgggtgcgtctgtgtgtgtgtctgtgtgtgtgcgcgcgcagtgcctgtctgtgtgccgacttctgtctctctctcacgtctctctctctctctctctctctctctctctctctctctctctctctctctctctctctgtctcccttctcgctctttccgtggccctctctttctgtctctgtccgtctgtgtgtgcgtgcgcctcgggacacatgtgccctgtgcgccggagggtgggtttcttgcacgtcggcctttcttctggtcagcctctccccgcgtctctgcctgggtcgtgtggccggttggcagtcgtcgtcccggcggttccagtttgggggtctgtgaaggcctgggcaacgtgggcatcggcgtcggacccgcaggggttttcatcccctccccatccggagcagcctctttgctaggctggatccagacgagcgctccccaaccaaggacaacggcctcccaggcgctcatcgtccacccgcaggagggtgcccgcagagcttcaagaaggtggttgtcacgcctgtcgccctctgccctcatcgagaaatgtagccacagctcgacgcagggacggagaaggaagccggcaaggggatggggcaagcatgtctgtctctcaaaggctggccttcctggccgagtcacccgtttgacactcctccccggatgccggtggtggtggcatggcccccccgtatcctgcctgggctctggcctctgctctgacctccctcttgctgtgtctgccccgtctctgagaagcctggcggcttcttagtgtggctcagtgtct

SEQ ID NO: 25621 - DNA, 1052 bp, Homo sapiens
gccggcgaggcagcgcgggatcccagcctcaggcgtgcgcggacggtgtgcgggtgagtctccccaaaagtggagcccttgtgatgacgagcacaggtccgcctgcgtgcccgtgggctgctctctcaccggtggctctcagtcgcggagagcagaacccggcagcttcaggggctgcctgcgggagggtgttccctgctgtacgtgtgtgttcgtcatgggtgtgtgtgtgtgtgtgttggggggggtgcgtctgtgtgtgtgtctgtgtgtgtgcgcgcgcagtgcctgtctgtgtgccgacttctgtctctctctcacgtctctctctctctctctctctctctctctctctctctctctctctctctctctctctctstctcccttctcgctctttccgtggccctctctttctgtctctgtccgtctgtgtgtgcgtgcgcctcgggacacatgtgccctgtgcgccggagggtgggtttcttgcacgtcggcctttcttctggtcagcctctccccgcgtctctgcctgggtcgtgtggccggttggcagtcgtcgtcccggcggttccagtttgggggtctgtgaaggcctgggcaacgtgggcatcggcgtcggacccgcaggggttttcatcccctccccatccggagcagcctctttgctaggctggatccagacgagcgctccccaaccaaggacaacggcctcccaggcgctcatcgtccacccgcaggagggtgcccgcagagcttcaagaaggtggttgtcacgcctgtcgccctctgccctcatcgagaaatgtagccacagctcgacgcagggacggagaaggaagccggcaaggggatggggcaagcatgtctgtctctcaaaggctggccttcctggccgagtcacccgtttgacactcctccccggatgccggtggtggtggcatggcccccccgtatcctgcctgggctctggcctctgctctgacctccctcttgctgtgtctgccccgtctctgagaagcctggcggcttcttagtgtggctcagtgtct

SEQ ID NO: 25622 - DNA, 654 bp, Homo sapiens
ttagtaaagatggagaacatataatgttgaggtgtcgcttgtgttctccattagctctatgcagaacaggattaagaayatgcttatttaaacaggatggcatttatttatttatttatttatttttattgtttgagacagagtctcgctctgttgcccaggctagagtgcagtggcgcaatctcagctcactgcaagctccgcctcctgggttcatgcttttctcctgcttcaacctcccaagtagctgggactacaggcgcccaccaccacacccggctaattttttgtatttttaatagagacggggtttcactgtgttagccaggatggtcttgatctcctgacatcatgatccgcctgcctcagcctcccaaagtgctgggattacaggtgtgagccaccacgcccggcctgttcaggatagcatttattacccaggaagttctggagaaaattattcagagatacctgctttctaggatgctaaagaaaggactacttaaaatcattactaaaaattatagaacatgggagatatcttgaccttcgcatgaaactgattttttctttatggttaaattcagtctataattgactttttgaggggcaatatctcagcagtgatgttgtgttcttctttgtgcatcagca

SEQ ID NO: 25623 - DNA, 654 bp, Homo sapiens
ttagtaaagatggagaacatataatgttgaggtgtcgcttgtgttctccattagctctatgcagaacaggattaagaatatgcttatttaaacaggatggcatttatttatttatttatttatttttattgtttgagacagagtctcgctctgttgcccaggctagagtgcagtggcgcaatctcagctcactgcaagctccgcctcctgggttcatgcttttctcctgcttcaacctcccaagtagctgggactacaggcgcccaccaccacacccggctaattttttgtatttttaatagagacggggtttcactgtgttagccaggatggtcttgatctcctgacatcatgatccgcctgcctcagcctcccaaagtgctgggattacaggtgtgagccaccacgcccggcctgttcaggatagcatttattacccaggaagttctggagaaaattattcagagatacctgctttctaggatgctaaagaaaggactacttaaaatcattactaaaaattatagaacatgggagatatcttgaccttcgcatraaactgattttttctttatggttaaattcagtctataattgactttttgaggggcaatatctcagcagtgatgttgtgttcttctttgtgcatcagca

SEQ ID NO: 25624 - DNA, 781 bp, Homo sapiens
attcattcccatggtacctaacacagcaccactacacagcaggcctgtcccaaatttcctttgctgctggagaacatcctcatgggggagcccccaagctgcctaggaaatgggttaacaggagggcactcagggatctccttcagtttctccagccatcttygctgccacgcccaagcccaggccaccttcacctctcacctgggcgcttccactggccgcctgacacatcttgtcactggcttccactcttgctcccagaaccccttcttcacatagcagcaagagtcatctttgaaaatgaaaatcacatcatgttatttcctgcttaaaatctatcagtggcctcccactgctctgagaatgacttacaaggcccctagggcctagttcctacccctctgacctcctctcaccctcacttgacatactgcagctttgcaggccttctttatgttctcaagtaaggtcagcaaactatgacctgccagtcaaatccaacccgccacctgtttttgtaaataaagctttactggaacacagacactcatgcctttgtgtctgcgtgttatctgtggcactacagtggcagagttaaggagagagacactctcactatgaggccctttaagaaatagatgcacaccactgttctaaaatcatgcccagctttttcccgtcacagggccgttgtacttgcactacccactgctctagtctttctctctccttttaccactacctaaaattatatgcttgcttattgcttgattgtcctgcc

SEQ ID NO: 25625 - DNA, 1479 bp, Homo sapiens
agtcaaatcttttcaataatattctcactgtggtcctagatctgcctcttgggtaacaagtaaataggtaacaaatcaaatctctttttccttctctttggcaccctttaagacataaaggggctatagggacactttggcaaaatttaccaagattctgtataaacataaaaaagaaggctagaatatcgccataaaaatggaatgtcttggtttgcatagtttccagaaataaaactaattctaaatatagtgtattctaaatcagaataatagctttgaggttatttgaagactgaaacatggaggagccatgataccacgcaactttctatcattagactcgctcagtctcctggccttatgagtccttctctcataggatccctgttactctcccactggatagggaacagggaagaggtggcagaaagaaagggaggagaaggagtcgagagaagtaaagcccacaaatccaggagaaaggaagtgtctagagtggaattgggaatatggggaattagactctgatgcatayggaattgtgactctctaataaacattttttacagttggaaataacattgcagtataaagatttgtatagaattctttaatagaagaccagaaaataaaaggcagagtgtgtagaaggatttgctgaaaataaatcgggaggcaagagggtcttaaggttgtcattgcttgttagtgcttggctgccctgggaggcttggaagtgaacactaatggcttattgggacagaaaaggttttcctgcatcagcatactcttctttctaaccctaactcaatcccctggggggcggggagtcaaaatctcctttagtcattacaaaaagtatgtttattgagctatttcaggtcactcgacatttatcaaacccctcagaaatttcctggtgaagaaacagtcctgtgactttagataaaaaattaaagaaaaataaagttatggcaaatggtaacctctcaccatgtaatgacaaaagtggttcaaatccaattcaagtctgttaaaggtcctcagggtttagtaagatgtgtcagcctacaaggtgcaaaagtgagattattgttttcctcactagctaggaactgaggctattctagaagctgaaataatcatttggtaagaggtcattttttttttcattggttgcttatttatttgctatttttattttttagagcagggtctcactctgttacccaggctggggtgccgtggtgcaatcacagctcacttcagccaggaactcccaggctcaagcaatccttccacctcagcccctcgagtagctgggactacaggcatgcaaccccatgctggctaatttttttttttttaatttttgtagagataggatctcgctatgtcattcaggctggtcagaagtcatgttcttaaccacaaaatgtaagtcaattgaaattacagttctgtttgcaaggcatg

SEQ ID NO: 25626 - DNA, 561 bp, Homo sapiens
tcaactttctggaaaatgggaggggctctttattgtgtctcactcaagactgttttttgttttgttttgttttggagggaaaatrattggcttcttatctccagaaaagaaacacgcaagaaactaacaacccaaccacccttagctctgggacttcctactcccagcctttaagactcatctactgtgaagtgaaggtataaatggtgcttcagaacctcttgccctttaactttcaatgatcagaataggctctgaagtggaaataacagtgagattatgagttatcatctgggcccacaatagacttctaagaatgggataatttatcatttggggaaaaggtaaacttataataaaaaatgcctcatctcatgcagtactttccacgcagacataaatgtaatatttatgtctcagagaaatcagggccacaaaaataaagtgagtagagagtattgttgagactcaaaaatgcagtttttccaactttaattctccatctttcatggcagctttggtctttatgcttatgagtcatagtaagaaaattttgaaaca

SEQ ID NO: 25627 - DNA, 1401 bp, Homo sapiens
ctgatttgcattatggatatattttctacagagaaaatgctacgattttatggttgagaagaagccgacaggcaagaagagcctataaaatatcgagaaaacagtcattacaattcatgggattagattaattcaacttgtgattttgttgctcaatagttttgttaaactttcctctcagttttgaaataagcatattttaaattttattcttcataagtaaatggaaatgtaacatgtgtaatgggaaatgtttatcagtttctgaaactaaaggaggttttcatccattatccgggataattcactatgtatgttttgggacagcatactaacaaattagatgtactctctgcatttgcagataatgcaaagatacatcagcaagcatgaatatttctcactagacttgcatttttaacatcatttcttgatcacaaagtaagaaagcaaatatttacctgggaaagagaagattctaaaaaaacataaaacatattttctgatcagacatgctattatgtaaaagagatattagagtttctctatgttgcctaatagaatagatttaggatcaataaggagctgttagaaatgggttgctttcaattatatacataagctactttatattttaagtgtgacatctatcttttgtcacactgtatcctaagcatctagcagtgtgtcgaaaaataacagttatcttattggtattaatggaatgaatggaattaggattttagaaggaaaagggaaagacttcccattaccctaaaggactatctagagggtacactaccattcacagataggaggtcaggctagaagtttaatagaagaatgtcttggagcgccaagctgaccataatgatctataccttgcagttcagataatctagttcaataattgtcaaactttttttgtaaaggcaagacagtaaatatcttaggcattgaaaagtcagacagtctttcccacacctgtttatctctactgttataacacaaaaacagccatagacaatagataaatgaattgatatggctaaatgtggcttacgaaaaggccttagtttgcctacccatcatcttagtcacatattactctatatctacttatttcttttatcattaactttgaatgaaactttatttaaacattccaattagataccaaatgtacygtaagacattgaggggaaaattgacttctgattcaggctagggaaactccttctgagaaattaccataatactaggtattaaaagtaaaagatcacaaatggagactgaagtcagagaactaaattgtggcataaagttcaactagcatatttccctaatggatgctctgaagatcctcttagacatttgtagcgcttgccttatgtgattgtg

SEQ ID NO: 25628 - DNA, 564 bp, Homo sapiens
gtatccaacttaaaaatataaaaattacgcccgtgggctgcagttggagctatggtggtggcagctgccgctgggcctagcccggggtgtggacctgggaactccccagaagggcccgagggggagcctcacggagcgacggcggaaggcgcacaggctgctaaagctttactacggcctctctgaaggggaggcggtgggactccccatggggcctaaccccctggaccccactgatctgaacrgggcgcatttcgacccggaagtttacctagacaagctgcatagagagtgccctctggcccagctgatggacagtgagacagacatggtgcggcagatccaggctctagacagcgacatgcagaccctggtctatgagaactacgacaagttcatcccagccacagaaattgacaaacagcataaaactgtatgaggaattgtaggagacccagaatttcccaaataaccttgtaaaagaagaacaaagttggaagactcacaaaaaatatctatatatatataaagttttgttttcgttcagttgtaaatatttagtaa

SEQ ID NO: 25629 - DNA, 564 bp, Homo sapiens
gtatccaacttaaaaatataaaaattacgcccgtgggctgcagttggagctatggtggtggcagctgccgctgggcctagcccggggtgtggacctgggaactccccagaagggcccgagggggagcctcacggagcgacggcggaaggcgcacaggctgctaaagctttactacggcctctctgaaggggaggcggtgggactccccatggggcctaaccccctggaccccactgatctgaacggggcgcatttcgacccrgaagtttacctagacaagctgcatagagagtgccctctggcccagctgatggacagtgagacagacatggtgcggcagatccaggctctagacagcgacatgcagaccctggtctatgagaactacgacaagttcatcccagccacagaaattgacaaacagcataaaactgtatgaggaattgtaggagacccagaatttcccaaataaccttgtaaaagaagaacaaagttggaagactcacaaaaaatatctatatatatataaagttttgttttcgttcagttgtaaatatttagtaa

SEQ ID NO: 25630 - DNA, 551 bp, Homo sapiens
aagtcattattctgtccttgcctttttcaggtccccaccttctccccaggtctcatgcactcgatctctctcactcctttctgctttacagacccacagccaggtcctgccaatcactcccctccttgttggaagtcagctacaggtgaaccagcagggagaggccactgcctgctcacaatcagctcattatctaattgaggaaaaaggcacaagctcactcaaaagcaaaatccaaaggaccaacaggagttgggggcttcaggctttttcttcccattcaggatagggtcaatgtcacttcaaaaggtataattacaaaaggctagagaccacgccttcagctttaagagaatagcagtaccttccatcctccagaaagcttttggacttgtgractatccctatttaagacggctcattgcatcaaggaaacacagtttcattcaataaacatcagtcatttccttcaaattcccaccggaaagctactgacattgtaaacctttaggatttgaaagacgctaaagtttaaagtcgaatcataaata

SEQ ID NO: 25631 - DNA, 1140 bp, Homo sapiens
tttcaactgggatataacccttaaggtgaggttcaattacaacactgggcatcatgttccaattgtctttttattccagtgcctaccacgtagttgcagtaggtgttcaactcgtgttttataattcagattcttctgctttcttcctcctttcttattgaaatgaaggtggaccataaacctgccctaaataatgaaatataatcaaatgtggaaaaggattcagattccgtcaaaggaaaaaagggcctcatagttcattgtaatttaccacaatacccttctctgaactccataattatttatggcttcactagcttcactggtgctttggttatgctagggttgtaattatttagccttttgtgtacgtgccttggctctcttatcagatggtcaaccactggagggaggtctccaacagagtgtccaactcagttcccagcacattctgtgtggtgaatggttgtgctgatgatgagctgaggggataccagagaaggaaggtgagttgaagcttggtgggaaatggaactcctgtgtgaggaccattgaacccctctaggccacacctgtgttctcaatgggcatctgccttccagtaggagctcattccctcatgggttggggrtgcgtatcatggatctttgaactaaattacctgctcactaactcatcccataccatgagtagtggtaggagtggtgctgcttagatccccaggtcactgtggggctggccccagttctcagttcccaccgacttcaaagtgaattccctctaatcaggtatggagagaaacacccacttgtgcgatttcagcagggccttcaggtggccgatttggcttctgattacattatttaaacactatttcacaaaggaggtgatttgatgtcacactaatgcaagctcgaattcactgcccatgatttgagtttgccagtgtaaagtaattctgcagtaatggtctttaccacatcagcctttttatgtttaaatttgatgttaaatttttaaaatctcaggagaagaaaaaagaagagagcctaacacattttaagaaaccacaaaaacaccttgtgaaaagtcaacttgtaaaatcccagctgttaaagtggtaaatttagctctttatac

SEQ ID NO: 25632 - DNA, 1409 bp, Homo sapiens
tttacttggattagtgaggggagtgagaatgtcaaagagatactgaaaaattttaagaattttaaattgccaatgaaaaaaatgttttgtcatatgacttttagaaatcatcttttggtgggcacaaagtgaaaaaaaactcagcaattttttcacacattcttctttttcattaactgattgagcatctttacttgtcaaacatgggttaacttgttggatggacataacagtcctgctcctgagctcctggaacttgtgttcttttttccctagatgctcagaagaaaaataaaaccctgtagaaccagttagcaaaggcacagaaaatccaatgacccatggtctttcataatgggaaaaattagcattagtttaacacctggtacatgtcttcagattcattatataatttcatcttcagcataaatacagtgtaagtacttattcctatggggagaacaaacaaatcaaggcccagtatcattatataacattcccaatctcagccagctacataaatggcagagcaataataagacaccgattttgtctggaaccaaaccctgtggtttttttccactacatcaggctacctctttatgacatggccacacagaggcaaacaaaacatttgggagagatatctacattttgtaatttggagatcaaagcaatatggtatcattttaattgggagcattattgagtaaatcccatacaatatgggtaactttggatttatccttaagctataattccttaataaagattcataattaaatgagtcggtgtataaatttacccaaataaaatcatataacatagataaaagcattttgggttatttagaggcaaagcattatataatttttataagaatttcagtttactgtagaattccataatgtaattatgtaacttcatgattttcaaaaatttacagaaattaattttattcattgcattactacgttatctacagttttctgctgttctccaatcataaaaagaaaaagaaataacaaaaatctccccggggtaaataatactgtagcccctgtcatgaaataaaatatgccagtcccttcctatgtataaacmaagaagaagtatcatgatgacaaagtggttcaaaaggctacattctgacttctggtatataatgatgtgctcaattattaaatgatgccaaaaaagatgcctatacaaataattgttatttctatctatacatattctatcatttataattttaagtaggatgtgtttaatttcatatgtttattcagaaagcatttataaggaagctactctgtcctggatgctatgagagataagaaattaatacaacaaaatcactactatttggagataatagctaagtaaaatagatgatagtatataca

SEQ ID NO: 25633 - DNA, 1862 bp, Homo sapiens
ggtaagtgcagaggaggaggaaagagaacaaaggtgatagagcaaagcctcagactataactttacctgtggatcaacgcatttagaaatggagtcatgggccgggcgcggtggctcacacctgtaataccagcactttgggaggccgaggtaggcggatcacaaggtcaggagctcgagaccatcctagctaacactgtgaaactctgcctctactaaaaatacaaaaattagccaggtgtggtgacgtgtaatcccagctattcgggaggctgaggcaggagaatcgcttgaacctgggaagcagaggttgcagtgagccgagttcgcaccwctgcaccctagtctgggcgacagagcaagaactctgtctcaaaaaaaaaaaaaaagaaagaaagaaatggagtcatggtctacagaggaaataaatacaattctgggggaggaaatacaaatgccttgttaggacctataacttagtaaattgcaaaatacgccgctcccccgtctcattcctgagctctttgcctgcttctgtgtttaaactgcattctgtataaaaatgagtcacttgaaaaagaaatgcatatatatatattctattatatacacacactcatctgttgtcttttttctggggtggggaagcatcccttctctgaaccagagcatattgttccacaaagcagaatggacacaaaaatgaatgactgttagtgtctccatgccatcctaagataataagcacctttgaaggggtattcattgtttcaggccccagagggaccatttactgcctggagataataatgttcccatgtatccccaggatacctgggagaatctgactcactatgcaaaaatattgatgagagctttagataaaaaggagtaataaacaacaaatctacagaggaaagcaccctctgcaatgttgtaagcaagactccgggtacaggaagatattttctctctgtattttggtaatttaacagtcagtgtggttacaatcttgaaatcagcctgaacttctatggatgaaaatgctacagagtctcagaatgcctccatggagacaggaacaaggaaagctagagaaggctctgggttgtgaggagtgggtgggggaagccatcccccaaagacctaaccactgagaaatattataatttgaataattttttaaaattaagcctattgtcagataacttggggtgataaatctttccattccccaacttactttcctaagaaacctcgtggcatggcagcaaacacatccaacaactattgccagataatgacgaatctctgatatattttgtcacattgcagtctatgttgctagtttcatatttacaagcaaaattgttacctcaaaatatgaaacactggcatttagagaaatatagaaattactcacttccctggaattctgcatgacaaattagaactatgctttaactctaataagtgtagctgtaacagttttcataaacattcttgagatgttcttctggagtagctttattttggcaccctacttttcctgcttaaacaaatgaaaaggttggctgatattgtcaaaatacagcacttctggtgaaccaagagccatttattaaaataatgtattgatgcagtgtcataaaacacaaaatcatatttctgcaggaaaaacctattaccctaagccaagattattttattttaaaagaaaaattattacagttgtcgattctgaaagttagatgatgtggttccgaccttggcccttcagagactaaccaggcagcttttaatgcaccgtaatatgttatgtaaaagatatatttgtataattaacaagccttgtcttagta

SEQ ID NO: 25634 - DNA, 1862 bp, Homo sapiens
ggtaagtgcagaggaggaggaaagagaacaaaggtgatagagcaaagcctcagactataactttacctgtggatcaacgcatttagaaatggagtcatgggccgggcgcggtggctcacacctgtaataccagcactttgggaggccgaggtaggcggatcacaaggtcaggagctcgagaccatcctagctaacactgtgaaactctgcctctactaaaaatacaaaaattagccaggtgtggtgacgtgtaatcccagctattcgggaggctgaggcaggagaatcgcttgaacctgggaagcagaggttgcagtgagccgagttcgcacctctrcaccctagtctgggcgacagagcaagaactctgtctcaaaaaaaaaaaaaaagaaagaaagaaatggagtcatggtctacagaggaaataaatacaattctgggggaggaaatacaaatgccttgttaggacctataacttagtaaattgcaaaatacgccgctcccccgtctcattcctgagctctttgcctgcttctgtgtttaaactgcattctgtataaaaatgagtcacttgaaaaagaaatgcatatatatatattctattatatacacacactcatctgttgtcttttttctggggtggggaagcatcccttctctgaaccagagcatattgttccacaaagcagaatggacacaaaaatgaatgactgttagtgtctccatgccatcctaagataataagcacctttgaaggggtattcattgtttcaggccccagagggaccatttactgcctggagataataatgttcccatgtatccccaggatacctgggagaatctgactcactatgcaaaaatattgatgagagctttagataaaaaggagtaataaacaacaaatctacagaggaaagcaccctctgcaatgttgtaagcaagactccgggtacaggaagatattttctctctgtattttggtaatttaacagtcagtgtggttacaatcttgaaatcagcctgaacttctatggatgaaaatgctacagagtctcagaatgcctccatggagacaggaacaaggaaagctagagaaggctctgggttgtgaggagtgggtgggggaagccatcccccaaagacctaaccactgagaaatattataatttgaataattttttaaaattaagcctattgtcagataacttggggtgataaatctttccattccccaacttactttcctaagaaacctcgtggcatggcagcaaacacatccaacaactattgccagataatgacgaatctctgatatattttgtcacattgcagtctatgttgctagtttcatatttacaagcaaaattgttacctcaaaatatgaaacactggcatttagagaaatatagaaattactcacttccctggaattctgcatgacaaattagaactatgctttaactctaataagtgtagctgtaacagttttcataaacattcttgagatgttcttctggagtagctttattttggcaccctacttttcctgcttaaacaaatgaaaaggttggctgatattgtcaaaatacagcacttctggtgaaccaagagccatttattaaaataatgtattgatgcagtgtcataaaacacaaaatcatatttctgcaggaaaaacctattaccctaagccaagattattttattttaaaagaaaaattattacagttgtcgattctgaaagttagatgatgtggttccgaccttggcccttcagagactaaccaggcagcttttaatgcaccgtaatatgttatgtaaaagatatatttgtataattaacaagccttgtcttagta

SEQ ID NO: 25635 - DNA, 1862 bp, Homo sapiens
ggtaagtgcagaggaggaggaaagagaacaaaggtgatagagcaaagcctcagactataactttacctgtggatcaacgcatttagaaatggagtcatgggccgggcgcggtggctcacacctgtaataccagcactttgggaggccgaggtaggcggatcacaaggtcaggagctcgagaccatcctagctaacactgtgaaactctgcctctactaaaaatacaaaaattagccaggtgtggtgacgtgtaatcccagctattcgggaggctgaggcaggagaatcgcttgaacctgggaagcagaggttgcagtgagccgagttcgcacctctgcaccctagtctgggcgacagagcaagaactctgtctcaaaaaaaaaaaaaaaraaagaaagaaatggagtcatggtctacagaggaaataaatacaattctgggggaggaaatacaaatgccttgttaggacctataacttagtaaattgcaaaatacgccgctcccccgtctcattcctgagctctttgcctgcttctgtgtttaaactgcattctgtataaaaatgagtcacttgaaaaagaaatgcatatatatatattctattatatacacacactcatctgttgtcttttttctggggtggggaagcatcccttctctgaaccagagcatattgttccacaaagcagaatggacacaaaaatgaatgactgttagtgtctccatgccatcctaagataataagcacctttgaaggggtattcattgtttcaggccccagagggaccatttactgcctggagataataatgttcccatgtatccccaggatacctgggagaatctgactcactatgcaaaaatattgatgagagctttagataaaaaggagtaataaacaacaaatctacagaggaaagcaccctctgcaatgttgtaagcaagactccgggtacaggaagatattttctctctgtattttggtaatttaacagtcagtgtggttacaatcttgaaatcagcctgaacttctatggatgaaaatgctacagagtctcagaatgcctccatggagacaggaacaaggaaagctagagaaggctctgggttgtgaggagtgggtgggggaagccatcccccaaagacctaaccactgagaaatattataatttgaataattttttaaaattaagcctattgtcagataacttggggtgataaatctttccattccccaacttactttcctaagaaacctcgtggcatggcagcaaacacatccaacaactattgccagataatgacgaatctctgatatattttgtcacattgcagtctatgttgctagtttcatatttacaagcaaaattgttacctcaaaatatgaaacactggcatttagagaaatatagaaattactcacttccctggaattctgcatgacaaattagaactatgctttaactctaataagtgtagctgtaacagttttcataaacattcttgagatgttcttctggagtagctttattttggcaccctacttttcctgcttaaacaaatgaaaaggttggctgatattgtcaaaatacagcacttctggtgaaccaagagccatttattaaaataatgtattgatgcagtgtcataaaacacaaaatcatatttctgcaggaaaaacctattaccctaagccaagattattttattttaaaagaaaaattattacagttgtcgattctgaaagttagatgatgtggttccgaccttggcccttcagagactaaccaggcagcttttaatgcaccgtaatatgttatgtaaaagatatatttgtataattaacaagccttgtcttagta

SEQ ID NO: 25636 - DNA, 1862 bp, Homo sapiens
ggtaagtgcagaggaggaggaaagagaacaaaggtgatagagcaaagcctcagactataactttacctgtggatcaacgcatttagaaatggagtcatgggccgggcgcggtggctcacacctgtaataccagcactttgggaggccgaggtaggcggatcacaaggtcaggagctcgagaccatcctagctaacactgtgaaactctgcctctactaaaaatacaaaaattagccaggtgtggtgacgtgtaatcccagctattcgggaggctgaggcaggagaatcgcttgaacctgggaagcagaggttgcagtgagccgagttcgcacctctgcaccctagtctgggcgacagagcaagaactctgtctcaaaaaaaaaaaaaaagaaaraaagaaatggagtcatggtctacagaggaaataaatacaattctgggggaggaaatacaaatgccttgttaggacctataacttagtaaattgcaaaatacgccgctcccccgtctcattcctgagctctttgcctgcttctgtgtttaaactgcattctgtataaaaatgagtcacttgaaaaagaaatgcatatatatatattctattatatacacacactcatctgttgtcttttttctggggtggggaagcatcccttctctgaaccagagcatattgttccacaaagcagaatggacacaaaaatgaatgactgttagtgtctccatgccatcctaagataataagcacctttgaaggggtattcattgtttcaggccccagagggaccatttactgcctggagataataatgttcccatgtatccccaggatacctgggagaatctgactcactatgcaaaaatattgatgagagctttagataaaaaggagtaataaacaacaaatctacagaggaaagcaccctctgcaatgttgtaagcaagactccgggtacaggaagatattttctctctgtattttggtaatttaacagtcagtgtggttacaatcttgaaatcagcctgaacttctatggatgaaaatgctacagagtctcagaatgcctccatggagacaggaacaaggaaagctagagaaggctctgggttgtgaggagtgggtgggggaagccatcccccaaagacctaaccactgagaaatattataatttgaataattttttaaaattaagcctattgtcagataacttggggtgataaatctttccattccccaacttactttcctaagaaacctcgtggcatggcagcaaacacatccaacaactattgccagataatgacgaatctctgatatattttgtcacattgcagtctatgttgctagtttcatatttacaagcaaaattgttacctcaaaatatgaaacactggcatttagagaaatatagaaattactcacttccctggaattctgcatgacaaattagaactatgctttaactctaataagtgtagctgtaacagttttcataaacattcttgagatgttcttctggagtagctttattttggcaccctacttttcctgcttaaacaaatgaaaaggttggctgatattgtcaaaatacagcacttctggtgaaccaagagccatttattaaaataatgtattgatgcagtgtcataaaacacaaaatcatatttctgcaggaaaaacctattaccctaagccaagattattttattttaaaagaaaaattattacagttgtcgattctgaaagttagatgatgtggttccgaccttggcccttcagagactaaccaggcagcttttaatgcaccgtaatatgttatgtaaaagatatatttgtataattaacaagccttgtcttagta

SEQ ID NO: 25637 - DNA, 517 bp, Homo sapiens
ccatgttggccaagctggtctcgaactcctgacctcaggtgatctgctcacctcggcctcccaaagtacagggattacaggcgtgagccaccgcgcccagcctcaaatttcttacttttcctgaacatgttttgttctgtaaartaagggacttaaaagggttattatggataacgtaaggtaatgcatgtaaagtacttaatatatttcctgtattattaaagcactcagtaaattttagctatttctattatcttgctggacataaacaccattgattcttctccttaccacctcaaaatctctccctattcacctagcttctcttccttcacttctggttctgaggaatcagtaaccattccaacttgcaccaaggttaaccttctcctgacgctcttaatcccatccctcctaccagctctgcgcccttattccatttattattcccattcttttgcatcactctctcattactagtttcctcatcagtgcttgaaaacataaacttatcttc

SEQ ID NO: 25638 - DNA, 600 bp, Homo sapiens
ggatgtcacactctgtcaatgcctcatttctctcgcttgtgtaaggggctcacgatgcggtgccacccgcttcccagggctgtcaccatgtggaagggcagggcttgtggcaaagcaccgtgtaaaytgggggatttcgaggatcactgtggctgccccaggcaagaggcagggcctgggacccacctctgggcaacgtccagagagcgccaagtagtgcctctcctggccctcccgaggtgctggagctgccagcaggaaggctcccggcccctgggaggagagggaagctcacatggtgggtggggccctgtcctcctgggccctggcagtggggagctgagggggccagaggaaatgcaaacagctcctcccagtcaccctggcccctggagcctgagacgaaggaccctgttaccaaaaatagctcaccccaaaccatggccagcttcctccgaacttcccacgatctccttgggaatgaatgagggagggaagcagcctgcgaggagctggcctggggccccctccccagcccgtggaggctgactccagcgtgggagaccatcggaaacggctccaggtcccgtccttcgaggg

SEQ ID NO: 25639 - DNA, 1141 bp, Homo sapiens
tatctctcaccatatacaaaaattaactcaaggagaattaaagacttaaatataagatctgaaaccataaaaattctagaagaaaacctaggaaaaattattctaaacattggcctaggcaaagaatttatgactaagaccccaaaagcaaatgccacaaaaacaaaaatacataaatgggacctaaataaactaaaaagcttctttacagcaaaagaaagagtcatcagagtaaagagataacctacagagtgagaaaaaaatatttgcaaattattcatccaacaaaggactaatatccagaatatacaaggaactcaaacaaatcagcaagaaaaagataaacaaccccattaaaaagtggacaaataacataaatagacatttcttaaaagaagatatacaaatggccaacaaacatgaaaaaatgcttgacatcactaatcatcagggaaatgcaaattaaagccacagtgagataccaactttccctagccagaatagccattattaaaaagtcaataaacaatagatattctcacgaaagcggtaaaaagggaaggcttagacactgtgggcggtaatgttagtacagtctctatggaaaacagtatggagatgtcatgaagaactcaaagaaggtttatttccctcatattgatatattgtttccctcatattgacaacaacattaatayatactagcactatagatccctaagaagcagaaactgtgtggactctcttgcccactataatcctaatgttaattgccctcccaaccctacgtatcctgtacataacagatgaaattaacaacccctctctcactgtcaaaacaactggccaccaatgatactgaagctatgaatatacagattatgaagacctaggcttcgattcttatgtagcccctacgacagacctgaaaccagaagaactacgtctcctcgaagttgacaactgagcagctctcccaacagaaatccctattcacctattagtgtcattagaagatgttctacactcatggactgtcccatcactgggcctcaacacagatggaatccctgggtgcttatatcaaactaccctcactgccacacagccaggcctttactatggccaatgctcagaaatt

SEQ ID NO: 25640 - DNA, 560 bp, Homo sapiens
aagattggcaaagacagaaaacgttgatactattttgtattggcaagtatatggaaaaatggaccctcatggatatttctgaagggcaaatgagataatacataatgaagtttcaaatatgcgtgcatacctgggaccagaatttcagtcccaggaaattacactataaaaaaaggacaagatttaaaaatttgtatataagaatatttaatccaggattttcataatacaaaaaatttagaactttataataaatactttattataatgcagaaaatttgggaataactgtattataaataatgttgtatttataactgctaagcataaactgatacaacaagcttagaaaacaatttgacattatcttaaaagtttaacctgaccatgtcctgtagccaaaaaattccaatctttaggtatatattttagagaaacttgtacatgacctacargagacatacaagaatgttcttagcaacattgtaataccaaaactgtttgagatgtaccactttcagcattgtttaaagcattttaaaatttctattttttttttt

SEQ ID NO: 25641 - DNA, 1254 bp, Homo sapiens
tgcatactgtgtaagagcacacaatagttttgcagtacaattttaaactgtatacaaattggaatatagatgttaaacgctggtgtactgacagtatttttgaattttagataaactgcatacaaaatttacaatgcaaatattagccaatctgaaaacgtcccataatataaaaatgatactttgagatgcaaattttactaaactatataaacatttaaaataatcattaaaaactcaacattagaatttataaagatcagctataaaaatatattggcagtcacttttcttataaaggtaccactcactacattacaaaatagtctctaacataaaattgccttaataactatactattatagaatctgataaaccttacattattaaattgattataaaatcttcttggaaaaactttggtatgtatcttcagaaggttttttaaaaataatattttaagggcctgtaaacattccattctattaaagcacagcagaataagtaatggatattcaactgcatacagaatatagamtcaaaaaaacaatttattatgtatttgtagaaaatcattaccagagtaagcaaaaaaaccaactatttaaaagtatcaaacttttaaacagttctttttccattctgataaaaaatgttataaaatcaccatactccattcatgtaccttagatgccttttaggataagacctcaaaaataattaacctagtctcaaaaatccattcaagtccaataacaaacttttaaaaacccacttaaaaagacttgacactagaacaagtatacataatcagaacatatactttatatatttagtaatgtactaggttttctcttacctttgtaatttagaatttattggcagaaattacacacacacacacacatatatataactaaaaaaaggtaaatttcagcaaacaaatgcaaacctgtagggtaaatggatttttaaaaaaaattcagtttatcaaatttcatcttctctgccattttagattggcaactattggttatttagaaaatttagactgctgaaagttcatttcttgctccttgaatatgtttaatttctacaaagcttccagttgtgcccgtagcttccttgaggtcattttccactttctcctctgtcactagatatcgtgcgtaagatatttatccttgatttggaaaagcctaaataaaaagcttcagttttgaccttttaatttataaaactccactaggaaa

SEQ ID NO: 25642 - DNA, 340 bp, Homo sapiens
tcccaccgaaacaaatattcattayggagattatatcaagaataacacaccttgaggcgcagctgtatttctcattgctcattattgcctgcctcatgttctccactcctttagaggggggaagcccttctaggtggcttccaaaatagctcttggtaacttggagagaaaactggaaaggagactcaaaggggaattttatacactcagagagcaaaggacctcagaagtgaatccatatttggtttgcttttaggatgaaagtttaagtcgcagctctttgtatctgggtcctgttaccctgcaagggggcgagaaatgccatctcatgtacactgga

SEQ ID NO: 25643 - DNA, 511 bp, Homo sapiens
ccctgcaagtcaggtagagtgcagatgaggtccttttttcttcactactattctagggtaagagaaacttggaagatcatctgcctgtggcctctagaagaaggttaagtgagcgttgagccaggaatggaggcatttcttgtaatgaacttctctatagaacaagatagcaaatctgttacccagaattctagagggctgcttccagaagaaaggtattcaggccaggctctctgccttgcaggagtgataccctgaagagaggggacaggtgtcatgagcacagtaaatgtggtggcagcgaaaaagcagaatggcactgagggcatcctgggtggggataggttagaatgagagatrgggaaagatgaatttttttttttaaaacagatgctttaaggttggggcaatggatgggtgaggaagaattttaggctgtgctgctgtgcaatgcactggcaaatgcctacagagtcattcttcgtggatatgttattgggcagatgcaagt

SEQ ID NO: 25644 - DNA, 511 bp, Homo sapiens
ccctgcaagtcaggtagagtgcagatgaggtccttttttcttcactactattctagggtaagagaaacttggaagatcatctgcctgtggcctctagaagaaggttaagtgagcgttgagccaggaatggaggcatttcttgtaatgaacttctctatagaacaagatagcaaatctgttacccagaattctagagggctgcttccagaagaaaggtattcaggccaggctctctgccttgcaggagtgataccctgaagagaggggacaggtgtcatgagcacagtaaatgtggtggcagcgaaaaagcagaatggcactgagggcatcctgggtggggataggttagaatgagagatagggaaagatgaatttttttttttaaarcagatgctttaaggttggggcaatggatgggtgaggaagaattttaggctgtgctgctgtgcaatgcactggcaaatgcctacagagtcattcttcgtggatatgttattgggcagatgcaagt

SEQ ID NO: 25645 - DNA, 883 bp, Homo sapiens
tttctggtatctttacagcagcaccccactctttcagtacaaatttactgtattagtccattctcatgctgctaataaggacatacccaagactgggtaatttataaaggaaagaagtttaatacatctcccaattacctcacatggctgaggaggcctcatgatcacagcagaagatgaaggaagagcaaaggcatgtcttacatggcaacaggcaagagggcctgtgcaggggarctgccctcttataaaagcatcagatcttttgagacttattcactatcatgagaacagcacaggaaaaaccagtccccatgattcaattacctcccaccaggtccctcccatgacacatgggaattattacaattgaaggtgaggtttgggtggggacacagagctaaaccatatcatttacttcctgattttggccatttctatgatcactagtaaaggatatggtagaaaagcacaaaacagagaagtagttgtatctttatagtttacagttatgaccaaaaataaagtaagaacttggaaacagagatgacttatataaaacaagcttttaaagttttctgtaaacattaattatccagggtatagttcagttgtcaaagctaactaaaaatttggatattatccaacactttatttacagcagtctttaacattcttcatctgactggctttatagtgtcatagaaactaccaagtaagttagcttaacttagtcatcaccacttttaagagtgaaaatgttaaaaacataaagaaaaactttttagtgaataagcagttatggaaaaaagttggtatcttaataagttaattgaatgattagctatggtgctccttttgagagagaagagctttcttgaaa

SEQ ID NO: 25646 - DNA, 1542 bp, Homo sapiens
agacgttggagtgacagacctgtggccacgtggttagyggctggcaccgggactcattcttaccctttgctttttccctctcattcgaagctttctgttgtgaaataaaatatacacaggaagaaagcataaatgtgcagcctagctttttactggtactggttcattttagaatgtaggtccatcttaggtttcaggttgactgtaggcttgctgtctgtccagaggcacctcctccatggaatccgtcacccccgcgcactgtgcacacacatccctctctgttgttcccctagatggaacttactagattgtgtttatatttaacagcttctgtctagattgtagatcttaaagagctctgataaacttacttttatttaatcaccaaaagaaacacagatactctctttcatttgagtccagaaagctgaggcctctgtagctgtgagcctcagcaggggtgggccctatgttaagaaaacatatttttttttgagacagagttttgctcttttcgcccaggctggagtacagtggtgcaatcttggctcactgcaatctctgcctcccaagttcaaggcgattcttgtgcctcagcctcctgagtagctgagattacaggcgcccaccaccacgcctggctaatttttgtatttttagtagagatagggtttcaccatgttggtcaagcttgtcttgaactcctgacctcaggtgatccacccgcctcggcctcccacagtgttgggattacagacgtgagccaccgtgcccagccagagaaaatcttatatttgacttgaaaatctgaacttaaaaggcaaccaaccagagaacctgaggggtaacggaaggacagcaaaacacagaggcctggcccccgtaggggaatcgggtgtaactcggaagaaatgctgacggagctcttaccatgtggcacgcgcaggagcatgctggcctgttttactcagccccggccctggccacagagaggacgggaccttccccaagtgaagtgggttcttcagttgtggaaaaggccttgccacccactgccaagcattcccttagctccccacagggcacggagagccaggacctgctccaggagggagaaaaatgtgagtgactcctgccctcacggtggttaggatccgattggagatgaaatttgacatgtgtgacctgactgagcaacagctttctttttaaaaatggccccgtttcccagattctgaagtacagtattttatacttgttatggaaaatcagagacatagaaaagtagaaagaaggccgagtgctgtggttcacacctgtaaggaggccgaggcaggtggatcactggaggtcaggagttcaagaccaacctggccaacatggtgaaaccccgtctctactaaaaatacaaaaattagccaggcacggtggcaggcacctgtagtccctgctactcaggaggctgaggcaggagaattgcttgaacccgggaggcggaggttgcagtgagctgagattgcgccactgcactccagcctg

SEQ ID NO: 25647 - DNA, 1542 bp, Homo sapiens
agacgttggagtgacagacctgtggccacgtggttagcggctggcaccgggactcattcttaccctttgctttttccctctcattcgaagctttctgttgtgaaataaaatatacacaggaagaaagcataaatgtgcagcctagctttttactggtactggttcattttagaatgtaggtccatcttaggtttcaggttgactgtaggcttgctgtctgtccagaggcacctcctccatggaatccgtcacccccgcgcactgtgcacacacatccctctctgttgttcccctagatggaacttactagattgtgtttatatttaacagcttctgtctagattgtagatcttaaagagctctgataaacttacttttatttaatcaccaaaagaaacacagatactctctttcatttgagtccagaaagctgaggcctctgtagctgtgagcctcagcaggggtgggccctatgttaagaaaacatatttttttttgagacagagttttgctcttttcgcccaggctggagtacagtggtgcaatcttggctcactgcaatctctgcctcccaagttcaaggcgattcttgtgcctcagcctcctgagtagctgagattacaggcgcccaccaccacgcctggctaatttttgtatttttagtagagatagggtttcaccatgttggtcaagcttrtcttgaactcctgacctcaggtgatccacccgcctcggcctcccacagtgttgggattacagacgtgagccaccgtgcccagccagagaaaatcttatatttgacttgaaaatctgaacttaaaaggcaaccaaccagagaacctgaggggtaacggaaggacagcaaaacacagaggcctggcccccgtaggggaatcgggtgtaactcggaagaaatgctgacggagctcttaccatgtggcacgcgcaggagcatgctggcctgttttactcagccccggccctggccacagagaggacgggaccttccccaagtgaagtgggttcttcagttgtggaaaaggccttgccacccactgccaagcattcccttagctccccacagggcacggagagccaggacctgctccaggagggagaaaaatgtgagtgactcctgccctcacggtggttaggatccgattggagatgaaatttgacatgtgtgacctgactgagcaacagctttctttttaaaaatggccccgtttcccagattctgaagtacagtattttatacttgttatggaaaatcagagacatagaaaagtagaaagaaggccgagtgctgtggttcacacctgtaaggaggccgaggcaggtggatcactggaggtcaggagttcaagaccaacctggccaacatggtgaaaccccgtctctactaaaaatacaaaaattagccaggcacggtggcaggcacctgtagtccctgctactcaggaggctgaggcaggagaattgcttgaacccgggaggcggaggttgcagtgagctgagattgcgccactgcactccagcctg

SEQ ID NO: 25648 - DNA, 1542 bp, Homo sapiens
agacgttggagtgacagacctgtggccacgtggttagcggctggcaccgggactcattcttaccctttgctttttccctctcattcgaagctttctgttgtgaaataaaatatacacaggaagaaagcataaatgtgcagcctagctttttactggtactggttcattttagaatgtaggtccatcttaggtttcaggttgactgtaggcttgctgtctgtccagaggcacctcctccatggaatccgtcacccccgcgcactgtgcacacacatccctctctgttgttcccctagatggaacttactagattgtgtttatatttaacagcttctgtctagattgtagatcttaaagagctctgataaacttacttttatttaatcaccaaaagaaacacagatactctctttcatttgagtccagaaagctgaggcctctgtagctgtgagcctcagcaggggtgggccctatgttaagaaaacatatttttttttgagacagagttttgctcttttcgcccaggctggagtacagtggtgcaatcttggctcactgcaatctctgcctcccaagttcaaggcgattcttgtgcctcagcctcctgagtagctgagattacaggcgcccaccaccacgcctggctaatttttgtatttttagtagagatagggtttcaccatgttggtcaagcttgtcttgaactcctgacctcaggtgatccacccgcctcggcctcccacagtgttgggattacagacgtgagccaccgtgcccagccagagaaaatcttatatttgacttgaaaatctgaacttaaaaggcaaccaaccagagaacctgaggggtaacggaaggacagcaaaacacagaggcctggccccmgtaggggaatcgggtgtaactcggaagaaatgctgacggagctcttaccatgtggcacgcgcaggagcatgctggcctgttttactcagccccggccctggccacagagaggacgggaccttccccaagtgaagtgggttcttcagttgtggaaaaggccttgccacccactgccaagcattcccttagctccccacagggcacggagagccaggacctgctccaggagggagaaaaatgtgagtgactcctgccctcacggtggttaggatccgattggagatgaaatttgacatgtgtgacctgactgagcaacagctttctttttaaaaatggccccgtttcccagattctgaagtacagtattttatacttgttatggaaaatcagagacatagaaaagtagaaagaaggccgagtgctgtggttcacacctgtaaggaggccgaggcaggtggatcactggaggtcaggagttcaagaccaacctggccaacatggtgaaaccccgtctctactaaaaatacaaaaattagccaggcacggtggcaggcacctgtagtccctgctactcaggaggctgaggcaggagaattgcttgaacccgggaggcggaggttgcagtgagctgagattgcgccactgcactccagcctg

SEQ ID NO: 25649 - DNA, 773 bp, Homo sapiens
caaatttgctccttcttggaaaattgagacaaattctcttcctttcttccatgtaccatctttctctccaagtatttccggcagcttatccttagtcatataagcaaacccagtaataacctttatcatctttgcagccatttaaataagcttatgatatctcttatgtgatctccctcaactaagatgtcaacttcttgttaaccacgttatctctaccatttctaaaggaaaaatccttttcctcgccagagaaagacacagaataagaggtagaaaatactgctttgtctctattatctgttaatgtctcaccatctgcccaaactctggtcttgtcacttcatccttcttactctaagcctggttcaaatcgtcctttttttcttttttctttctttttgttttgttttgttttgtttgagatggaattttgctcttgtcgcccaggctggagcgcaatggtgcaatctcggctcactgaaacctccgcctcctgggtttaagtgatcctcctgactcagcctccctagtagctyggattacaggcacccgctaccaggcccagctaattttttgtatttttagtagagatgggatttcaccatgttggtcaggctggtcttgagctcctgacctcaggtgatccacctgactcagcctcccaaagttctgggattaccattgcccagcccaaatagtccttttctgttgctctctatttatttcacaacaactttcacacattctgtacttcagtccttctgccactg

SEQ ID NO: 25650 - DNA, 560 bp, Homo sapiens
acaagagccactggtaagaatcagttgtctgcacactataatggaaatatagaatagtatttgatcacttattatgatggaaaaactttatgtgtacatgtacacacaaatatatacatatctatgtatatcaacacaattatatctagctatatatatgcatgcatcattctgtgtgtgtgtgtgtgtgtgtgtgtgtgtrtatatccaaatataaacagttaagaagaagtggaagagggattttactcccaagtattccgacttcagggcttgggctcttctatactaaactttctgaaagaaatgctaagtaaaattacaaacttcgagaacataatttagagaatattaatgatatatataattgagtaataatggtaatataactaataagaatcaggaagtaaagaaagaagtggcggaagaattggaagaggatcacttccctaaccttcataacagtgatcaatggatattatcttaaattaaaacatagtttataggagatggagatgggtggctcactcaaggctagaaatttgagaccagcctgggca

SEQ ID NO: 25651 - DNA, 1193 bp, Homo sapiens
aagtccttggacttcaccaaagaaaataacaggggttcaggagctatttttaatatttcaaaatgcctrttagtatgtcactaatcatataaaatatagtctttgtgtatggtaacagagtcttaaaggagaaaacttttagggaaaaattcatagacttgagcaaattttcaagtattcctaattctggaaacaagcgaatttctctcctgtcagagttgaaataatccttatgcatgtcaaatttaccctaatagagaagatactcattatcaaagcaaatgcaacaagactcaaagacttcaggaaagaagttgccggcagacattaaaggcaattttagccatttacttagaattgccagtcactgtaggagcagaagaggcatttttctgccaactggttgaagcttgtgccagaatgatcctgctgtttcttaattgtcctaaaagctcgtagccagcaatttccctgccaagcctgacctcactttcatgttttttgtaatatgcagatcacgaagtgtcccattcagagtgggaaaacaagaaattacttcctcatccttactcttggagctcatcacataatctgtatgatgtctctgtaaaataatacatcaatggccatctcaaagccttctgtgccattttttagtaccactgtccttgcctatgtttgaacatatgattaatcctcatggcaaacttgtaagagaggggacaacagtgttgttcccatttatgagtgataaaccaacagaattatgactgatggacatacgaatctatgtgtggtgtattaagttgaaagctgcataatgaaatttagagcatgctttctttttttatataaaagaaaaggcatgtaactgtgtatgtctgtgcatgcatatgcaggtgtgtacagaggtgagatataaaagctcagaaaagattttgtgatatacaatctagttacttcctaaggtggtaatgttacctcctaacagttacctcctaaaatgggagtaagtgaaagaagctaccgagaatgttcacttttatatctatgcacctctgtattgttttaatgttttgcaataagcatatattgtttttataatgtcaaaaagaatttttaaaaagagaaaaggtataaagttagtgatagatgttctccacaatcaacagccctatctagtttattccatt

SEQ ID NO: 25652 - DNA, 1193 bp, Homo sapiens
aagtccttggacttcaccaaagaaaataacaggggttcaggagctatttttaatatttcaaaatgcctgttagtatgtcactaatcatataaaatatagtctttgtgtatggtaacagagtcttaaagragaaaacttttagggaaaaattcatagacttgagcaaattttcaagtattcctaattctggaaacaagcgaatttctctcctgtcagagttgaaataatccttatgcatgtcaaatttaccctaatagagaagatactcattatcaaagcaaatgcaacaagactcaaagacttcaggaaagaagttgccggcagacattaaaggcaattttagccatttacttagaattgccagtcactgtaggagcagaagaggcatttttctgccaactggttgaagcttgtgccagaatgatcctgctgtttcttaattgtcctaaaagctcgtagccagcaatttccctgccaagcctgacctcactttcatgttttttgtaatatgcagatcacgaagtgtcccattcagagtgggaaaacaagaaattacttcctcatccttactcttggagctcatcacataatctgtatgatgtctctgtaaaataatacatcaatggccatctcaaagccttctgtgccattttttagtaccactgtccttgcctatgtttgaacatatgattaatcctcatggcaaacttgtaagagaggggacaacagtgttgttcccatttatgagtgataaaccaacagaattatgactgatggacatacgaatctatgtgtggtgtattaagttgaaagctgcataatgaaatttagagcatgctttctttttttatataaaagaaaaggcatgtaactgtgtatgtctgtgcatgcatatgcaggtgtgtacagaggtgagatataaaagctcagaaaagattttgtgatatacaatctagttacttcctaaggtggtaatgttacctcctaacagttacctcctaaaatgggagtaagtgaaagaagctaccgagaatgttcacttttatatctatgcacctctgtattgttttaatgttttgcaataagcatatattgtttttataatgtcaaaaagaatttttaaaaagagaaaaggtataaagttagtgatagatgttctccacaatcaacagccctatctagtttattccatt

SEQ ID NO: 25653 - DNA, 1193 bp, Homo sapiens
aagtccttggacttcaccaaagaaaataacaggggttcaggagctatttttaatatttcaaaatgcctgttagtatgtcactaatcatataaaatatagtctttgtgtatggtaacagagtcttaaaggagaaaacttttagggaaaaattcatagacttgagcaaattttcaagtattcctaattctggaaacaagygaatttctctcctgtcagagttgaaataatccttatgcatgtcaaatttaccctaatagagaagatactcattatcaaagcaaatgcaacaagactcaaagacttcaggaaagaagttgccggcagacattaaaggcaattttagccatttacttagaattgccagtcactgtaggagcagaagaggcatttttctgccaactggttgaagcttgtgccagaatgatcctgctgtttcttaattgtcctaaaagctcgtagccagcaatttccctgccaagcctgacctcactttcatgttttttgtaatatgcagatcacgaagtgtcccattcagagtgggaaaacaagaaattacttcctcatccttactcttggagctcatcacataatctgtatgatgtctctgtaaaataatacatcaatggccatctcaaagccttctgtgccattttttagtaccactgtccttgcctatgtttgaacatatgattaatcctcatggcaaacttgtaagagaggggacaacagtgttgttcccatttatgagtgataaaccaacagaattatgactgatggacatacgaatctatgtgtggtgtattaagttgaaagctgcataatgaaatttagagcatgctttctttttttatataaaagaaaaggcatgtaactgtgtatgtctgtgcatgcatatgcaggtgtgtacagaggtgagatataaaagctcagaaaagattttgtgatatacaatctagttacttcctaaggtggtaatgttacctcctaacagttacctcctaaaatgggagtaagtgaaagaagctaccgagaatgttcacttttatatctatgcacctctgtattgttttaatgttttgcaataagcatatattgtttttataatgtcaaaaagaatttttaaaaagagaaaaggtataaagttagtgatagatgttctccacaatcaacagccctatctagtttattccatt

SEQ ID NO: 25654 - DNA, 1193 bp, Homo sapiens
aagtccttggacttcaccaaagaaaataacaggggttcaggagctatttttaatatttcaaaatgcctgttagtatgtcactaatcatataaaatatagtctttgtgtatggtaacagagtcttaaaggagaaaacttttagggaaaaattcatagacttgagcaaattttcaagtattcctaattctggaaacaagcgaatttctctcctgtcagagttgaaataatccttatgcatgtcaaatttaccctaatagagaagatactcattatcaaagcaaatgcaacaagactcaaagacttcaggaaagaagttgccggcagacattaaaggcaattttagccatttacttagaattgccagtcactgtaggagcagaagaggcatttttctgccaactggttgaagcttgtgccagaatgatcctgctgtttcttaattgtcctaaaagctcgtagccrgcaatttccctgccaagcctgacctcactttcatgttttttgtaatatgcagatcacgaagtgtcccattcagagtgggaaaacaagaaattacttcctcatccttactcttggagctcatcacataatctgtatgatgtctctgtaaaataatacatcaatggccatctcaaagccttctgtgccattttttagtaccactgtccttgcctatgtttgaacatatgattaatcctcatggcaaacttgtaagagaggggacaacagtgttgttcccatttatgagtgataaaccaacagaattatgactgatggacatacgaatctatgtgtggtgtattaagttgaaagctgcataatgaaatttagagcatgctttctttttttatataaaagaaaaggcatgtaactgtgtatgtctgtgcatgcatatgcaggtgtgtacagaggtgagatataaaagctcagaaaagattttgtgatatacaatctagttacttcctaaggtggtaatgttacctcctaacagttacctcctaaaatgggagtaagtgaaagaagctaccgagaatgttcacttttatatctatgcacctctgtattgttttaatgttttgcaataagcatatattgtttttataatgtcaaaaagaatttttaaaaagagaaaaggtataaagttagtgatagatgttctccacaatcaacagccctatctagtttattccatt

SEQ ID NO: 25655 - DNA, 546 bp, Homo sapiens
ggcactcctattgccaatgaatgtgtaattgctgcctgtaataaacatgctattcatcttcctattaaattgctattgctcattttctggcccacactaaggagactaatactatatcttyagggaatgatagggaacacaaggctgccaagtacacagcccaaaatgaacccctgtattcattttccacacaatttattaagttgcctttatccctgactaatattattaataagcatatgctccaaagatagaccttccatggcccatttcttttaacctgttggtttgcagaggggcgtcagttaaggaactaaacaataattgttttttctctaagatttacaaaatttctgaccaaattatttcccaatgcattacttgcaaatctcaccaaagctctggaggaaagcacccttcttcaggaaggcccacactttcccttgcagcagtccaagtggattccataggttgacctccagctttaggctattctcagtttggctattgtctatgtttagtgaatggactgaatgctgtcccact

SEQ ID NO: 25656 - DNA, 546 bp, Homo sapiens
ggcactcctattgccaatgaatgtgtaattgctgcctgtaataaacatgctattcatcttcctattaaattgctattgctcattttctggcccacactaaggagactaatactatatcttcagggaatgatagggaacacaaggctgccaagtacacagcmcaaaatgaacccctgtattcattttccacacaatttattaagttgcctttatccctgactaatattattaataagcatatgctccaaagatagaccttccatggcccatttcttttaacctgttggtttgcagaggggcgtcagttaaggaactaaacaataattgttttttctctaagatttacaaaatttctgaccaaattatttcccaatgcattacttgcaaatctcaccaaagctctggaggaaagcacccttcttcaggaaggcccacactttcccttgcagcagtccaagtggattccataggttgacctccagctttaggctattctcagtttggctattgtctatgtttagtgaatggactgaatgctgtcccact

SEQ ID NO: 25657 - DNA, 1048 bp, Homo sapiens
agctagctctgtggccacaaacttccttagtactgtgctggggttctgaaggggtccaggtgctggccagatcaatgtgagtcgagcagctgtaaccatgggagacacagccccttgttttcctttccctataacagacagtccaagtgagataagtgcctgcgcatagaaagcttatcaaacttaattttaaatactcaaaactgaattctgtggaaaagtcactcccagaaacttttgtggtgtgatgtatggctgtatgtgccagagtggctttgcagacaatggaaactgggaaaatatccagagactgcttttgaacgctcacagccagaagagtcgatttggttctaggctagagkggggaaattgtgatgtggctgaaaggaacaagagtgcccctcagccggcaggcattcgctggggctccgaagttaaaccccaacataggaatgggctgaacataccagccctgtgctggtacaagtccttatgcatcccctgcgtctcctcccagtgtcgctggtgagtggctccctcggagaggggatgtgaggacagattttgctcttctaggatgtgtgggggatgactgagccagggctaagctggcaaggaaagggcagcttctataaacactgcagaatggacacagctggggactgctctgggaagggagatgccctccctccatccgggtgagcaaagccagaggtgtgaacaggctcttcccagcaaggggtgctggcagatagtggcctagggggatttctctatctctcctcctcgactgcgggggacagctaagatctgggacacatttatgtgaagctaacagccatgagcccagcattgctcttttctctcctgagaagtttctcctttttaactgtctccctggacgcctgggctgccaaaagaaaatgccttttatcttcaaattctccttgtcttttcagagctaggtacttaagggcttctcagttagtagacagataaatggtaactttggctttcttgcttataatcaagaatcattccactagaa

SEQ ID NO: 25658 - DNA, 1048 bp, Homo sapiens
agctagctctgtggccacaaacttccttagtactgtgctggggttctgaaggggtccaggtgctggccagatcaatgtgagtcgagcagctgtaaccatgggagacacagccccttgttttcctttccctataacagacagtccaagtgagataagtgcctgcgcatagaaagcttatcaaacttaattttaaatactcaaaactgaattctgtggaaaagtcactcccagaaacttttgtggtgtgatgtatggctgtatgtgccagagtggctttgcagacaatggaaactgggaaaatatccagagactgcttttgaacgctcacagccagaagagtcgatttggttctaggctagaggggggaaattgtgatgtggctgaaaggaacaagagtgcccctcagccggcaggcattcgctggggctccgaagttaaaccccaacataggaatgggctgaacataccagccctgtgctggtacaagtccttatgcatcccctgcgtctcctcccagtgtcgctggtgagtggctccctcggagaggggatgtgaggacagattttgctcttctrggatgtgtgggggatgactgagccagggctaagctggcaaggaaagggcagcttctataaacactgcagaatggacacagctggggactgctctgggaagggagatgccctccctccatccgggtgagcaaagccagaggtgtgaacaggctcttcccagcaaggggtgctggcagatagtggcctagggggatttctctatctctcctcctcgactgcgggggacagctaagatctgggacacatttatgtgaagctaacagccatgagcccagcattgctcttttctctcctgagaagtttctcctttttaactgtctccctggacgcctgggctgccaaaagaaaatgccttttatcttcaaattctccttgtcttttcagagctaggtacttaagggcttctcagttagtagacagataaatggtaactttggctttcttgcttataatcaagaatcattccactagaa

SEQ ID NO: 25659 - DNA, 1048 bp, Homo sapiens
agctagctctgtggccacaaacttccttagtactgtgctggggttctgaaggggtccaggtgctggccagatcaatgtgagtcgagcagctgtaaccatgggagacacagccccttgttttcctttccctataacagacagtccaagtgagataagtgcctgcgcatagaaagcttatcaaacttaattttaaatactcaaaactgaattctgtggaaaagtcactcccagaaacttttgtggtgtgatgtatggctgtatgtgccagagtggctttgcagacaatggaaactgggaaaatatccagagactgcttttgaacgctcacagccagaagagtcgatttggttctaggctagaggggggaaattgtgatgtggctgaaaggaacaagagtgcccctcagccggcaggcattcgctggggctccgaagttaaaccccaacataggaatgggctgaacataccagccctgtgctggtacaagtccttatgcatcccctgcgtctcctcccagtgtcgctggtgagtggctccctcggagaggggatgtgaggacagattttgctcttctaggatgtgtgggggatgactgagccagggctaagctggcaaggaaagggcagcttctataaacactgcagaatggacacagctggggactgctctgggaagggagatgccctccctccatccgggtgagcaaagccagaggtgtgaacaggctcttcccagcaaggggtgctggcagatagtggcctagggggatttctctatctctcctcctcgactgcgggggacagmtaagatctgggacacatttatgtgaagctaacagccatgagcccagcattgctcttttctctcctgagaagtttctcctttttaactgtctccctggacgcctgggctgccaaaagaaaatgccttttatcttcaaattctccttgtcttttcagagctaggtacttaagggcttctcagttagtagacagataaatggtaactttggctttcttgcttataatcaagaatcattccactagaa

SEQ ID NO: 25660 - DNA, 737 bp, Homo sapiens
ccatttcatttctgtgctttttcaacagaatttacaaagaaaacattgctatttatgttttcacttgtccacttaacatataactatcaaatgtcttttagatggtaaccatttttctaatgctatagaccacagacaattaaaaatacagacaggagctttttcttatcattgccattttcattattttactactttattcagtgcttactgtgtgctagatgcccactggaagcttataattatgatttattatatattgattatgtgccagacatatgaggaatgaaagttttggraaaaagtaggtatgatttaaggtaagcatgcagagagagaagaatttttctaggtaaagaagcagaagaagaatgtttggcagaaggaacatgcagcgaggtcgtgtgtttgccagaaggaacatctaatgagattgcctgtttgggaggaagagcagcaagtgcaaaagacaagatgcttgagtgaacatggcagggtttctgagcagttcacttttgctagtaccaaaagtgtgagataccagaggttgggaacgaggtgaatacttagctaaggcaagtttatgatatactttttaatactatagagatgagtaggtcttatcctgtgtgccatgggaaatttaccgggtagaatgctttggactgcaaatactagatgaacagtggctaaaacagtaagaaccagagttgttttggttgttcattgatatccta

SEQ ID NO: 25661 - DNA, 737 bp, Homo sapiens
ccatttcatttctgtgctttttcaacagaatttacaaagaaaacattgctatttatgttttcacttgtccacttaacatataactatcaaatgtcttttagatggtaaccatttttctaatgctatagaccacagacaattaaaaatacagacaggagctttttcttatcattgccattttcattattttactactttattcagtgcttactgtgtgctagatgcccactggaagcttataattatgatttattatatattgattatgtgccagacatatgaggaatgaaagttttgggaaaaagtaggtatgatttaaggtaagcatgcagagagagaagaatttttctaggtaaagaagcagaagaagaatgtttggcagaaggaacatgcagcgaggtcgtgtgtttgccagaaggaacatctaatgagattgcctgtttgggaggaagagcagcaagtgcaaaagacaagatgcttgagtgaacatggcagggtttctgagcagttcacttttgctagtaccaaaagtgtgagataccagaggttgggaaygaggtgaatacttagctaaggcaagtttatgatatactttttaatactatagagatgagtaggtcttatcctgtgtgccatgggaaatttaccgggtagaatgctttggactgcaaatactagatgaacagtggctaaaacagtaagaaccagagttgttttggttgttcattgatatccta

SEQ ID NO: 25662 - DNA, 737 bp, Homo sapiens
ccatttcatttctgtgctttttcaacagaatttacaaagaaaacattgctatttatgttttcacttgtccacttaacatataactatcaaatgtcttttagatggtaaccatttttctaatgctatagaccacagacaattaaaaatacagacaggagctttttcttatcattgccattttcattattttactactttattcagtgcttactgtgtgctagatgcccactggaagcttataattatgatttattatatattgattatgtgccagacatatgaggaatgaaagttttgggaaaaagtaggtatgatttaaggtaagcatgcagagagagaagaatttttctaggtaaagaagcagaagaagaatgtttggcagaaggaacatgcagcgaggtcgtgtgtttgccagaaggaacatctaatgagattgcctgtttgggaggaagagcagcaagtgcaaaagacaagatgcttgagtgaacatggcagggtttctgagcagttcacttttgctagtaccaaaagtgtgagataccagaggttgggaacgaggtgaatacttagctaaggcaagtttatgatakactttttaatactatagagatgagtaggtcttatcctgtgtgccatgggaaatttaccgggtagaatgctttggactgcaaatactagatgaacagtggctaaaacagtaagaaccagagttgttttggttgttcattgatatccta

SEQ ID NO: 25663 - DNA, 737 bp, Homo sapiens
ccatttcatttctgtgctttttcaacagaatttacaaagaaaacattgctatttatgttttcacttgtccacttaacatataactatcaaatgtcttttagatggtaaccatttttctaatgctatagaccacagacaattaaaaatacagacaggagctttttcttatcattgccattttcattattttactactttattcagtgcttactgtgtgctagatgcccactggaagcttataattatgatttattatatattgattatgtgccagacatatgaggaatgaaagttttgggaaaaagtaggtatgatttaaggtaagcatgcagagagagaagaatttttctaggtaaagaagcagaagaagaatgtttggcagaaggaacatgcagcgaggtcgtgtgtttgccagaaggaacatctaatgagattgcctgtttgggaggaagagcagcaagtgcaaaagacaagatgcttgagtgaacatggcagggtttctgagcagttcacttttgctagtaccaaaagtgtgagataccagaggttgggaacgaggtgaatacttagctaaggcaagtttatgatatactttttaatactatagaratgagtaggtcttatcctgtgtgccatgggaaatttaccgggtagaatgctttggactgcaaatactagatgaacagtggctaaaacagtaagaaccagagttgttttggttgttcattgatatccta

SEQ ID NO: 25664 - DNA, 529 bp, Homo sapiens
ctgaaaggtaatttcatttggactatctaatattattaaagcaaagaaaacaacattaaatcaaaaatttaaatttaaaatttcccatgcctctggctggctattttcactgcctttgaacctttgtgactcttcctctgatgtcagctttaagtcttgttctgttgagaaatccatatattcagttaaaatgaaccacttagaacagttaaaaactattgcctttataaaaatakatttaagacaacattttatttcataaattgagtgtttagtttttcatgaaatagttatttaggaaataattctcccaaacttcaacaaaccacttggggagacacctgatgtcattcactcacaaattcatccacccaacataaatgaacaaaaccaccagaaacacaactttaaaatacagtagaaacatataaggtaacacagtatgttgttctccacttcctaatagtgaagcagtaaatgtaaagaaaaggaaatttagttttaaagagaaacaagttttcccgcactt

SEQ ID NO: 25665 - DNA, 529 bp, Homo sapiens
ctgaaaggtaatttcatttggactatctaatattattaaagcaaagaaaacaacattaaatcaaaaatttaaatttaaaatttcccatgcctctggctggctattttcactgcctttgaacctttgtgactcttcctctgatgtcagctttaagtcttgttctgttgagaaatccatatattcagttaaaatgaaccacttagaacagttaaaaactattgcctttataaaaatagatttaagacaacattttatttcataaattgagtgtttagtttttcaygaaatagttatttaggaaataattctcccaaacttcaacaaaccacttggggagacacctgatgtcattcactcacaaattcatccacccaacataaatgaacaaaaccaccagaaacacaactttaaaatacagtagaaacatataaggtaacacagtatgttgttctccacttcctaatagtgaagcagtaaatgtaaagaaaaggaaatttagttttaaagagaaacaagttttcccgcactt

SEQ ID NO: 25666 - DNA, 564 bp, Homo sapiens
ggttcaagcgattctcctgtctcagtctccggagaagctgggattacaggcatgcaccatcakgccctgctaattttcgtgtttttagtagagacggggtttcaccattggccatgatggtcctgatcttttgaccttgtgatctgcctgctccagcctcccaaaatgctgggattagaggtgtgagccaccacacttatccttatttttatcttttaaaacaatgctatgagaacgtcttccttgattctgcatgtctttccccagataaacaggtacctccttccttgaggctgccttagtacttcactgatttttctactgcatctttaccacctgaactctacattattcctccacatgtctgtcccgtctgctccaagactgcagaggacagtcttgcacatcatcttactcacattttactcagaaatttcttattgagtcctgctaaatacatgctaggcattagggtttaaaaacaattaaaataaagcatgtcagggatggcttttctagaaaacatgcccaagcagagacttaaatattgagactagccagatt

SEQ ID NO: 25667 - DNA, 564 bp, Homo sapiens
ggttcaagcgattctcctgtctcagtctccggagaagctgggattacaggcatgcaccatcatgccctgctaattttcgtgtttttagtagagayggggtttcaccattggccatgatggtcctgatcttttgaccttgtgatctgcctgctccagcctcccaaaatgctgggattagaggtgtgagccaccacacttatccttatttttatcttttaaaacaatgctatgagaacgtcttccttgattctgcatgtctttccccagataaacaggtacctccttccttgaggctgccttagtacttcactgatttttctactgcatctttaccacctgaactctacattattcctccacatgtctgtcccgtctgctccaagactgcagaggacagtcttgcacatcatcttactcacattttactcagaaatttcttattgagtcctgctaaatacatgctaggcattagggtttaaaaacaattaaaataaagcatgtcagggatggcttttctagaaaacatgcccaagcagagacttaaatattgagactagccagatt

SEQ ID NO: 25668 - DNA, 899 bp, Homo sapiens
tgggggcaccatcaggaaatcaggagctccaaataccagggagggagggtcttacaggcacagaccttgccacaccagggaacataaaactctgagcacggaggtgcacccacctgtccattaagcagggagctccaaccctgctcaccactggctggccgggacctgtacatagtttgttctgcctacacatttgtttttcaatttgaattagttatctacatttaaacatattcagatttccagtttatcttgaaataagaccacacagggcccagggtctcaccctgggcagcctgcactcctcctggcagagtgggcggacttcaggtgaccacccatccctgtggctccccaggtgagcttcctgatcccggctggctgggttagcagcccccctgacaccatatgtgttcaaaagggagcctacccttggctgcaaggagttcacagtttatgctggatgagccagcacagccagggccaccgtgggcagcccacaagaggtagcctaattcccagtgaggcaagagaggtggggaaatgagcctgtagctggtgattaagagacctggggagggtgcagctggccagctggttcaggccgcatgctgagcacctgtgctaaccctgctacctctcttcttctggcagggactggtggtggccgtcctctactgcttcctcaayggggaggtgagtagtcttgggtcacccaggtacccaggagagctcctagccattggtttccgggtcagaaggagctacctgggaggggtggtaggaagggggatggaaagggtcagagggagtcctgggtctggtggcaggtggcttggccagttcttttaggagtctgaatttgcttaatgggagcaaggcttgttcaaaccatggct

SEQ ID NO: 25669 - DNA, 551 bp, Homo sapiens
ccaaagtgctgggattacaggcatgagccaccatgtctggcccaagtacaggactttttggacactgttatgagaaaaaatggagcagaggctttttacagcaatttctgagggggcttatgataggggactcttggtggatggttttaatcctttgaatgggtatgaggtaacattattgccataaaataaaagggttaggggcttaagaacagcagaaaaggattagaataggcactagtggaaaagcaaataaattagggatgaacagaccataattcagcggcaaataaggcccagctgagctgtacaacttatatttgtacaacacataaatggcctagttttacagctttcttgaacatttggcaacctaataataatggcaaacatgctaaggataatgcagtcttcccagaayttggaattagcaaaggagataagatgaaaggaaaacttaaaatataaaatgccttcttctgaagtctttcactgagtaaaaaccaggaaataataggctgacaaaatgaaaggagggctgcctaaatcca

SEQ ID NO: 25670 - DNA, 956 bp, Homo sapiens
cctgtacaaatgctcaacctgagattaaggggacagaaggagaatgaactcataggaggccatatggtcagcccgggctagagtctcagcctaccctcagcggaaggggcccyggcacccacagtgtggaccctgtaataaagggtaatgtccacttccatctttctggaaaaaaagaaaaagaaaaaaacagggagagtattttctgcctatgctgtgattagctatattgaaaagcaataaacaaagaaagattgttgtcattgattttgcagcacttgcactcatcagtaaacattattacacgttgacattttcatggtgctcagcttgcctgtaaacatttccccaccaatgtgccttgttcttgccttatacttatgaaacactatacatattaatctaaatgaagatactatactcattagaattaatcatgactaggagagttttcagtgcataagccaatcataatgagtccaccttcatgctataccttattacttttaaaaacatatacagtcatatttcattttattgcaggtcactttatttccattcacagatactgtaatttttttacaaattgaaggtttgtggcaaccctgcctcaagcaagtctatctgccatttttccaacaacatgtgctcacttcatgtctctgtgtcacattttgataattcccacaatatttcaaactcattattatcctattgattatggtgatctacaactagtagtctttgatgtggctattataattgttttggggtgccatgaactacactcatataagacagatattttaatcaatgttgtctgcattctgactgctccactgaccagccattcctccatttctctccctatcctccaacctccctattctctgagacacagtaatgttgaaattaggccaagtaataaccctacaatggcttctaagtgtttaagt

SEQ ID NO: 25671 - DNA, 956 bp, Homo sapiens
cctgtacaaatgctcaacctgagattaaggggacagaaggagaatgaactcataggaggccatatggtcagcccgggctagagtctcagcctaccctcagcggaaggggccctggcacccacagtgtggaccctgtaataaagggtaatgtccacttccatctttctggaaaaaaagaaaaagaaaaaaacagggagagtattttctgcctatgctgtgattagctatattgaaaagcaataaacaaagaaagattgttgtcattgattttgcagcacttgcactcatcagtaaacattattacacgttgacattttcatggtgctcagcttgcctgtaaacatttccccaccaatgtgccttgttcttgccttatacttatgaaacactatacatattaatctaaatgaagatactatactcattagaattaatcatgactaggagagttttcagtgcataagycaatcataatgagtccaccttcatgctataccttattacttttaaaaacatatacagtcatatttcattttattgcaggtcactttatttccattcacagatactgtaatttttttacaaattgaaggtttgtggcaaccctgcctcaagcaagtctatctgccatttttccaacaacatgtgctcacttcatgtctctgtgtcacattttgataattcccacaatatttcaaactcattattatcctattgattatggtgatctacaactagtagtctttgatgtggctattataattgttttggggtgccatgaactacactcatataagacagatattttaatcaatgttgtctgcattctgactgctccactgaccagccattcctccatttctctccctatcctccaacctccctattctctgagacacagtaatgttgaaattaggccaagtaataaccctacaatggcttctaagtgtttaagt

SEQ ID NO: 25672 - DNA, 751 bp, Homo sapiens
taaaaatacaaaaaaattagccaggtgtggtggcaggagcctgtagtcccagctacttgggaggctgaggcagaagaatggcatgaagccgggaggcagagtttgcagtgagccgagatcgtgccactgcgctccagcctgggcaacagagcgagattctgtctcaaaacaaaaaacaaaaaacaaaaacaaaagcaaaaactatgtgagctgctaataaattcactcaaatttatatataaatatttactgtagaatagaattcaacagaaagtgatccatttgggctccattcaaaaaaaggcaaaactgctgacctactctgagttctttcacataaaagcagagacatcaagttcaccattaataagagaacaaacaaattaaaacaccaccactcagaatccccacttctgcttctcaacctcactgtgcactttcccaggacatagtgccaatcttataagccttctctgtatgtagagaaaattacttcttggaacagaagcaaggaggggagtggtaatcagatttttggtttggagcacacagcagcaagaagaatgtatgggaaggagatgaatctaaccttagyttctctcagacttcacggtagtgtctccaatcccagcccagctctcttctgcctgacccccaccttcttcaccctacagccacactgatcttccttctttcctgctctcacctcagggactttgcacatgctgatctgtctgcctggaacagcact

SEQ ID NO: 25673 - DNA, 546 bp, Homo sapiens
gcaacagtgtccacacttcacagttgagatcaagctctttatccacatgtacacagacattaagtcagcccagatagattacaacctgaggatcaagcccttctctggctggctccagggcttgtgttctacctgctccaccacaatgtgtcataaagtctgcaggttccccatttccctgcacaaacatgctacccagtcctgccagccacccatccagtagcttaagacaaaacctgatttttccttccccagctgagatctaccctctacagagttacctaggtgaggtgaatattgaaacggcctcatttaaacccctacccaaaagcctccagtgtcttatgattatgcttagaatgaaatccacatttccttatgtgattyacgtggccctgtgtaatctgtccttggcctctctcttctccctttctgcctttctcttccgtatttccaatcactttagtgttctagcagattgtccaataaatcaaaggtgttttagtgtcatggacttcccctccacttagaattttcttctccaaa

SEQ ID NO: 25674 - DNA, 550 bp, Homo sapiens
tgctgcttactgcccatgggactttggtcaatttacttggcattccttcctatgattgcctaatttataacatgaggataacactagctcctaaagttgttctgaaggttgtgtgagctaatgtattgatgtttattgacttggcacactaaatgctcaatatgtcatatcactgttatggatgtgttcrgttttccaaatctcaagccccacttctcctgccattttcctgcttattgcgggtacctattttcaggaacagtagagtccagaatttccttgctacccagacttacactgtaaggcagataagccagataggagattgtttaactgcttcagagcagcctccaaaaggaaagcttggccttgggctggattcaatgtgatcaagcccagctctttgtggctagtgtgtgtatgtgtgtgtgtgtgtgtgtgtgtgttttgtttttgttttgttttgtttttgaggtggagtcttgctctgttgcccaggctggagtgcagtggcgtgaccctggctcactgcaacctttgcctctgggtt

SEQ ID NO: 25675 - DNA, 541 bp, Homo sapiens
caatagccaaagctctctcttgactgccttcttcagtggctgcyctgtttctctgcccctgtcattaggagactccttagaagaattatgtgagttgcccattcaaattcctctcctccctggaaacccctgtaatctggcttttgccaccattgctcttttgaaaccgtgctgtcggggtccctggtgatttgcacattgctgagtgcttggttaagtcttttcagtccccatattggcctgtgacagacactggacgttctattctggctggtagaccttaggttcctgacccagcttctccccatctccccacctcatgaccctggagccctccagagagcaggccttggtgctgtgcttttctctgtctgtgcacactttcttggtgatctcatccactttcaaaggtctgagtctttctttgacccagacaactaccaaatgtatatgcaggagacattcactctattgtgttgtacttgaagcaaacttgtgcctggccccaaagggagacactcttccttctgagactttgcat

SEQ ID NO: 25676 - DNA, 580 bp, Homo sapiens
atacccttaccaaggacctctatcttgactggctgtaaggtttaatcagaagccaagatccattttcacatttcagagccctggagaacagtgtcttcaatctgcccatctgttgcttcccaagtggcagaccaagcacctaaaccattggcaatagcctgagagttgtttacacctagcagggtttcwtcagggcagaattagccagagctgtgagaaccactttgggttctgcccactgatcaaaatggttgtggtccttttcagttctgcatggtgggcattgaggtgggacagctgcagcctcccagtagatgctgtctgatttcagcctgatccagccatcagtgagccaggcccaggcatttaagggagcccttgggaattgagggcccactgagccaacaacttcacttcaggtgcagagtgggggataaagtttccctagaggggtacctgccatttttccacataaagctgaaatataggtggggcaagcccactgcatgagcaccagcctctttgcatgagttcccctgagccccatggggatatttaatcacagaatatctaatatcta

SEQ ID NO: 25677 - DNA, 993 bp, Homo sapiens
cttttaaagtgagattacactccctacaggatatgttgtacatgctgacagccaagtttccaaggttttcattcaacctaatactcatttttggtcatattacggctttgagcaaaatgctgaacatgaagaagctgaattgaagatgatactaagtggtgacagatagtaatccccaggatgcatcttggttgtatcaaagagatacaaaagaaacttaaagacagaggttttaaagtcagagcaatcatagattgccaataacttactaataatatgtaaatttaaaacatgtcaaacacaggtaggacaacctcagggaagcatagaaatcagggagtcaaagtggcaagcattgataatgttcacccaccacaaacgagggctgagggtcctccctttgagaggcaaagctcaaaagagaagggttaggattggtcaagttattacagtttatggccattaagccaatgtttaacattgttttccctagaatgccagtgttgttctaatattgtcctgtgaaagttttgatgccggcagtattttcttctaaaatgtatttaaaatatattgaagmatacggtaattaggaggccagagatctagcaactgaagcagcatatggccaagccgtgtggggtgcgcctgagacgggaggcctgtaaacaggtggagatcttcaggcagaatcttttccaggaggctgaggaattcctctacagattcttgccacagaaaatcatatacttgaatcagctcttgcaaggtactgcctcaatgtggctgacctgacttccctccgggccccactggacatctcatcccaggccctccacccaaggatgatgagatggaaacagataagcaggagatgaaagaagtccctaagagtggatttctccctaggaatgagaaggtcctgttcctgcttgccctggttaagccaggagtctgtagtctcaaagagaaatgcattctagtgatcacagg
